United States Patent Application Publication US 2024/0327476 A1 - sequence listing, part 22

SEQ ID NO: 24610 - DNA, 558 bp, Homo sapiens
  source 1..558: mol_type = unassigned DNA
gtgcgcgagggcgcgcgcgtcccgagccctccacccgtcgtgccggcgccgcccggaccgccagatgctgtgtgctgtggacccacctggggttcatggagtgggccacggggcccagccctaagcactgctgcgcccagggtcgccgcgcctcctgctgaggggtccccgtgccactggctctcaccattgccctcgcctgccgatggcctctgctgcccagcctggggccagctctaccgcctgagccccctgccccactccaggactcaccgtaccccgatggggtcgtgtccccagccttctctgcagtcccttctgccctgccgggcccgtcgggaggcgccatggctcggatgaaccgcccggccccggtggaggtgagctacaaacacatgcgcttcctcatcacccacaaccccaccaacgccacgctcagcaccttcattgaggacctgaagaagtacggggctaccactgtggtgcgtgtgtgtgaagtgacctatgacaaaacgccgctggagaaggatggcatcaccgttgtggactggccgtttg

SEQ ID NO: 24611 - DNA, 3406 bp, Homo sapiens
  source 1..3406: mol_type = unassigned DNA
agctgggggttggggttggcgctagcgcagcggctcgcctggtactgtgggagagcggcggctgctcctggaagttgtggtgtcgggagcccagccggtgccgccgcagccgccgcctagggcggtggggaggaggagggagccgcggggcttggcggggtcgggagggagggacgtgctgggggaacgagctggggaagacggagcgggctctgtgccgggcgggcgggcggcgggggggccagcgaccgcagccggggggacgcgggaggatggagcaagtggagatcctgaggaaattcatccagagggtccaggccatgaagagtcctgaccacaatggggaggacaacttcgcccgggacttcatgcggttaagaagattgtctaccaaatatagaacagaaaagatatatcccacagccactggagaaaaagaagaaaatgttaaaaagaacagatacaaggacatactgccatttgatcacagccgagttaaattgacattaaagactccttcacaagattcagactatatcaatgcaaattttataaagggcgtctatgggccaaaagcatatgtagcaactcaaggacctttagcaaatacagtaatagatttttggaggatgatatgggagtataatgttgtgatcattgtaatggcctgccgagaatttgagatgggaaggaaaaaatgtgagcgctattggcctttgtatggagaagaccccataacgtttgcaccatttaaaatttcttgtgaggatgaacaagcaagaacagactacttcatcaggacactcttacttgaatttcaaaatgaatctcgtaggctgtatcagtttcattatgtgaactggccagaccatgatgttccttcatcatttgattctattctggacatgataagcttaatgaggaaatatcaagaacatgaagatgttcctatttgtattcattgcagtgcaggctgtggaagaacaggtgccatttgtgccatagattatacgtggaatttactaaaagctgggaaaataccagaggaatttaatgtatttaatttaatacaagaaatgagaacacaaaggcattctgcagtacaaacaaaggagcaatatgaacttgttcatagagctattgcccaactgtttgaaaaacagctacaactatatgaaattcatggagctcagaaaattgctgatggagtgaatgaaattaacactgaaaacatggtcagctccatagagcctgaaaaacaagattctcctcctccaaaaccaccaaggacccgcagttgccttgttgaaggggatgctaaagaagaaatactgcagccaccggaacctcatccagtgccacccatcttgacaccttctcccccttcagcttttccaacagtcactactgtgtggcaggacaatgatagataccatccaaagccagtgttgcatatggtttcatcagaacaacattcagcagacctcaacagaaactatagtaaatcaacagaacttccagggaaaaatgaatcaacaattgaacagatagataaaaaattggaacgaaatttaagttttgagattaagaaggtccctctccaagagggaccaaaaagttttgatgggaacacacttttgaataggggacatgcaattaaaattaaatctgcttcaccttgtatagctgataaaatctctaagccacaggaattaagttcagatctaaatgtcggtgatacttcccagaattcttgtgtggactgcagtgtaacacaatcaaacaaagtttcagttactccaccagaagaatcccagaattcagacacacctccaaggccagaccgcttgcctcttgatgagaaaggacatgtaacgtggtcatttcatggacctgaaaatgccatacccatacctgatttatctgaaggcaattcctcagatatcaactatcaaactaggaaaactgtgagtttaacaccaagtcctacaacacaagttgaaacacctgatcttgtggatcatgataacacttcaccactcttcagaacacccctcagttttactaatccacttcactctgatgactcagactcagatgaaagaaactctgatggtgctgtgacccagaataaaactaatatttcaacagcaagtgccacagtttctgctgccactagtactgaaagcatttctactaggaaagtattgccaatgtccattgctagacataatatagcaggaacaacacattcaggtgctgaaaaagatgttgatgttagtgaagattcacctcctcccctacctgaaagaactcctgaatcgtttgtgttagcaagtgaacataatacacctgtaagatcggaatggagtgaacttcaaagtcaggaacgatctgaacaaaaaaagtctgaaggcttgataacctctgaaaatgagaaatgtgatcatccagcgggaggtattcactatgaaatgtgcatagaatgtccacctactttcagtgacaagagagaacaaatatcagaaaatccaacagaagccacagatattggttttggtaatcgatgtggaaaacccaaaggaccaagagatccaccttcagaatggacatgattcagggagctagaagacactttaagttatactggaaaattcaggtgccactgaaagccagatttatagtattccatctttaatatgtgggactaacagcagtgtagattgttaccttaatattttttgctgggaccatctacctgccttatactacacttaggaaaaagtattacatatggtttattttgaaacttcaagtattattgccttaatgtctcttaaccctgttacacgctgcttgtagacatgttaatatagtaatacctttatgatatattgagtttaaggactactctttttctgttttatcatgtatgcattattttgtatatgtacagggcaagtaggtatataatttgataaagttgcaattgaaatattattaacagaagatgtaagaaatttctgcatggtctaaatctttgtgtactttatttgtaaattatttgccctggagttttagaaaatagtttctgaattttaaacttgctggattcatgcagccagctttgcaggttatcagagatcaaagattgtaataataattttgtaaattgtaagcaaaaagttatttttatattatatacagtctaattgttcatcctaattgttcctgttttcatctagtcagagattcagtaagtgccttggaacaatattgaattctcttagcttgtgtgtgtttctttaatatttgaactcaagtgggattagaagactatcaaaatacatgtatgtttcaggatatttgacctgtcattaaaaaaaacaaacagttttacagtgcc

SEQ ID NO: 24612 - DNA, 2316 bp, Homo sapiens
  source 1..2316: mol_type = unassigned DNA
gtcgaggcaaggtatctggctgtgaccgggaggagtgcagatcgtggctgacagaggaacgggggtattgagcggttaagaagattgtctaccaaatatagaacagaaaagatatatcccacagccactggagaaaaagaagaaaatgttaaaaagaacagatacaaggacatactgccatttgatcacagccgagttaaattgacattaaagactccttcacaagattcagactatatcaatgcaaattttataaagggcgtctatgggccaaaagcatatgtagcaactcaaggacctttagcaaatacagtaatagatttttggaggatgatatgggagtataatgttgtgatcattgtaatggcctgccgagaatttgagatgggaaggaaaaaatgtgagcgctattggcctttgtatggagaagaccccataacgtttgcaccatttaaaatttcttgtgaggatgaacaagcaagaacagactacttcatcaggacactcttacttgaatttcaaaatgaatctcgtaggctgtatcagtttcattatgtgaactggccagaccatgatgttccttcatcatttgattctattctggacatgataagcttaatgaggaaatatcaagaacatgaagatgttcctatttgtattcattgcagtgcaggctgtggaagaacaggtgccatttgtgccatagattatacgtggaatttactaaaagctgggaaaataccagaggaatttaatgtatttaatttaatacaagaaatgagaacacaaaggcattctgcagtacaaacaaaggagcaatatgaacttgttcatagagctattgcccaactgtttgaaaaacagctacaactatatgaaattcatggagctcagaaaattgctgatggagtgaatgaaattaacactgaaaacatggtcagctccatagagcctgaaaaacaagattctcctcctccaaaaccaccaaggacccgcagttgccttgttgaaggggatgctaaagaagaaatactgcagccaccggaacctcatccagtgccacccatcttgacaccttctcccccttcagcttttccaacagtcactactgtgtggcaggacaatgatagataccatccaaagccagtgttgcatatggtttcatcagaacaacattcagcagacctcaacagaaactatagtaaatcaacagaacttccagggaaaaatgaatcaacaattgaacagatagataaaaaattggaacgaaatttaagttttgagattaagaaggtccctctccaagagggaccaaaaagttttgatgggaacacacttttgaataggggacatgcaattaaaattaaatctgcttcaccttgtatagctgataaaatctctaagccacaggaattaagttcagatctaaatgtcggtgatacttcccagaattcttgtgtggactgcagtgtaacacaatcaaacaaagtttcagttactccaccagaagaatcccagaattcagacacacctccaaggccagaccgcttgcctcttgatgagaaaggacatgtaacgtggtcatttcatggacctgaaaatgccatacccatacctgatttatctgaaggcaattcctcagatatcaactatcaaactaggaaaactgtgagtttaacaccaagtcctacaacacaagttgaaacacctgatcttgtggatcatgataacacttcaccactcttcagaacacccctcagttttactaatccacttcactctgatgactcagactcagatgaaagaaactctgatggtgctgtgacccagaataaaactaatatttcaacagcaagtgccacagtttctgctgccactagtactgaaagcatttctactaggaaagtattgccaatgtccattgctagacataatatagcaggaacaacacattcaggtgctgaaaaagatgttgatgttagtgaagattcacctcctcccctacctgaaagaactcctgaatcgtttgtgttagcaagtgaacataatacacctgtaagatcggaatggagtgaacttcaaagtcaggaacgatctgaacaaaaaaagtctgaaggcttgataacctctgaaaatgagaaatgtgatcatccagcgggaggtattcactatgaaatgtgcatagaatgtccacctactttcagtgacaagagagaacaaatatcagaaaatccaacagaagccacagatattggttttggtaatcgatgtggaaaacccaaaggaccaagagatccaccttcagaatggacatga

SEQ ID NO: 24613 - DNA, 2253 bp, Homo sapiens
  source 1..2253: mol_type = unassigned DNA
gtcgaggcaaggtatctggctgtgaccgggaggagtgcagatcgtggctgacagaggaacgggggtattgagcggttaagaagattgtctaccaaatatagaacagaaaagatatatcccacagccactggagaaaaagaagaaaatgttaaaaagaacagatacaaggacatactgccatttgatcacagccgagttaaattgacattaaagactccttcacaagattcagactatatcaatgcaaattttataaagggcgtctatgggccaaaagcatatgtagcaactcaaggacctttagcaaatacagtaatagatttttggaggatgatatgggagtataatgttgtgatcattgtaatggcctgccgagaatttgagatgggaaggaaaaaatgtgagcgctattggcctttgtatggagaagaccccataacgtttgcaccatttaaaatttcttgtgaggatgaacaagcaagaacagactacttcatcaggacactcttacttgaatttcaaaatgaatctcgtaggctgtatcagtttcattatgtgaactggccagaccatgatgttccttcatcatttgattctattctggacatgataagcttaatgaggaaatatcaagaacatgaagatgttcctatttgtattcattgcagtgcaggctgtggaagaacaggtgccatttgtgccatagattatacgtggaatttactaaaagctgggaaaataccagaggaatttaatgtatttaatttaatacaagaaatgagaacacaaaggcattctgcagtacaaacaaaggagcaatatgaacttgttcatagagctattgcccaactgtttgaaaaacagctacaactatatgaaattcatggagctcagaaaattgctgatggagtgaatgaaattaacactgaaaacatggtcagctccatagagcctgaaaaacaagattctcctcctccaaaaccaccaaggacccgcagttgccttgttgaaggggatgctaaagaagaaatactgcagccaccggaacctcatccagtgccacccatcttgacaccttctcccccttcagcttttccaacagtcactactgtgtggcaggacaatgatagataccatccaaagccagtgttgcatatggtttcatcagaacaacattcagcagacctcaacagaaactatagtaaatcaacagaacttccagggaaaaatgaatcaacaattgaacagatagataaaaaattggaacgaaatttaagttttgagattaagaaggtccctctccaagagggaccaaaaagttttgatgggaacacacttttgaataggggacatgcaattaaaattaaatctgcttcaccttgtatagctgataaaatctctaagccacaggaattaagttcagatctaaatgtcggtgatacttcccagaattcttgtgtggactgcagtgtaacacaatcaaacaaagtttcagttactccaccagaagaatcccagaattcagacacacctccaaggccagaccgcttgcctcttgatgagaaaggacatgtaacgtggtcatttcatggacctgaaaatgccatacccatacctgatttatctgaaggcaattcctcagatatcaactatcaaactaggaaaactgtgagtttaacaccaagtcctacaacacaagttgaaacacctgatcttgtggatcatgataacacttcaccactcttcagaacacccctcagttttactaatccacttcactctgatgactcagactcagatgaaagaaactctgatggtgctgtgacccagaataaaactaatatttcaacagcaagtgccacagtttctgctgccactagtactgaaagcatttctactaggaaagtattgccaatgtccattgctagacataatagcaggaacaacacattcaggtgctgaaaaagatgttgatgttagtgaagattcacctcctcccctacctgaaagaactcctgaatcgtttgtgttagcaagtgaacataatacacctgtaagatcggaatggagtgaacttcaaagtcaggaacgatctgaacaaaaaaagtctgaaggcttgataacctctgaaaatgagaaatgtgatcatccagcgggaggtattcactatgaaatgtgcatagaatgtccacctactttcagtgacaagagagaacaaatatcagaaaatccaacagaagccacagatattgg

SEQ ID NO: 24614 - DNA, 7546 bp, Homo sapiens
  source 1..7546: mol_type = unassigned DNA
cgtccctgcagccctcgcccggcgctccagtagcaggacccggtctcgggaccagccggtaatatgcacgtgtcactagctgaggccctggaggttcggggtggaccacttcaggaggaagaaatatgggctgtattaaatcaaagtgctgaaagtctccaagaattattcagaaaagtaagcctagctgatcctgctgcccttggcttcatcatttctccatggtctctgctgttgctgccatctggtagtgtgtcatttacagatgaaaatatttccaatcaggatcttcgagcattcactgcaccagaggttcttcaaaatcagtcactaacttctctctcagatgttgaaaagatccacatttattctcttggaatgacactgtattggggggctgattatgaagtgcctcagagccaacctattaagcttggagatcatctcaacagcatactgcttggaatgtgtgaggatgttatttacgctcgagtttctgttcggactgtgctggatgcttgcagtgcccacattaggaatagcaattgtgcaccctcattttcctacgtgaaacacttggtaaaactggttctgggaaatctttctgggacagatcagctttcctgtaacagtgaacaaaagcctgatcgaagccaggctattcgagatcgattgcgaggaaaaggattaccaacaggaagaagctctacttctgatgtactagacatacaaaagcctccactctctcatcagacctttcttaacaaagggcttagtaaatctatgggatttctgtccatcaaagatacacaagatgagaattatttcaaggacattttatcagataattctggacgtgaagattctgaaaatacattctccccttaccagttcaaaactagtggcccagaaaaaaaacccatccctggcattgatgtgctttctaagaagaagatctgggcttcatccatggacttgctttgtacagctgacagagacttctcttcaggagagactgccacatatcgtcgttgtcaccctgaggcagtaacagtgcggacttcaactactcctagaaaaaaggaggcaagatactcagatggaagtatagccttggatatctttggccctcagaaaatggatccaatatatcacactcgagaattgcccacctcctcagcaatatcaagtgctttggaccgaatccgagagagacaaaagaaacttcaggttctgagggaagccatgaatgtagaagaaccagttcgaagatacaaaacttatcatggtgatgtctttagtacctccagtgaaagtccatctattatttcctctgaatcagatttcagacaagtgagaagaagtgaagcctcaaagaggtttgaatccagcagtggtctcccaggggtagatgaaaccttaagtcaaggccagtcacagagaccgagcagacaatatgaaacaccctttgaaggcaacttaattaatcaagagatcatgctaaaacggcaagaggaagaactgatgcagctacaagccaaaatggcccttagacagtctcggttgagcctatatccaggagacacaatcaaagcgtccatgcttgacatcaccagggatccgttaagagaaattgccctagaaacagccatgactcaaagaaaactgaggaatttctttggccctgagtttgtgaaaatgacaattgaaccatttatatctttggatttgccacggtctattcttactaagaaagggaagaatgaggataaccgaaggaaagtaaacataatgcttctgaacgggcaaagactggaactgacctgtgataccaaaactatatgtaaagatgtgtttgatatggttgtggcacatattggcttagtagagcatcatttgtttgctttagctaccctcaaagataatgaatatttctttgttgatcctgacttaaaattaaccaaagtggccccagagggatggaaagaagaaccaaagaaaaagaccaaagccactgttaattttactttgtttttcagaattaaattttttatggatgatgttagtctaatacaacatactctgacgtgtcatcagtattaccttcagcttcgaaaagatattttggaggaaaggatgcactgtgatgatgagacttccttattgctggcatccttggctctccaggctgagtatggagattatcaaccagaggttcatggtgtgtcttactttagaatggagcactatttgcccgccagagtgatggagaaacttgatttatcctatatcaaagaagagttacccaaattgcataatacctatgtgggagcttctgaaaaagagacagagttagaatttttaaaggtctgccaaagactgacagaatatggagttcattttcaccgagtgcaccctgagaagaagtcacaaacaggaatattgcttggagtctgttctaaaggtgtccttgtgtttgaagttcacaatggagtgcgcacattggtccttcgctttccatggagggaaaccaagaaaatatctttttctaaaaagaaaatcacattgcaaaatacatcagatggaataaaacatggcttccagacagacaacagtaagatatgccagtacctgctgcacctctgctcttaccagcataagttccagctacagatgagagcaagacagagcaaccaagatgcccaagatattgatgtgctacacaaaagatggagcatagtatcttcaccagaaagggagatcaccttagtgaacctgaaaaaagatgcaaagtatggcttgggatttcaaattattggtggggagaagatgggaagactggacctaggcatatttatcagttcagttgcccctggaggaccagctgacttggatggatgcttgaagccaggagaccgtttgatatctgtgaatagtgtgagtctggagggagtcagccaccatgctgcaattgaaattttgcaaaatgcacctgaagatgtgacacttgttatctctcagccaaaagaaaagatatccaaagtgccttctactcctgtgcatctcaccaatgagatgaaaaactacatgaagaaatcttcctacatgcaagacagtgctatagattcttcttccaaggatcaccactggtcacgtggtaccctgaggcacatctcggagaactcctttgggccatctgggggcctgcgggaaggaagcctgagttctcaagattccaggactgagagtgccagcttgtctcaaagccaggtcaatggtttctttgccagccatttaggtgaccaaacctggcaggaatcacagcatggcagcccttccccatctgtaatatccaaagccaccgagaaagagactttcactgatagtaaccaaagcaaaactaaaaagccaggcatttctgatgtaactgattactcagaccgtggagattcagacatggatgaagccacttactccagcagtcaggatcatcaaacaccaaaacaggaatcttcctcttcagtgaatacatccaacaagatgaattttaaaactttttcttcatcacctcctaagcctggagatatctttgaggttgaactggctaaaaatgataacagcttggggataagtgtcacgggaggtgtgaatacgagtgtcagacatggtggcatttatgtgaaagctgttattccccagggagcagcagagtctgatggtagaattcacaaaggtgatcgcgtcctagctgtcaatggagttagtctagaaggagccacccataagcaagctgtggaaacactgagaaatacaggacaggtggttcatctgttattagaaaagggacaatctccaacatctaaagaacatgtcccggtaaccccacagtgtaccctttcagatcagaatgcccaaggtcaaggcccagaaaaagtgaagaaaacaactcaggtcaaagactacagctttgtcactgaagaaaatacatttgaggtaaaattatttaaaaatagctcaggtctaggattcagtttttctcgagaagataatcttataccggagcaaattaatgccagcatagtaagggttaaaaagctctttcctggacagccagcagcagaaagtggaaaaattgatgtaggagatgttatcttgaaagtgaatggagcctctttgaaaggactatctcagcaggaagtcatatctgctctcaggggaactgctccagaagtattcttgcttctctgcagacctccacctggtgtgctaccggaaattgatactgcgcttttgaccccacttcagtctccagcacaagtacttccaaacagcagtaaagactcttctcagccatcatgtgtggagcaaagcaccagctcagatgaaaatgaaatgtcagacaaaagcaaaaaacagtgcaagtccccatccagaagagacagttacagtgacagcagtgggagtggagaagatgacttagtgacagctccagcaaacatatcaaattcgacctggagttcagctttgcatcagactctaagcaacatggtatcacaggcacagagtcatcatgaagcacccaagagtcaagaagataccatttgtaccatgttttactatcctcagaaaattcccaataaaccagagtttgaggacagtaatccttcccctctaccaccggatatggctcctgggcagagttatcaaccccaatcagaatctgcttcctctagttcgatggataagtatcatatacatcacatttctgaaccaactagacaagaaaactggacacctttgaaaaatgacttggaaaatcaccttgaagactttgaactggaagtagaactcctcattaccctaattaaatcagaaaaaggaagcctgggttttacagtaaccaaaggcaatcagagaattggttgttatgttcatgatgtcatacaggatccagccaaaagtgatggaaggctaaaacctggggaccggctcataaaggttaatgatacagatgttactaatatgactcatacagatgcagttaatctgctccgggctgcatccaaaacagtcagattagttattggacgagttctagaattacccagaataccaatgttgcctcatttgctaccggacataacactaacgtgcaacaaagaggagttgggtttttccttatgtggaggtcatgacagcctttatcaagtggtatatattagtgatattaatccaaggtccgtcgcagccattgagggtaatctccagctattagatgtcatccattatgtgaacggagtcagcacacaaggaatgaccttggaggaagttaacagagcattagacatgtcacttccttcattggtattgaaagcaacaagaaatgatcttccagtggtccccagctcaaagaggtctgctgtttcagctccaaagtcaaccaaaggcaatggttcctacagtgtggggtcttgcagccagcctgccctcactcctaatgattcattctccacggttgctggggaagaaataaatgaaatatcgtaccccaaaggaaaatgttctacttatcagataaagggatcaccaaacttgactctgcccaaagaatcttatatacaagaagatgacatttatgatgattcccaagaagctgaagttatccagtctctgctggatgttgtggatgaggaagcccagaatcttttaaacgaaaataatgcagcaggatactcctgtggtccaggtacattaaagatgaatgggaagttatcagaagagagaacagaagatacagactgcgatggttcacctttacctgagtattttactgaggccaccaaaatgaatggctgtgaagaatattgtgaagaaaaagtaaaaagtgaaagcttaattcagaagccacaagaaaagaagactgatgatgatgaaataacatggggaaatgatgagttgccaatagagagaacaaaccatgaagattctgataaagatcattcctttctgacaaacgatgagctcgctgtactccctgtcgtcaaagtgcttccctctggtaaatacacgggtgccaacttaaaatcagtcattcgagtcctgcggggtttgctagatcaaggaattccttctaaggagctggagaatcttcaagaattaaaacctttggatcagtgtctaattgggcaaactaaggaaaacagaaggaagaacagatataaaaatatacttccctatgatgctacaagagtgcctcttggagatgaaggtggctatatcaatgccagcttcattaagataccagttgggaaagaagagttcgtttacattgcctgccaaggaccactgcctacaactgttggagacttctggcagatgatttgggagcaaaaatccacagtgatagccatgatgactcaagaagtagaaggagaaaaaatcaaatgccagcgctattggcccaacatcctaggcaaaacaacaatggtcagcaacagacttcgactggctcttgtgagaatgcagcagctgaagggctttgtggtgagggcaatgacccttgaagatattcagaccagagaggtgcgccatatttctcatctgaatttcactgcctggccagaccatgatacaccttctcaaccagatgatctgcttacttttatctcctacatgagacacatccacagatcaggcccaatcattacgcactgcagtgctggcattggacgttcagggaccctgatttgcatagatgtggttctgggattaatcagtcaggatcttgattttgacatctctgatttggtgcgctgcatgagactacaaagacacggaatggttcagacagaggatcaatatattttctgctatcaagtcatcctttatgtcctgacacgtcttcaagcagaagaagagcaaaaacagcagcctcagcttctgaagtgacatgaaaagagcctctggatgcatttccatttctctccttaacctccagcagactcctgctctctatccaaaataaagatcacagagcagcaagttcatacaacatgcatgttctcctctatcttagaggggtattcttcttgaaaataaaaaatattgaaatgctgtatttttacagctactttaacctatgataattatttacaaaattttaacactaaccaaacaatgcagatcttagggatgattaaaggcagcatttgatgatagcagacattgttacaaggacatggtgagtctatttttaatgcaccaatcttgtttatagcaaaaatgttttccaatattttaataaagtagttattttataggggatacttgaaaccagtatttaagctttaaatgacagtaatattggcatagaaaaaagtagcaaatgtttactgtatcaatttctaatgtttactatatagaatttcctgtaatatatttatatactttttcatgaaaatggagttatcagttatctgtttgttactgcatcatctgtttgtaatcattatctcactttgtaaataaaaacacaccttaaaacatg

SEQ ID NO: 24615 - DNA, 7925 bp, Homo sapiens
  source 1..7925: mol_type = unassigned DNA
caattcttgtttaccaaggtaagcctagctgatcctgctgcccttggcttcatcatttctccatggtctctgctgttgctgccatctggtagtgtgtcatttacagatgaaaatatttccaatcaggatcttcgagcattcactgcaccagaggttcttcaaaatcagtcactaacttctctctcagatgttgaaaagatccacatttattctcttggaatgacactgtattggggggctgattatgaagtgcctcagagccaacctattaagcttggagatcatctcaacagcatactgcttggaatgtgtgaggatgttatttacgctcgagtttctgttcggactgtgctggatgcttgcagtgcccacattaggaatagcaattgtgcaccctcattttcctacgtgaaacacttggtaaaactggttctgggaaatctttctgggacagatcagctttcctgtaacagtgaacaaaagcctgatcgaagccaggctattcgagatcgattgcgaggaaaaggattaccaacaggaagaagctctacttctgatgtactagacatacaaaagcctccactctctcatcagacctttcttaacaaagggcttagtaaatctatgggatttctgtccatcaaagatacacaagatgagaattatttcaaggacattttatcagataattctggacgtgaagattctgaaaatacattctccccttaccagttcaaaactagtggcccagaaaaaaaacccatccctggcattgatgtgctttctaagaagaagatctgggcttcatccatggacttgctttgtacagctgacagagacttctcttcaggagagactgccacatatcgtcgttgtcaccctgaggcagtaacagtgcggacttcaactactcctagaaaaaaggaggcaagatactcagatggaagtatagccttggatatctttggccctcagaaaatggatccaatatatcacactcgagaattgcccacctcctcagcaatatcaagtgctttggaccgaatccgagagagacaaaagaaacttcaggttctgagggaagccatgaatgtagaagaaccagttcgaagatacaaaacttatcatggtgatgtctttagtacctccagtgaaagtccatctattatttcctctgaatcagatttcagacaagtgagaagaagtgaagcctcaaagaggtttgaatccagcagtggtctcccaggggtagatgaaaccttaagtcaaggccagtcacagagaccgagcagacaatatgaaacaccctttgaaggcaacttaattaatcaagagatcatgctaaaacggcaagaggaagaactgatgcagctacaagccaaaatggcccttagacagtctcggttgagcctatatccaggagacacaatcaaagcgtccatgcttgacatcaccagggatccgttaagagaaattgccctagaaacagccatgactcaaagaaaactgaggaatttctttggccctgagtttgtgaaaatgacaattgaaccatttatatctttggatttgccacggtctattcttactaagaaagggaagaatgaggataaccgaaggaaagtaaacataatgcttctgaacgggcaaagactggaactgacctgtgataccaaaactatatgtaaagatgtgtttgatatggttgtggcacatattggcttagtagagcatcatttgtttgctttagctaccctcaaagataatgaatatttctttgttgatcctgacttaaaattaaccaaagtggccccagagggatggaaagaagaaccaaagaaaaagaccaaagccactgttaattttactttgtttttcagaattaaattttttatggatgatgttagtctaatacaacatactctgacgtgtcatcagtattaccttcagcttcgaaaagatattttggaggaaaggatgcactgtgatgatgagacttccttattgctggcatccttggctctccaggctgagtatggagattatcaaccagaggttcatggtgtgtcttactttagaatggagcactatttgcccgccagagtgatggagaaacttgatttatcctatatcaaagaagagttacccaaattgcataatacctatgtgggagcttctgaaaaagagacagagttagaatttttaaaggtctgccaaagactgacagaatatggagttcattttcaccgagtgcaccctgagaagaagtcacaaacaggaatattgcttggagtctgttctaaaggtgtccttgtgtttgaagttcacaatggagtgcgcacattggtccttcgctttccatggagggaaaccaagaaaatatctttttctaaaaagaaaatcacattgcaaaatacatcagatggaataaaacatggcttccagacagacaacagtaagatatgccagtacctgctgcacctctgctcttaccagcataagttccagctacagatgagagcaagacagagcaaccaagatgcccaagatattgagagagcttcgtttaggagcctgaatctccaagcagagtctgttagaggatttaatatgggacgagcaatcagcactggcagtctggccagcagcaccctcaacaaacttgctgttcgacctttatcagttcaagctgagattctgaagaggctatcctgctcagagctgtcgctttaccagccattgcaaaacagttcaaaagagaagaatgacaaagcttcatgggaggaaaagcctagagagatgagtaaatcataccatgatctcagtcaggcctctctctatccacatcggaaaaatgtcattgttaacatggaacccccaccacaaaccgttgcagagttggtgggaaaaccttctcaccagatgtcaagatctgatgcagaatctttggcaggagtgacaaaacttaataattcaaagtctgttgcgagtttaaatagaagtcctgaaaggaggaaacatgaatcagactcctcatccattgaagaccctgggcaagcatatgttctagatgtgctacacaaaagatggagcatagtatcttcaccagaaagggagatcaccttagtgaacctgaaaaaagatgcaaagtatggcttgggatttcaaattattggtggggagaagatgggaagactggacctaggcatatttatcagttcagttgcccctggaggaccagctgacttggatggatgcttgaagccaggagaccgtttgatatctgtgaatagtgtgagtctggagggagtcagccaccatgctgcaattgaaattttgcaaaatgcacctgaagatgtgacacttgttatctctcagccaaaagaaaagatatccaaagtgccttctactcctgtgcatctcaccaatgagatgaaaaactacatgaagaaatcttcctacatgcaagacagtgctatagattcttcttccaaggatcaccactggtcacgtggtaccctgaggcacatctcggagaactcctttgggccatctgggggcctgcgggaaggaagcctgagttctcaagattccaggactgagagtgccagcttgtctcaaagccaggtcaatggtttctttgccagccatttaggtgaccaaacctggcaggaatcacagcatggcagcccttccccatctgtaatatccaaagccaccgagaaagagactttcactgatagtaaccaaagcaaaactaaaaagccaggcatttctgatgtaactgattactcagaccgtggagattcagacatggatgaagccacttactccagcagtcaggatcatcaaacaccaaaacaggaatcttcctcttcagtgaatacatccaacaagatgaattttaaaactttttcttcatcacctcctaagcctggagatatctttgaggttgaactggctaaaaatgataacagcttggggataagtgtcacgggaggtgtgaatacgagtgtcagacatggtggcatttatgtgaaagctgttattccccagggagcagcagagtctgatggtagaattcacaaaggtgatcgcgtcctagctgtcaatggagttagtctagaaggagccacccataagcaagctgtggaaacactgagaaatacaggacaggtggttcatctgttattagaaaagggacaatctccaacatctaaagaacatgtcccggtaaccccacagtgtaccctttcagatcagaatgcccaaggtcaaggcccagaaaaagtgaagaaaacaactcaggtcaaagactacagctttgtcactgaagaaaatacatttgaggtaaaattatttaaaaatagctcaggtctaggattcagtttttctcgagaagataatcttataccggagcaaattaatgccagcatagtaagggttaaaaagctctttcctggacagccagcagcagaaagtggaaaaattgatgtaggagatgttatcttgaaagtgaatggagcctctttgaaaggactatctcagcaggaagtcatatctgctctcaggggaactgctccagaagtattcttgcttctctgcagacctccacctggtgtgctaccggaaattgatactgcgcttttgaccccacttcagtctccagcacaagtacttccaaacagcagtaaagactcttctcagccatcatgtgtggagcaaagcaccagctcagatgaaaatgaaatgtcagacaaaagcaaaaaacagtgcaagtccccatccagaagagacagttacagtgacagcagtgggagtggagaagatgacttagtgacagctccagcaaacatatcaaattcgacctggagttcagctttgcatcagactctaagcaacatggtatcacaggcacagagtcatcatgaagcacccaagagtcaagaagataccatttgtaccatgttttactatcctcagaaaattcccaataaaccagagtttgaggacagtaatccttcccctctaccaccggatatggctcctgggcagagttatcaaccccaatcagaatctgcttcctctagttcgatggataagtatcatatacatcacatttctgaaccaactagacaagaaaactggacacctttgaaaaatgacttggaaaatcaccttgaagactttgaactggaagtagaactcctcattaccctaattaaatcagaaaaaggaagcctgggttttacagtaaccaaaggcaatcagagaattggttgttatgttcatgatgtcatacaggatccagccaaaagtgatggaaggctaaaacctggggaccggctcataaaggttaatgatacagatgttactaatatgactcatacagatgcagttaatctgctccgggctgcatccaaaacagtcagattagttattggacgagttctagaattacccagaataccaatgttgcctcatttgctaccggacataacactaacgtgcaacaaagaggagttgggtttttccttatgtggaggtcatgacagcctttatcaagtggtatatattagtgatattaatccaaggtccgtcgcagccattgagggtaatctccagctattagatgtcatccattatgtgaacggagtcagcacacaaggaatgaccttggaggaagttaacagagcattagacatgtcacttccttcattggtattgaaagcaacaagaaatgatcttccagtggtccccagctcaaagaggtctgctgtttcagctccaaagtcaaccaaaggcaatggttcctacagtgtggggtcttgcagccagcctgccctcactcctaatgattcattctccacggttgctggggaagaaataaatgaaatatcgtaccccaaaggaaaatgttctacttatcagataaagggatcaccaaacttgactctgcccaaagaatcttatatacaagaagatgacatttatgatgattcccaagaagctgaagttatccagtctctgctggatgttgtggatgaggaagcccagaatcttttaaacgaaaataatgcagcaggatactcctgtggtccaggtacattaaagatgaatgggaagttatcagaagagagaacagaagatacagactgcgatggttcacctttacctgagtattttactgaggccaccaaaatgaatggctgtgaagaatattgtgaagaaaaagtaaaaagtgaaagcttaattcagaagccacaagaaaagaagactgatgatgatgaaataacatggggaaatgatgagttgccaatagagagaacaaaccatgaagattctgataaagatcattcctttctgacaaacgatgagctcgctgtactccctgtcgtcaaagtgcttccctctggtaaatacacgggtgccaacttaaaatcagtcattcgagtcctgcggggtttgctagatcaaggaattccttctaaggagctggagaatcttcaagaattaaaacctttggatcagtgtctaattgggcaaactaaggaaaacagaaggaagaacagatataaaaatatacttccctatgatgctacaagagtgcctcttggagatgaaggtggctatatcaatgccagcttcattaagataccagttgggaaagaagagttcgtttacattgcctgccaaggaccactgcctacaactgttggagacttctggcagatgatttgggagcaaaaatccacagtgatagccatgatgactcaagaagtagaaggagaaaaaatcaaatgccagcgctattggcccaacatcctaggcaaaacaacaatggtcagcaacagacttcgactggctcttgtgagaatgcagcagctgaagggctttgtggtgagggcaatgacccttgaagatattcagaccagagaggtgcgccatatttctcatctgaatttcactgcctggccagaccatgatacaccttctcaaccagatgatctgcttacttttatctcctacatgagacacatccacagatcaggcccaatcattacgcactgcagtgctggcattggacgttcagggaccctgatttgcatagatgtggttctgggattaatcagtcaggatcttgattttgacatctctgatttggtgcgctgcatgagactacaaagacacggaatggttcagacagaggatcaatatattttctgctatcaagtcatcctttatgtcctgacacgtcttcaagcagaagaagagcaaaaacagcagcctcagcttctgaagtgacatgaaaagagcctctggatgcatttccatttctctccttaacctccagcagactcctgctctctatccaaaataaagatcacagagcagcaagttcatacaacatgcatgttctcctctatcttagaggggtattcttcttgaaaataaaaaatattgaaatgctgtatttttacagctactttaacctatgataattatttacaaaattttaacactaaccaaacaatgcagatcttagggatgattaaaggcagcatttgatgatagcagacattgttacaaggacatggtgagtctatttttaatgcaccaatcttgtttatagcaaaaatgttttccaatattttaataaagtagttattttataggggatacttgaaaccagtatttaagctttaaatgacagtaatattggcatagaaaaaagtagcaaatgtttactgtatcaatttctaatgtttactatatagaatttcctgtaatatatttatatactttttcatgaaaatggagttatcagttatctgtttgttactgcatcatctgtttgtaatcattatctcactttgtaaataaaaacacaccttaaaacatgaacaagccaaaactgtgtgcag

SEQ ID NO: 24616 - DNA, 8119 bp, Homo sapiens
  source 1..8119: mol_type = unassigned DNA
cgtccctgcagccctcgcccggcgctccagtagcaggacccggtctcgggaccagccggtaatatgcacgtgtcactagctgaggccctggaggttcggggtggaccacttcaggaggaagaaatatgggctgtattaaatcaaagtgctgaaagtctccaagaattattcagaaaagtaagcctagctgatcctgctgcccttggcttcatcatttctccatggtctctgctgttgctgccatctggtagtgtgtcatttacagatgaaaatatttccaatcaggatcttcgagcattcactgcaccagaggttcttcaaaatcagtcactaacttctctctcagatgttgaaaagatccacatttattctcttggaatgacactgtattggggggctgattatgaagtgcctcagagccaacctattaagcttggagatcatctcaacagcatactgcttggaatgtgtgaggatgttatttacgctcgagtttctgttcggactgtgctggatgcttgcagtgcccacattaggaatagcaattgtgcaccctcattttcctacgtgaaacacttggtaaaactggttctgggaaatctttctgggacagatcagctttcctgtaacagtgaacaaaagcctgatcgaagccaggctattcgagatcgattgcgaggaaaaggattaccaacaggaagaagctctacttctgatgtactagacatacaaaagcctccactctctcatcagacctttcttaacaaagggcttagtaaatctatgggatttctgtccatcaaagatacacaagatgagaattatttcaaggacattttatcagataattctggacgtgaagattctgaaaatacattctccccttaccagttcaaaactagtggcccagaaaaaaaacccatccctggcattgatgtgctttctaagaagaagatctgggcttcatccatggacttgctttgtacagctgacagagacttctcttcaggagagactgccacatatcgtcgttgtcaccctgaggcagtaacagtgcggacttcaactactcctagaaaaaaggaggcaagatactcagatggaagtatagccttggatatctttggccctcagaaaatggatccaatatatcacactcgagaattgcccacctcctcagcaatatcaagtgctttggaccgaatccgagagagacaaaagaaacttcaggttctgagggaagccatgaatgtagaagaaccagttcgaagatacaaaacttatcatggtgatgtctttagtacctccagtgaaagtccatctattatttcctctgaatcagatttcagacaagtgagaagaagtgaagcctcaaagaggtttgaatccagcagtggtctcccaggggtagatgaaaccttaagtcaaggccagtcacagagaccgagcagacaatatgaaacaccctttgaaggcaacttaattaatcaagagatcatgctaaaacggcaagaggaagaactgatgcagctacaagccaaaatggcccttagacagtctcggttgagcctatatccaggagacacaatcaaagcgtccatgcttgacatcaccagggatccgttaagagaaattgccctagaaacagccatgactcaaagaaaactgaggaatttctttggccctgagtttgtgaaaatgacaattgaaccatttatatctttggatttgccacggtctattcttactaagaaagggaagaatgaggataaccgaaggaaagtaaacataatgcttctgaacgggcaaagactggaactgacctgtgataccaaaactatatgtaaagatgtgtttgatatggttgtggcacatattggcttagtagagcatcatttgtttgctttagctaccctcaaagataatgaatatttctttgttgatcctgacttaaaattaaccaaagtggccccagagggatggaaagaagaaccaaagaaaaagaccaaagccactgttaattttactttgtttttcagaattaaattttttatggatgatgttagtctaatacaacatactctgacgtgtcatcagtattaccttcagcttcgaaaagatattttggaggaaaggatgcactgtgatgatgagacttccttattgctggcatccttggctctccaggctgagtatggagattatcaaccagaggttcatggtgtgtcttactttagaatggagcactatttgcccgccagagtgatggagaaacttgatttatcctatatcaaagaagagttacccaaattgcataatacctatgtgggagcttctgaaaaagagacagagttagaatttttaaaggtctgccaaagactgacagaatatggagttcattttcaccgagtgcaccctgagaagaagtcacaaacaggaatattgcttggagtctgttctaaaggtgtccttgtgtttgaagttcacaatggagtgcgcacattggtccttcgctttccatggagggaaaccaagaaaatatctttttctaaaaagaaaatcacattgcaaaatacatcagatggaataaaacatggcttccagacagacaacagtaagatatgccagtacctgctgcacctctgctcttaccagcataagttccagctacagatgagagcaagacagagcaaccaagatgcccaagatattgagagagcttcgtttaggagcctgaatctccaagcagagtctgttagaggatttaatatgggacgagcaatcagcactggcagtctggccagcagcaccctcaacaaacttgctgttcgacctttatcagttcaagctgagattctgaagaggctatcctgctcagagctgtcgctttaccagccattgcaaaacagttcaaaagagaagaatgacaaagcttcatgggaggaaaagcctagagagatgagtaaatcataccatgatctcagtcaggcctctctctatccacatcggaaaaatgtcattgttaacatggaacccccaccacaaaccgttgcagagttggtgggaaaaccttctcaccagatgtcaagatctgatgcagaatctttggcaggagtgacaaaacttaataattcaaagtctgttgcgagtttaaatagaagtcctgaaaggaggaaacatgaatcagactcctcatccattgaagaccctgggcaagcatatgttctaggaatgactatgcatagttctggaaactcttcatcccaagtacccttaaaagaaaatgatgtgctacacaaaagatggagcatagtatcttcaccagaaagggagatcaccttagtgaacctgaaaaaagatgcaaagtatggcttgggatttcaaattattggtggggagaagatgggaagactggacctaggcatatttatcagttcagttgcccctggaggaccagctgacttggatggatgcttgaagccaggagaccgtttgatatctgtgaatagtgtgagtctggagggagtcagccaccatgctgcaattgaaattttgcaaaatgcacctgaagatgtgacacttgttatctctcagccaaaagaaaagatatccaaagtgccttctactcctgtgcatctcaccaatgagatgaaaaactacatgaagaaatcttcctacatgcaagacagtgctatagattcttcttccaaggatcaccactggtcacgtggtaccctgaggcacatctcggagaactcctttgggccatctgggggcctgcgggaaggaagcctgagttctcaagattccaggactgagagtgccagcttgtctcaaagccaggtcaatggtttctttgccagccatttaggtgaccaaacctggcaggaatcacagcatggcagcccttccccatctgtaatatccaaagccaccgagaaagagactttcactgatagtaaccaaagcaaaactaaaaagccaggcatttctgatgtaactgattactcagaccgtggagattcagacatggatgaagccacttactccagcagtcaggatcatcaaacaccaaaacaggaatcttcctcttcagtgaatacatccaacaagatgaattttaaaactttttcttcatcacctcctaagcctggagatatctttgaggttgaactggctaaaaatgataacagcttggggataagtgtcacgggaggtgtgaatacgagtgtcagacatggtggcatttatgtgaaagctgttattccccagggagcagcagagtctgatggtagaattcacaaaggtgatcgcgtcctagctgtcaatggagttagtctagaaggagccacccataagcaagctgtggaaacactgagaaatacaggacaggtggttcatctgttattagaaaagggacaatctccaacatctaaagaacatgtcccggtaaccccacagtgtaccctttcagatcagaatgcccaaggtcaaggcccagaaaaagtgaagaaaacaactcaggtcaaagactacagctttgtcactgaagaaaatacatttgaggtaaaattatttaaaaatagctcaggtctaggattcagtttttctcgagaagataatcttataccggagcaaattaatgccagcatagtaagggttaaaaagctctttcctggacagccagcagcagaaagtggaaaaattgatgtaggagatgttatcttgaaagtgaatggagcctctttgaaaggactatctcagcaggaagtcatatctgctctcaggggaactgctccagaagtattcttgcttctctgcagacctccacctggtgtgctaccggaaattgatactgcgcttttgaccccacttcagtctccagcacaagtacttccaaacagcagtaaagactcttctcagccatcatgtgtggagcaaagcaccagctcagatgaaaatgaaatgtcagacaaaagcaaaaaacagtgcaagtccccatccagaagagacagttacagtgacagcagtgggagtggagaagatgacttagtgacagctccagcaaacatatcaaattcgacctggagttcagctttgcatcagactctaagcaacatggtatcacaggcacagagtcatcatgaagcacccaagagtcaagaagataccatttgtaccatgttttactatcctcagaaaattcccaataaaccagagtttgaggacagtaatccttcccctctaccaccggatatggctcctgggcagagttatcaaccccaatcagaatctgcttcctctagttcgatggataagtatcatatacatcacatttctgaaccaactagacaagaaaactggacacctttgaaaaatgacttggaaaatcaccttgaagactttgaactggaagtagaactcctcattaccctaattaaatcagaaaaaggaagcctgggttttacagtaaccaaaggcaatcagagaattggttgttatgttcatgatgtcatacaggatccagccaaaagtgatggaaggctaaaacctggggaccggctcataaaggttaatgatacagatgttactaatatgactcatacagatgcagttaatctgctccgggctgcatccaaaacagtcagattagttattggacgagttctagaattacccagaataccaatgttgcctcatttgctaccggacataacactaacgtgcaacaaagaggagttgggtttttccttatgtggaggtcatgacagcctttatcaagtggtatatattagtgatattaatccaaggtccgtcgcagccattgagggtaatctccagctattagatgtcatccattatgtgaacggagtcagcacacaaggaatgaccttggaggaagttaacagagcattagacatgtcacttccttcattggtattgaaagcaacaagaaatgatcttccagtggtccccagctcaaagaggtctgctgtttcagctccaaagtcaaccaaaggcaatggttcctacagtgtggggtcttgcagccagcctgccctcactcctaatgattcattctccacggttgctggggaagaaataaatgaaatatcgtaccccaaaggaaaatgttctacttatcagataaagggatcaccaaacttgactctgcccaaagaatcttatatacaagaagatgacatttatgatgattcccaagaagctgaagttatccagtctctgctggatgttgtggatgaggaagcccagaatcttttaaacgaaaataatgcagcaggatactcctgtggtccaggtacattaaagatgaatgggaagttatcagaagagagaacagaagatacagactgcgatggttcacctttacctgagtattttactgaggccaccaaaatgaatggctgtgaagaatattgtgaagaaaaagtaaaaagtgaaagcttaattcagaagccacaagaaaagaagactgatgatgatgaaataacatggggaaatgatgagttgccaatagagagaacaaaccatgaagattctgataaagatcattcctttctgacaaacgatgagctcgctgtactccctgtcgtcaaagtgcttccctctggtaaatacacgggtgccaacttaaaatcagtcattcgagtcctgcggggtttgctagatcaaggaattccttctaaggagctggagaatcttcaagaattaaaacctttggatcagtgtctaattgggcaaactaaggaaaacagaaggaagaacagatataaaaatatacttccctatgatgctacaagagtgcctcttggagatgaaggtggctatatcaatgccagcttcattaagataccagttgggaaagaagagttcgtttacattgcctgccaaggaccactgcctacaactgttggagacttctggcagatgatttgggagcaaaaatccacagtgatagccatgatgactcaagaagtagaaggagaaaaaatcaaatgccagcgctattggcccaacatcctaggcaaaacaacaatggtcagcaacagacttcgactggctcttgtgagaatgcagcagctgaagggctttgtggtgagggcaatgacccttgaagatattcagaccagagaggtgcgccatatttctcatctgaatttcactgcctggccagaccatgatacaccttctcaaccagatgatctgcttacttttatctcctacatgagacacatccacagatcaggcccaatcattacgcactgcagtgctggcattggacgttcagggaccctgatttgcatagatgtggttctgggattaatcagtcaggatcttgattttgacatctctgatttggtgcgctgcatgagactacaaagacacggaatggttcagacagaggatcaatatattttctgctatcaagtcatcctttatgtcctgacacgtcttcaagcagaagaagagcaaaaacagcagcctcagcttctgaagtgacatgaaaagagcctctggatgcatttccatttctctccttaacctccagcagactcctgctctctatccaaaataaagatcacagagcagcaagttcatacaacatgcatgttctcctctatcttagaggggtattcttcttgaaaataaaaaatattgaaatgctgtatttttacagctactttaacctatgataattatttacaaaattttaacactaaccaaacaatgcagatcttagggatgattaaaggcagcatttgatgatagcagacattgttacaaggacatggtgagtctatttttaatgcaccaatcttgtttatagcaaaaatgttttccaatattttaataaagtagttattttataggggatacttgaaaccagtatttaagctttaaatgacagtaatattggcatagaaaaaagtagcaaatgtttactgtatcaatttctaatgtttactatatagaatttcctgtaatatatttatatactttttcatgaaaatggagttatcagttatctgtttgttactgcatcatctgtttgtaatcattatctcactttgtaaataaaaacacaccttaaaacatg

SEQ ID NO: 24617 - DNA, 8487 bp, Homo sapiens
  source 1..8487: mol_type = unassigned DNA
gagtagctccagcggccacgctgaggcgagggtgacacaccatgctcacggcccctggagaccgtcgtgctggcgagccgtgctccgtagctccccggtccgcctcggcagcggtcagagtcgcctacaggagttgagccgcccgcgccagaaggttttggcgaagctcttggagaggcgtcgagcacagtagggcggcgggggtgcgttgagcgctcgggggtcaggcagtcggccgggatcgccgctggggagcgtttccgaggcgaggaggaggaggaggagatgctgctcctcttctccccctccccaggctccttctacagctccttcagcccacgcccgcagccgcttgtgggagaagtggtggtggctctcggcgcccgcggcggctgccggcggcccgccccgacgccgcgtccctgcagccctcgcccggcgctccagtagcaggacccggtctcgggaccagccggtaatatgcacgtgtcactagctgaggccctggaggttcggggtggaccacttcaggaggaagaaatatgggctgtattaaatcaaagtgctgaaagtctccaagaattattcagaaaagtaagcctagctgatcctgctgcccttggcttcatcatttctccatggtctctgctgttgctgccatctggtagtgtgtcatttacagatgaaaatatttccaatcaggatcttcgagcattcactgcaccagaggttcttcaaaatcagtcactaacttctctctcagatgttgaaaagatccacatttattctcttggaatgacactgtattggggggctgattatgaagtgcctcagagccaacctattaagcttggagatcatctcaacagcatactgcttggaatgtgtgaggatgttatttacgctcgagtttctgttcggactgtgctggatgcttgcagtgcccacattaggaatagcaattgtgcaccctcattttcctacgtgaaacacttggtaaaactggttctgggaaatctttctgggacagatcagctttcctgtaacagtgaacaaaagcctgatcgaagccaggctattcgagatcgattgcgaggaaaaggattaccaacaggaagaagctctacttctgatgtactagacatacaaaagcctccactctctcatcagacctttcttaacaaagggcttagtaaatctatgggatttctgtccatcaaagatacacaagatgagaattatttcaaggacattttatcagataattctggacgtgaagattctgaaaatacattctccccttaccagttcaaaactagtggcccagaaaaaaaacccatccctggcattgatgtgctttctaagaagaagatctgggcttcatccatggacttgctttgtacagctgacagagacttctcttcaggagagactgccacatatcgtcgttgtcaccctgaggcagtaacagtgcggacttcaactactcctagaaaaaaggaggcaagatactcagatggaagtatagccttggatatctttggccctcagaaaatggatccaatatatcacactcgagaattgcccacctcctcagcaatatcaagtgctttggaccgaatccgagagagacaaaagaaacttcaggttctgagggaagccatgaatgtagaagaaccagttcgaagatacaaaacttatcatggtgatgtctttagtacctccagtgaaagtccatctattatttcctctgaatcagatttcagacaagtgagaagaagtgaagcctcaaagaggtttgaatccagcagtggtctcccaggggtagatgaaaccttaagtcaaggccagtcacagagaccgagcagacaatatgaaacaccctttgaaggcaacttaattaatcaagagatcatgctaaaacggcaagaggaagaactgatgcagctacaagccaaaatggcccttagacagtctcggttgagcctatatccaggagacacaatcaaagcgtccatgcttgacatcaccagggatccgttaagagaaattgccctagaaacagccatgactcaaagaaaactgaggaatttctttggccctgagtttgtgaaaatgacaattgaaccatttatatctttggatttgccacggtctattcttactaagaaagggaagaatgaggataaccgaaggaaagtaaacataatgcttctgaacgggcaaagactggaactgacctgtgataccaaaactatatgtaaagatgtgtttgatatggttgtggcacatattggcttagtagagcatcatttgtttgctttagctaccctcaaagataatgaatatttctttgttgatcctgacttaaaattaaccaaagtggccccagagggatggaaagaagaaccaaagaaaaagaccaaagccactgttaattttactttgtttttcagaattaaattttttatggatgatgttagtctaatacaacatactctgacgtgtcatcagtattaccttcagcttcgaaaagatattttggaggaaaggatgcactgtgatgatgagacttccttattgctggcatccttggctctccaggctgagtatggagattatcaaccagaggttcatggtgtgtcttactttagaatggagcactatttgcccgccagagtgatggagaaacttgatttatcctatatcaaagaagagttacccaaattgcataatacctatgtgggagcttctgaaaaagagacagagttagaatttttaaaggtctgccaaagactgacagaatatggagttcattttcaccgagtgcaccctgagaagaagtcacaaacaggaatattgcttggagtctgttctaaaggtgtccttgtgtttgaagttcacaatggagtgcgcacattggtccttcgctttccatggagggaaaccaagaaaatatctttttctaaaaagaaaatcacattgcaaaatacatcagatggaataaaacatggcttccagacagacaacagtaagatatgccagtacctgctgcacctctgctcttaccagcataagttccagctacagatgagagcaagacagagcaaccaagatgcccaagatattgagagagcttcgtttaggagcctgaatctccaagcagagtctgttagaggatttaatatgggacgagcaatcagcactggcagtctggccagcagcaccctcaacaaacttgctgttcgacctttatcagttcaagctgagattctgaagaggctatcctgctcagagctgtcgctttaccagccattgcaaaacagttcaaaagagaagaatgacaaagcttcatgggaggaaaagcctagagagatgagtaaatcataccatgatctcagtcaggcctctctctatccacatcggaaaaatgtcattgttaacatggaacccccaccacaaaccgttgcagagttggtgggaaaaccttctcaccagatgtcaagatctgatgcagaatctttggcaggagtgacaaaacttaataattcaaagtctgttgcgagtttaaatagaagtcctgaaaggaggaaacatgaatcagactcctcatccattgaagaccctgggcaagcatatgttctagatgtgctacacaaaagatggagcatagtatcttcaccagaaagggagatcaccttagtgaacctgaaaaaagatgcaaagtatggcttgggatttcaaattattggtggggagaagatgggaagactggacctaggcatatttatcagttcagttgcccctggaggaccagctgacttggatggatgcttgaagccaggagaccgtttgatatctgtgaatagtgtgagtctggagggagtcagccaccatgctgcaattgaaattttgcaaaatgcacctgaagatgtgacacttgttatctctcagccaaaagaaaagatatccaaagtgccttctactcctgtgcatctcaccaatgagatgaaaaactacatgaagaaatcttcctacatgcaagacagtgctatagattcttcttccaaggatcaccactggtcacgtggtaccctgaggcacatctcggagaactcctttgggccatctgggggcctgcgggaaggaagcctgagttctcaagattccaggactgagagtgccagcttgtctcaaagccaggtcaatggtttctttgccagccatttaggtgaccaaacctggcaggaatcacagcatggcagcccttccccatctgtaatatccaaagccaccgagaaagagactttcactgatagtaaccaaagcaaaactaaaaagccaggcatttctgatgtaactgattactcagaccgtggagattcagacatggatgaagccacttactccagcagtcaggatcatcaaacaccaaaacaggaatcttcctcttcagtgaatacatccaacaagatgaattttaaaactttttcttcatcacctcctaagcctggagatatctttgaggttgaactggctaaaaatgataacagcttggggataagtgtcacgggaggtgtgaatacgagtgtcagacatggtggcatttatgtgaaagctgttattccccagggagcagcagagtctgatggtagaattcacaaaggtgatcgcgtcctagctgtcaatggagttagtctagaaggagccacccataagcaagctgtggaaacactgagaaatacaggacaggtggttcatctgttattagaaaagggacaatctccaacatctaaagaacatgtcccggtaaccccacagtgtaccctttcagatcagaatgcccaaggtcaaggcccagaaaaagtgaagaaaacaactcaggtcaaagactacagctttgtcactgaagaaaatacatttgaggtaaaattatttaaaaatagctcaggtctaggattcagtttttctcgagaagataatcttataccggagcaaattaatgccagcatagtaagggttaaaaagctctttcctggacagccagcagcagaaagtggaaaaattgatgtaggagatgttatcttgaaagtgaatggagcctctttgaaaggactatctcagcaggaagtcatatctgctctcaggggaactgctccagaagtattcttgcttctctgcagacctccacctggtgtgctaccggaaattgatactgcgcttttgaccccacttcagtctccagcacaagtacttccaaacagcagtaaagactcttctcagccatcatgtgtggagcaaagcaccagctcagatgaaaatgaaatgtcagacaaaagcaaaaaacagtgcaagtccccatccagaagagacagttacagtgacagcagtgggagtggagaagatgacttagtgacagctccagcaaacatatcaaattcgacctggagttcagctttgcatcagactctaagcaacatggtatcacaggcacagagtcatcatgaagcacccaagagtcaagaagataccatttgtaccatgttttactatcctcagaaaattcccaataaaccagagtttgaggacagtaatccttcccctctaccaccggatatggctcctgggcagagttatcaaccccaatcagaatctgcttcctctagttcgatggataagtatcatatacatcacatttctgaaccaactagacaagaaaactggacacctttgaaaaatgacttggaaaatcaccttgaagactttgaactggaagtagaactcctcattaccctaattaaatcagaaaaaggaagcctgggttttacagtaaccaaaggcaatcagagaattggttgttatgttcatgatgtcatacaggatccagccaaaagtgatggaaggctaaaacctggggaccggctcataaaggttaatgatacagatgttactaatatgactcatacagatgcagttaatctgctccgggctgcatccaaaacagtcagattagttattggacgagttctagaattacccagaataccaatgttgcctcatttgctaccggacataacactaacgtgcaacaaagaggagttgggtttttccttatgtggaggtcatgacagcctttatcaagtggtatatattagtgatattaatccaaggtccgtcgcagccattgagggtaatctccagctattagatgtcatccattatgtgaacggagtcagcacacaaggaatgaccttggaggaagttaacagagcattagacatgtcacttccttcattggtattgaaagcaacaagaaatgatcttccagtggtccccagctcaaagaggtctgctgtttcagctccaaagtcaaccaaaggcaatggttcctacagtgtggggtcttgcagccagcctgccctcactcctaatgattcattctccacggttgctggggaagaaataaatgaaatatcgtaccccaaaggaaaatgttctacttatcagataaagggatcaccaaacttgactctgcccaaagaatcttatatacaagaagatgacatttatgatgattcccaagaagctgaagttatccagtctctgctggatgttgtggatgaggaagcccagaatcttttaaacgaaaataatgcagcaggatactcctgtggtccaggtacattaaagatgaatgggaagttatcagaagagagaacagaagatacagactgcgatggttcacctttacctgagtattttactgaggccaccaaaatgaatggctgtgaagaatattgtgaagaaaaagtaaaaagtgaaagcttaattcagaagccacaagaaaagaagactgatgatgatgaaataacatggggaaatgatgagttgccaatagagagaacaaaccatgaagattctgataaagatcattcctttctgacaaacgatgagctcgctgtactccctgtcgtcaaagtgcttccctctggtaaatacacgggtgccaacttaaaatcagtcattcgagtcctgcggggtttgctagatcaaggaattccttctaaggagctggagaatcttcaagaattaaaacctttggatcagtgtctaattgggcaaactaaggaaaacagaaggaagaacagatataaaaatatacttccctatgatgctacaagagtgcctcttggagatgaaggtggctatatcaatgccagcttcattaagataccagttgggaaagaagagttcgtttacattgcctgccaaggaccactgcctacaactgttggagacttctggcagatgatttgggagcaaaaatccacagtgatagccatgatgactcaagaagtagaaggagaaaaaatcaaatgccagcgctattggcccaacatcctaggcaaaacaacaatggtcagcaacagacttcgactggctcttgtgagaatgcagcagctgaagggctttgtggtgagggcaatgacccttgaagatattcagaccagagaggtgcgccatatttctcatctgaatttcactgcctggccagaccatgatacaccttctcaaccagatgatctgcttacttttatctcctacatgagacacatccacagatcaggcccaatcattacgcactgcagtgctggcattggacgttcagggaccctgatttgcatagatgtggttctgggattaatcagtcaggatcttgattttgacatctctgatttggtgcgctgcatgagactacaaagacacggaatggttcagacagaggatcaatatattttctgctatcaagtcatcctttatgtcctgacacgtcttcaagcagaagaagagcaaaaacagcagcctcagcttctgaagtgacatgaaaagagcctctggatgcatttccatttctctccttaacctccagcagactcctgctctctatccaaaataaagatcacagagcagcaagttcatacaacatgcatgttctcctctatcttagaggggtattcttcttgaaaataaaaaatattgaaatgctgtatttttacagctactttaacctatgataattatttacaaaattttaacactaaccaaacaatgcagatcttagggatgattaaaggcagcatttgatgatagcagacattgttacaaggacatggtgagtctatttttaatgcaccaatcttgtttatagcaaaaatgttttccaatattttaataaagtagttattttataggggatacttgaaaccagtatttaagctttaaatgacagtaatattggcatagaaaaaagtagcaaatgtttactgtatcaatttctaatgtttactatatagaatttcctgtaatatatttatatactttttcatgaaaatggagttatcagttatctgtttgttactgcatcatctgtttgtaatcattatctcactttgtaaataaaaacacaccttaaaacatgaacaagcc

SEQ ID NO: 24618 - DNA, 8573 bp, Homo sapiens
  source 1..8573: mol_type = unassigned DNA
gagtagctccagcggccacgctgaggcgagggtgacacaccatgctcacggcccctggagaccgtcgtgctggcgagccgtgctccgtagctccccggtccgcctcggcagcggtcagagtcgcctacaggagttgagccgcccgcgccagaaggttttggcgaagctcttggagaggcgtcgagcacagtagggcggcgggggtgcgttgagcgctcgggggtcaggcagtcggccgggatcgccgctggggagcgtttccgaggcgaggaggaggaggaggagatgctgctcctcttctccccctccccaggctccttctacagctccttcagcccacgcccgcagccgcttgtgggagaagtggtggtggctctcggcgcccgcggcggctgccggcggcccgccccgacgccgcgtccctgcagccctcgcccggcgctccagtagcaggacccggtctcgggaccagccggtaatatgcacgtgtcactagctgaggccctggaggttcggggtggaccacttcaggaggaagaaatatgggctgtattaaatcaaagtgctgaaagtctccaagaattattcagaaaagtaagcctagctgatcctgctgcccttggcttcatcatttctccatggtctctgctgttgctgccatctggtagtgtgtcatttacagatgaaaatatttccaatcaggatcttcgagcattcactgcaccagaggttcttcaaaatcagtcactaacttctctctcagatgttgaaaagatccacatttattctcttggaatgacactgtattggggggctgattatgaagtgcctcagagccaacctattaagcttggagatcatctcaacagcatactgcttggaatgtgtgaggatgttatttacgctcgagtttctgttcggactgtgctggatgcttgcagtgcccacattaggaatagcaattgtgcaccctcattttcctacgtgaaacacttggtaaaactggttctgggaaatctttctgggacagatcagctttcctgtaacagtgaacaaaagcctgatcgaagccaggctattcgagatcgattgcgaggaaaaggattaccaacaggaagaagctctacttctgatgtactagacatacaaaagcctccactctctcatcagacctttcttaacaaagggcttagtaaatctatgggatttctgtccatcaaagatacacaagatgagaattatttcaaggacattttatcagataattctggacgtgaagattctgaaaatacattctccccttaccagttcaaaactagtggcccagaaaaaaaacccatccctggcattgatgtgctttctaagaagaagatctgggcttcatccatggacttgctttgtacagctgacagagacttctcttcaggagagactgccacatatcgtcgttgtcaccctgaggcagtaacagtgcggacttcaactactcctagaaaaaaggaggcaagatactcagatggaagtatagccttggatatctttggccctcagaaaatggatccaatatatcacactcgagaattgcccacctcctcagcaatatcaagtgctttggaccgaatccgagagagacaaaagaaacttcaggttctgagggaagccatgaatgtagaagaaccagttcgaagatacaaaacttatcatggtgatgtctttagtacctccagtgaaagtccatctattatttcctctgaatcagatttcagacaagtgagaagaagtgaagcctcaaagaggtttgaatccagcagtggtctcccaggggtagatgaaaccttaagtcaaggccagtcacagagaccgagcagacaatatgaaacaccctttgaaggcaacttaattaatcaagagatcatgctaaaacggcaagaggaagaactgatgcagctacaagccaaaatggcccttagacagtctcggttgagcctatatccaggagacacaatcaaagcgtccatgcttgacatcaccagggatccgttaagagaaattgccctagaaacagccatgactcaaagaaaactgaggaatttctttggccctgagtttgtgaaaatgacaattgaaccatttatatctttggatttgccacggtctattcttactaagaaagggaagaatgaggataaccgaaggaaagtaaacataatgcttctgaacgggcaaagactggaactgacctgtgataccaaaactatatgtaaagatgtgtttgatatggttgtggcacatattggcttagtagagcatcatttgtttgctttagctaccctcaaagataatgaatatttctttgttgatcctgacttaaaattaaccaaagtggccccagagggatggaaagaagaaccaaagaaaaagaccaaagccactgttaattttactttgtttttcagaattaaattttttatggatgatgttagtctaatacaacatactctgacgtgtcatcagtattaccttcagcttcgaaaagatattttggaggaaaggatgcactgtgatgatgagacttccttattgctggcatccttggctctccaggctgagtatggagattatcaaccagaggttcatggtgtgtcttactttagaatggagcactatttgcccgccagagtgatggagaaacttgatttatcctatatcaaagaagagttacccaaattgcataatacctatgtgggagcttctgaaaaagagacagagttagaatttttaaaggtctgccaaagactgacagaatatggagttcattttcaccgagtgcaccctgagaagaagtcacaaacaggaatattgcttggagtctgttctaaaggtgtccttgtgtttgaagttcacaatggagtgcgcacattggtccttcgctttccatggagggaaaccaagaaaatatctttttctaaaaagaaaatcacattgcaaaatacatcagatggaataaaacatggcttccagacagacaacagtaagatatgccagtacctgctgcacctctgctcttaccagcataagttccagctacagatgagagcaagacagagcaaccaagatgcccaagatattgagagagcttcgtttaggagcctgaatctccaagcagagtctgttagaggatttaatatgggacgagcaatcagcactggcagtctggccagcagcaccctcaacaaacttgctgttcgacctttatcagttcaagctgagattctgaagaggctatcctgctcagagctgtcgctttaccagccattgcaaaacagttcaaaagagaagaatgacaaagcttcatgggaggaaaagcctagagagatgagtaaatcataccatgatctcagtcaggcctctctctatccacatcggaaaaatgtcattgttaacatggaacccccaccacaaaccgttgcagagttggtgggaaaaccttctcaccagatgtcaagatctgatgcagaatctttggcaggagtgacaaaacttaataattcaaagtctgttgcgagtttaaatagaagtcctgaaaggaggaaacatgaatcagactcctcatccattgaagaccctgggcaagcatatgttctaggaatgactatgcatagttctggaaactcttcatcccaagtacccttaaaagaaaatgatgtgctacacaaaagatggagcatagtatcttcaccagaaagggagatcaccttagtgaacctgaaaaaagatgcaaagtatggcttgggatttcaaattattggtggggagaagatgggaagactggacctaggcatatttatcagttcagttgcccctggaggaccagctgacttggatggatgcttgaagccaggagaccgtttgatatctgtgaatagtgtgagtctggagggagtcagccaccatgctgcaattgaaattttgcaaaatgcacctgaagatgtgacacttgttatctctcagccaaaagaaaagatatccaaagtgccttctactcctgtgcatctcaccaatgagatgaaaaactacatgaagaaatcttcctacatgcaagacagtgctatagattcttcttccaaggatcaccactggtcacgtggtaccctgaggcacatctcggagaactcctttgggccatctgggggcctgcgggaaggaagcctgagttctcaagattccaggactgagagtgccagcttgtctcaaagccaggtcaatggtttctttgccagccatttaggtgaccaaacctggcaggaatcacagcatggcagcccttccccatctgtaatatccaaagccaccgagaaagagactttcactgatagtaaccaaagcaaaactaaaaagccaggcatttctgatgtaactgattactcagaccgtggagattcagacatggatgaagccacttactccagcagtcaggatcatcaaacaccaaaacaggaatcttcctcttcagtgaatacatccaacaagatgaattttaaaactttttcttcatcacctcctaagcctggagatatctttgaggttgaactggctaaaaatgataacagcttggggataagtgtcacggtactgtttgacaagggaggtgtgaatacgagtgtcagacatggtggcatttatgtgaaagctgttattccccagggagcagcagagtctgatggtagaattcacaaaggtgatcgcgtcctagctgtcaatggagttagtctagaaggagccacccataagcaagctgtggaaacactgagaaatacaggacaggtggttcatctgttattagaaaagggacaatctccaacatctaaagaacatgtcccggtaaccccacagtgtaccctttcagatcagaatgcccaaggtcaaggcccagaaaaagtgaagaaaacaactcaggtcaaagactacagctttgtcactgaagaaaatacatttgaggtaaaattatttaaaaatagctcaggtctaggattcagtttttctcgagaagataatcttataccggagcaaattaatgccagcatagtaagggttaaaaagctctttcctggacagccagcagcagaaagtggaaaaattgatgtaggagatgttatcttgaaagtgaatggagcctctttgaaaggactatctcagcaggaagtcatatctgctctcaggggaactgctccagaagtattcttgcttctctgcagacctccacctggtgtgctaccggaaattgatactgcgcttttgaccccacttcagtctccagcacaagtacttccaaacagcagtaaagactcttctcagccatcatgtgtggagcaaagcaccagctcagatgaaaatgaaatgtcagacaaaagcaaaaaacagtgcaagtccccatccagaagagacagttacagtgacagcagtgggagtggagaagatgacttagtgacagctccagcaaacatatcaaattcgacctggagttcagctttgcatcagactctaagcaacatggtatcacaggcacagagtcatcatgaagcacccaagagtcaagaagataccatttgtaccatgttttactatcctcagaaaattcccaataaaccagagtttgaggacagtaatccttcccctctaccaccggatatggctcctgggcagagttatcaaccccaatcagaatctgcttcctctagttcgatggataagtatcatatacatcacatttctgaaccaactagacaagaaaactggacacctttgaaaaatgacttggaaaatcaccttgaagactttgaactggaagtagaactcctcattaccctaattaaatcagaaaaaggaagcctgggttttacagtaaccaaaggcaatcagagaattggttgttatgttcatgatgtcatacaggatccagccaaaagtgatggaaggctaaaacctggggaccggctcataaaggttaatgatacagatgttactaatatgactcatacagatgcagttaatctgctccgggctgcatccaaaacagtcagattagttattggacgagttctagaattacccagaataccaatgttgcctcatttgctaccggacataacactaacgtgcaacaaagaggagttgggtttttccttatgtggaggtcatgacagcctttatcaagtggtatatattagtgatattaatccaaggtccgtcgcagccattgagggtaatctccagctattagatgtcatccattatgtgaacggagtcagcacacaaggaatgaccttggaggaagttaacagagcattagacatgtcacttccttcattggtattgaaagcaacaagaaatgatcttccagtggtccccagctcaaagaggtctgctgtttcagctccaaagtcaaccaaaggcaatggttcctacagtgtggggtcttgcagccagcctgccctcactcctaatgattcattctccacggttgctggggaagaaataaatgaaatatcgtaccccaaaggaaaatgttctacttatcagataaagggatcaccaaacttgactctgcccaaagaatcttatatacaagaagatgacatttatgatgattcccaagaagctgaagttatccagtctctgctggatgttgtggatgaggaagcccagaatcttttaaacgaaaataatgcagcaggatactcctgtggtccaggtacattaaagatgaatgggaagttatcagaagagagaacagaagatacagactgcgatggttcacctttacctgagtattttactgaggccaccaaaatgaatggctgtgaagaatattgtgaagaaaaagtaaaaagtgaaagcttaattcagaagccacaagaaaagaagactgatgatgatgaaataacatggggaaatgatgagttgccaatagagagaacaaaccatgaagattctgataaagatcattcctttctgacaaacgatgagctcgctgtactccctgtcgtcaaagtgcttccctctggtaaatacacgggtgccaacttaaaatcagtcattcgagtcctgcggggtttgctagatcaaggaattccttctaaggagctggagaatcttcaagaattaaaacctttggatcagtgtctaattgggcaaactaaggaaaacagaaggaagaacagatataaaaatatacttccctatgatgctacaagagtgcctcttggagatgaaggtggctatatcaatgccagcttcattaagataccagttgggaaagaagagttcgtttacattgcctgccaaggaccactgcctacaactgttggagacttctggcagatgatttgggagcaaaaatccacagtgatagccatgatgactcaagaagtagaaggagaaaaaatcaaatgccagcgctattggcccaacatcctaggcaaaacaacaatggtcagcaacagacttcgactggctcttgtgagaatgcagcagctgaagggctttgtggtgagggcaatgacccttgaagatattcagaccagagaggtgcgccatatttctcatctgaatttcactgcctggccagaccatgatacaccttctcaaccagatgatctgcttacttttatctcctacatgagacacatccacagatcaggcccaatcattacgcactgcagtgctggcattggacgttcagggaccctgatttgcatagatgtggttctgggattaatcagtcaggatcttgattttgacatctctgatttggtgcgctgcatgagactacaaagacacggaatggttcagacagaggatcaatatattttctgctatcaagtcatcctttatgtcctgacacgtcttcaagcagaagaagagcaaaaacagcagcctcagcttctgaagtgacatgaaaagagcctctggatgcatttccatttctctccttaacctccagcagactcctgctctctatccaaaataaagatcacagagcagcaagttcatacaacatgcatgttctcctctatcttagaggggtattcttcttgaaaataaaaaatattgaaatgctgtatttttacagctactttaacctatgataattatttacaaaattttaacactaaccaaacaatgcagatcttagggatgattaaaggcagcatttgatgatagcagacattgttacaaggacatggtgagtctatttttaatgcaccaatcttgtttatagcaaaaatgttttccaatattttaataaagtagttattttataggggatacttgaaaccagtatttaagctttaaatgacagtaatattggcatagaaaaaagtagcaaatgtttactgtatcaatttctaatgtttactatatagaatttcctgtaatatatttatatactttttcatgaaaatggagttatcagttatctgtttgttactgcatcatctgtttgtaatcattatctcactttgtaaataaaaacacaccttaaaacatgaacaagccaaaactgtgtgcag

SEQ ID NO: 24619 - DNA, 516 bp, Homo sapiens
  source 1..516: mol_type = unassigned DNA
agctccctcgcagaaaatggggcaatcgggtttgttttcaaggcaggacctgaacaaaatgtaggacacctgatctgtgggatgaagggcgctggtaatatgcacgtgtcactagctgaggccctggaggttcggggtggaccacttcaggaggaagaaatatgggctgtattaaatcaaagtgctgaaagtctccaagaattattcagaaaagtaagcctagctgatcctgctgcccttggcttcatcatttctccatggtctctgctgttgctgccatctggtagtgtgtcatttacagatgaaaatatttccaatcaggatcttcgagcattcactgcaccagaggttcttcaaaatcagtcactaacttctctctcagatgttgaaaagatccacatttattctcttggaatgacactgtattggggggctgattatgaagtgcctcagagccaacctattaagcttggagatcatctcaacagcatactgcttggaatgtgtgaggatgtt

SEQ ID NO: 24620 - DNA, 8076 bp, Homo sapiens
  source 1..8076: mol_type = unassigned DNA
gtaatatgcacgtgtcactagctgaggccctggaggttcggggtggaccacttcaggaggaagaaatatgggctgtattaaatcaaagtgctgaaagtctccaagaattattcagaaaagtaagcctagctgatcctgctgcccttggcttcatcatttctccatggtctctgctgttgctgccatctggtagtgtgtcatttacagatgaaaatatttccaatcaggatcttcgagcattcactgcaccagaggttcttcaaaatcagtcactaacttctctctcagatgttgaaaagatccacatttattctcttggaatgacactgtattggggggctgattatgaagtgcctcagagccaacctattaagcttggagatcatctcaacagcatactgcttggaatgtgtgaggatgttatttacgctcgagtttctgttcggactgtgctggatgcttgcagtgcccacattaggaatagcaattgtgcaccctcattttcctacgtgaaacacttggtaaaactggttctgggaaatctttctgggacagatcagctttcctgtaacagtgaacaaaagcctgatcgaagccaggctattcgagatcgattgcgaggaaaaggattaccaacaggaagaagctctacttctgatgtactagacatacaaaagcctccactctctcatcagacctttcttaacaaagggcttagtaaatctatgggatttctgtccatcaaagatacacaagatgagaattatttcaaggacattttatcagataattctggacgtgaagattctgaaaatacattctccccttaccagttcaaaactagtggcccagaaaaaaaacccatccctggcattgatgtgctttctaagaagaagatctgggcttcatccatggacttgctttgtacagctgacagagacttctcttcaggagagactgccacatatcgtcgttgtcaccctgaggcagtaacagtgcggacttcaactactcctagaaaaaaggaggcaagatactcagatggaagtatagccttggatatctttggccctcagaaaatggatccaatatatcacactcgagaattgcccacctcctcagcaatatcaagtgctttggaccgaatccgagagagacaaaagaaacttcaggttctgagggaagccatgaatgtagaagaaccagttcgaagatacaaaacttatcatggtgatgtctttagtacctccagtgaaagtccatctattatttcctctgaatcagatttcagacaagtgagaagaagtgaagcctcaaagaggtttgaatccagcagtggtctcccaggggtagatgaaaccttaagtcaaggccagtcacagagaccgagcagacaatatgaaacaccctttgaaggcaacttaattaatcaagagatcatgctaaaacggcaagaggaagaactgatgcagctacaagccaaaatggcccttagacagtctcggttgagcctatatccaggagacacaatcaaagcgtccatgcttgacatcaccagggatccgttaagagaaattgccctagaaacagccatgactcaaagaaaactgaggaatttctttggccctgagtttgtgaaaatgacaattgaaccatttatatctttggatttgccacggtctattcttactaagaaagggaagaatgaggataaccgaaggaaagtaaacataatgcttctgaacgggcaaagactggaactgacctgtgataccaaaactatatgtaaagatgtgtttgatatggttgtggcacatattggcttagtagagcatcatttgtttgctttagctaccctcaaagataatgaatatttctttgttgatcctgacttaaaattaaccaaagtggccccagagggatggaaagaagaaccaaagaaaaagaccaaagccactgttaattttactttgtttttcagaattaaattttttatggatgatgttagtctaatacaacatactctgacgtgtcatcagtattaccttcagcttcgaaaagatattttggaggaaaggatgcactgtgatgatgagacttccttattgctggcatccttggctctccaggctgagtatggagattatcaaccagaggttcatggtgtgtcttactttagaatggagcactatttgcccgccagagtgatggagaaacttgatttatcctatatcaaagaagagttacccaaattgcataatacctatgtgggagcttctgaaaaagagacagagttagaatttttaaaggtctgccaaagactgacagaatatggagttcattttcaccgagtgcaccctgagaagaagtcacaaacaggaatattgcttggagtctgttctaaaggtgtccttgtgtttgaagttcacaatggagtgcgcacattggtccttcgctttccatggagggaaaccaagaaaatatctttttctaaaaagaaaatcacattgcaaaatacatcagatggaataaaacatggcttccagacagacaacagtaagatatgccagtacctgctgcacctctgctcttaccagcataagttccagctacagatgagagcaagacagagcaaccaagatgcccaagatattgagagagcttcgtttaggagcctgaatctccaagcagagtctgttagaggatttaatatgggacgagcaatcagcactggcagtctggccagcagcaccctcaacaaacttgctgttcgacctttatcagttcaagctgagattctgaagaggctatcctgctcagagctgtcgctttaccagccattgcaaaacagttcaaaagagaagaatgacaaagcttcatgggaggaaaagcctagagagatgagtaaatcataccatgatctcagtcaggcctctctctatccacatcggaaaaatgtcattgttaacatggaacccccaccacaaaccgttgcagagttggtgggaaaaccttctcaccagatgtcaagatctgatgcagaatctttggcaggagtgacaaaacttaataattcaaagtctgttgcgagtttaaatagaagtcctgaaaggaggaaacatgaatcagactcctcatccattgaagaccctgggcaagcatatgttctaggaatgactatgcatagttctggaaactcttcatcccaagtacccttaaaagaaaatgatgtgctacacaaaagatggagcatagtatcttcaccagaaagggagatcaccttagtgaacctgaaaaaagatgcaaagtatggcttgggatttcaaattattggtggggagaagatgggaagactggacctaggcatatttatcagttcagttgcccctggaggaccagctgacttggatggatgcttgaagccaggagaccgtttgatatctgtgaatagtgtgagtctggagggagtcagccaccatgctgcaattgaaattttgcaaaatgcacctgaagatgtgacacttgttatctctcagccaaaagaaaagatatccaaagtgccttctactcctgtgcatctcaccaatgagatgaaaaactacatgaagaaatcttcctacatgcaagacagtgctatagattcttcttccaaggatcaccactggtcacgtggtaccctgaggcacatctcggagaactcctttgggccatctgggggcctgcgggaaggaagcctgagttctcaagattccaggactgagagtgccagcttgtctcaaagccaggtcaatggtttctttgccagccatttaggtgaccaaacctggcaggaatcacagcatggcagcccttccccatctgtaatatccaaagccaccgagaaagagactttcactgatagtaaccaaagcaaaactaaaaagccaggcatttctgatgtaactgattactcagaccgtggagattcagacatggatgaagccacttactccagcagtcaggatcatcaaacaccaaaacaggaatcttcctcttcagtgaatacatccaacaagatgaattttaaaactttttcttcatcacctcctaagcctggagatatctttgaggttgaactggctaaaaatgataacagcttggggataagtgtcacggtactgtttgacaagggaggtgtgaatacgagtgtcagacatggtggcatttatgtgaaagctgttattccccagggagcagcagagtctgatggtagaattcacaaaggtgatcgcgtcctagctgtcaatggagttagtctagaaggagccacccataagcaagctgtggaaacactgagaaatacaggacaggtggttcatctgttattagaaaagggacaatctccaacatctaaagaacatgtcccggtaaccccacagtgtaccctttcagatcagaatgcccaaggtcaaggcccagaaaaagtgaagaaaacaactcaggtcaaagactacagctttgtcactgaagaaaatacatttgaggtaaaattatttaaaaatagctcaggtctaggattcagtttttctcgagaagataatcttataccggagcaaattaatgccagcatagtaagggttaaaaagctctttcctggacagccagcagcagaaagtggaaaaattgatgtaggagatgttatcttgaaagtgaatggagcctctttgaaaggactatctcagcaggaagtcatatctgctctcaggggaactgctccagaagtattcttgcttctctgcagacctccacctggtgtgctaccggaaattgatactgcgcttttgaccccacttcagtctccagcacaagtacttccaaacagcagtaaagactcttctcagccatcatgtgtggagcaaagcaccagctcagatgaaaatgaaatgtcagacaaaagcaaaaaacagtgcaagtccccatccagaagagacagttacagtgacagcagtgggagtggagaagatgacttagtgacagctccagcaaacatatcaaattcgacctggagttcagctttgcatcagactctaagcaacatggtatcacaggcacagagtcatcatgaagcacccaagagtcaagaagataccatttgtaccatgttttactatcctcagaaaattcccaataaaccagagtttgaggacagtaatccttcccctctaccaccggatatggctcctgggcagagttatcaaccccaatcagaatctgcttcctctagttcgatggataagtatcatatacatcacatttctgaaccaactagacaagaaaactggacacctttgaaaaatgacttggaaaatcaccttgaagactttgaactggaagtagaactcctcattaccctaattaaatcagaaaaaggaagcctgggttttacagtaaccaaaggcaatcagagaattggttgttatgttcatgatgtcatacaggatccagccaaaagtgatggaaggctaaaacctggggaccggctcataaaggttaatgatacagatgttactaatatgactcatacagatgcagttaatctgctccgggctgcatccaaaacagtcagattagttattggacgagttctagaattacccagaataccaatgttgcctcatttgctaccggacataacactaacgtgcaacaaagaggagttgggtttttccttatgtggaggtcatgacagcctttatcaagtggtatatattagtgatattaatccaaggtccgtcgcagccattgagggtaatctccagctattagatgtcatccattatgtgaacggagtcagcacacaaggaatgaccttggaggaagttaacagagcattagacatgtcacttccttcattggtattgaaagcaacaagaaatgatcttccagtggtccccagctcaaagaggtctgctgtttcagctccaaagtcaaccaaaggcaatggttcctacagtgtggggtcttgcagccagcctgccctcactcctaatgattcattctccacggttgctggggaagaaataaatgaaatatcgtaccccaaaggaaaatgttctacttatcagataaagggatcaccaaacttgactctgcccaaagaatcttatatacaagaagatgacatttatgatgattcccaagaagctgaagttatccagtctctgctggatgttgtggatgaggaagcccagaatcttttaaacgaaaataatgcagcaggatactcctgtggtccaggtacattaaagatgaatgggaagttatcagaagagagaacagaagatacagactgcgatggttcacctttacctgagtattttactgaggccaccaaaatgaatggctgtgaagaatattgtgaagaaaaagtaaaaagtgaaagcttaattcagaagccacaagaaaagaagactgatgatgatgaaataacatggggaaatgatgagttgccaatagagagaacaaaccatgaagattctgataaagatcattcctttctgacaaacgatgagctcgctgtactccctgtcgtcaaagtgcttccctctggtaaatacacgggtgccaacttaaaatcagtcattcgagtcctgcggggtttgctagatcaaggaattccttctaaggagctggagaatcttcaagaattaaaacctttggatcagtgtctaattgggcaaactaaggaaaacagaaggaagaacagatataaaaatatacttccctatgatgctacaagagtgcctcttggagatgaaggtggctatatcaatgccagcttcattaagataccagttgggaaagaagagttcgtttacattgcctgccaaggaccactgcctacaactgttggagacttctggcagatgatttgggagcaaaaatccacagtgatagccatgatgactcaagaagtagaaggagaaaaaatcaaatgccagcgctattggcccaacatcctaggcaaaacaacaatggtcagcaacagacttcgactggctcttgtgagaatgcagcagctgaagggctttgtggtgagggcaatgacccttgaagatattcagaccagagaggtgcgccatatttctcatctgaatttcactgcctggccagaccatgatacaccttctcaaccagatgatctgcttacttttatctcctacatgagacacatccacagatcaggcccaatcattacgcactgcagtgctggcattggacgttcagggaccctgatttgcatagatgtggttctgggattaatcagtcaggatcttgattttgacatctctgatttggtgcgctgcatgagactacaaagacacggaatggttcagacagaggatcaatatattttctgctatcaagtcatcctttatgtcctgacacgtcttcaagcagaagaagagcaaaaacagcagcctcagcttctgaagtgacatgaaaagagcctctggatgcatttccatttctctccttaacctccagcagactcctgctctctatccaaaataaagatcacagagcagcaagttcatacaacatgcatgttctcctctatcttagaggggtattcttcttgaaaataaaaaatattgaaatgctgtatttttacagctactttaacctatgataattatttacaaaattttaacactaaccaaacaatgcagatcttagggatgattaaaggcagcatttgatgatagcagacattgttacaaggacatggtgagtctatttttaatgcaccaatcttgtttatagcaaaaatgttttccaatattttaataaagtagttattttataggggatacttgaaaccagtatttaagctttaaatgacagtaatattggcatagaaaaaagtagcaaatgtttactgtatcaatttctaatgtttactatatagaatttcctgtaatatatttatatactttttcatgaaaatggagttatcagttatctgtttgttactgcatcatctgtttgtaatcattatctcactttgtaaataaaaacacaccttaaaacatg

SEQ ID NO: 24621 - DNA, 4173 bp, Homo sapiens
  source 1..4173: mol_type = unassigned DNA
ccgcgcgggactccggggcgccacgggggccatgtaagcagctatcttccagagggccacactgggcatggacacccttttccctgcctggaggagcacaggtgatagtgtaattttccagtcacgaaactgctaaggccatctcaggggcgtgtgcgccaggataggcgggcggcgtccgaggaccacatagccatgccttttggtctgaagctccgccggacacggcgctacaacgtcctgagcaagaactgctttgtcacacggattcgcctgctggacagcaatgttatcgagtgcacgctgtcggtggaaagcacagggcaagaatgcctggaggctgtggcccagaggctggagctgcgagagacgcactactttggcctttggtttctcagcaagagccagcaagcacgatgggtggagctggagaaacctctgaagaaacatctggacaaattcgctaatgagcctttgcttttctttggagtcatgttctatgtgccaaatgtgtcatggcttcagcaagaggccacaagatatcagtattacctgcaagtcaaaaaagatgtgcttgaagggcgattacgatgtacattggaccaggtgattcggctagccggcctagctgtgcaagctgattttggagactataatcagtttgattctcaagatttcctcagagagtatgtgctatttcctatggatttggccctggaagaggctgttctggaggagctgacccagaaggtagcccaagaacacaaagcccacagtggaatcctgccagcagaagctgaactgatgtacatcaatgaagttgaacgtttggatggatttggacaggaaatcttccctgtaaaggacaatcatggaaactgtgtacaccttggcattttctttatggggattttcgtgaggaacagaattggaagacaagcggtaatatacaggtggaatgacatggggaatatcactcataacaagtcgaccattctagtggagctcatcaacaaagaagagactgccctctttcacacggatgatatcgaaaatgccaagtatatttctcggttgtttgccacacgacacaagttttacaaacaaaacaaaatctgcactgaacagtcaaattctccaccccccatcagacgccagcccacctggagccgatcctctctgcccaggcagcagccgtacatcctgcctcccgttcacgtccagtgtggtgagcactactcggaaacgcacacctcgcaagacagcatttttcatgggaatgaagaagccttgtattgcaactctcacaacagcctggacttaaattatttaaatggcactgtcaccaatggcagcgtgtgtagcgttcacagcgtcaactccctcaactgctcgcaaagtttcatccaggcctcccctgtatcctccaacctcagtatccctgggagtgacatcatgcgggccgactacatcccgagccaccggcacagcgcgatcatcgtgccctcgtacaggccaacccccgattatgagacagtcatgcgccagatgaagagggggatcctgcatacagacagccagagccagtctctgagaaacctcaacattatcaacacccatgcctacaaccagccagaggatctggtgtacagccaaccggagatgcgggagaggcacccctacactgtcccttatgggccacagggggtctacagcaacaaacttgtcagtccatctgaccagaggaacccaaagaataatgtggtaccaagcaagccgggggcaagcgccatctcgcacacggtgagcaccccagagctggccaacatgcagctgcagggcagccataactacagcacggcccacatgcttaagaactatctcttcaggccaccgcccccctacccacggccacgacctgccaccagcaccccagacctggccagccaccgccacaagtacgtcagcggcagcagcccggacctggtgacccggaaggtgcagctctcggtgaagaccttccaagaggacagctctccggtggttcatcagtctctccaggaggtgagcgagcccctcacggccaccaagcaccacggcactgtgaacaagcgccacagcctggaggtgatgaacagcatggtgcggggcatggaggccatgacgctcaagtcgctccacctccccatggctcgccgcaacacgctccgggagcagggaccgcccgaggaggggtcaggcagccacgaggtcccccagctccctcagtatcaccacaagaagaccttctctgatgccactatgctaatccacagcagcgagagtgaggaggaggaggaggaggctccagaatcggtgccccagatccccatgctccgggagaagatggagtacagtgcccagctgcaggcggccctggcccgcatccccaacaagcccccgcctgagtaccccggtccaaggaagagtgtgagcaatggggctctgaggcaggaccaagccagccttcctcccgccatggccagagccagggtgctgaggcatgggccagccaaggccatcagcatgtctcggactgacccgccggctgtcaacggggcctctctcggcccatccatctcggaacccgacctgactagtgtgaaggagcgggtcaaaaaagagcctgtgaaggagagacctgtgtctgaaatgttttccctggaagacagcattatagagagagagatgatgatcaggaatctagagaagcagaagatggcaggcctggaggcacagaagaggccgctgatgttggcagcattgaatgggctctcggtggctcgagtctcagggcgggaagagaatcgagttgatgccacccgggttcccatggacgagaggttcagaaccctgaagaagaaactagaagagggaatggtgttcacagaatatgagcaaattccaaagaaaaaggcgaatggcattttcagcacagcagctctgccagaaaacgccgagcgcagccgaatccgtgaagttgtcccctatgaggagaatcgagtagagctgataccaaccaaagaaaataacacaggatacattaatgcctcccacatcaaggtggtggttggcggggcagaatggcactacatagccacccaggggcccctgccacacacgtgccacgacttctggcagatggtgtgggagcagggagtgaatgtgattgccatggtcactgcagaggaggagggtggacgaaccaaaagccaccgatactggcccaaactaggttcaaagcacagctcagccacctatggcaagttcaaggtcaccacgaagtttcgaacggattctgtttgctatgcaaccacgggcttgaaggtcaagcaccttttgtctgggcaagaaaggacggtgtggcatttacaatatactgactggccagatcacggctgtccagaagatgtccaaggatttttatcctacttggaggagatccagtcggtccgtcgccataccaacagcatgctggaaggcaccaagaaccggcacccgcccatcgtggtccactgtagtgctggggtgggaaggaccggcgtgctcattctttctgagctgatgatctactgcttggaacataacgaaaaggtggaagtgcccatgatgctgaggctcctcagggagcagaggatgttcatgatccagactatcgctcagtacaagtttgtctaccaagtcctcatccagttcctccaaaactccagactcatttaatcaccccaatccagctcctggaggagggacccagctccatcgcgctggaggagagtcacctccagacaacatctgctccccccacaggggtgcaggtggctggcagcaaacaggctctctgaagacagtagccaagattattcacacataccatgtattattttatatgagataatttatttttttcccctttggaataacttttgtgaattattataatgcagtttccctagtaatatagtacttttcatttgaaccacatcttgactgatctgtattgtaatatatgtcagcaggtaaggttgcctgctggatcattttgaggacagaggcatgagggagcacatctcttgtgaagttgcagccagatttgtaaccaaccctgaaattcatcagcttaattcatttatcagc

SEQ ID NO: 24622 - DNA, 3473 bp, Homo sapiens
  source 1..3473: mol_type = unassigned DNA
atgccttttggtctgaagctccgccggacacggcgctacaacgtcctgagcaagaactgctttgtcacacggattcgcctgctggacagcaatgttatcgagtgcacgctgtcggtggaaagcacagggcaagaatgcctggaggctgtggcccagaggctggagctgcgagagacgcactactttggcctttggtttctcagcaagagccagcaagcacgatgggtggagctggagaaacctctgaagaaacatctggacaaattcgctaatgagcctttgcttttctttggagtcatgttctatgtgccaaatgtgtcatggcttcagcaagaggccacaagatatcagtattacctgcaagtcaaaaaagatgtgcttgaagggcgattacgatgtacattggaccaggtgattcggctagccggcctagctgtgcaagctgattttggagactataatcagtttgattctcaagatttcctcagagagtatgtgctatttcctatggatttggccctggaagaggctgttctggaggagctgacccagaaggtagcccaagaacacaaagcccacaggacaatcatggaaactgtgtacaccttggcattttctttatggggattttcgtgaggaacagaattggaagacaagcggtaatatacaggtggaatgacatggggaatatcactcataacaagtcgaccattctagtggagctcatcaacaaagaagagactgccctctttcacacggatgatatcgaaaatgccaagtatatttctcggttgtttgccacacgacacaagttttacaaacaaaacaaaatctgcactgaacagtcaaattctccaccccccatcagacgccagcccacctggagccgatcctctctgcccaggcagcagccgtacatcctgcctcccgttcacgtccagtgtggtgagcactactcggaaacgcacacctcgcaagacagcatttttcatgggaatgaagaagccttgtattgcaactctcacaacagcctggacttaaattatttaaatggcactgtcaccaatggcagcgtgtgtagcgttcacagcgtcaactccctcaactgctcgcaaagtttcatccaggcctcccctgtatcctccaacctcagtatccctgggagtgacatcatgcgggccgactacatcccgagccaccggcacagcgcgatcatcgtgccctcgtacaggccaacccccgattatgagacagtcatgcgccagatgaagagggggatcctgcatacagacagccagagccagtctctgagaaacctcaacattatcaacacccatgcctacaaccagccagaggatctggtgtacagccaaccggagatgcgggagaggcacccctacactgtcccttatgggccacagggggtctacagcaacaaacttgtcagtccatctgaccagaggaacccaaagaataatgtggtaccaagcaagccgggggcaagcgccatctcgcacacggtgagcaccccagagctggccaacatgcagctgcagggcagccataactacagcacggcccacatgcttaagaactatctcttcaggccaccgcccccctacccacggccacgacctgccaccagcaccccagacctggccagccaccgccacaagtacgtcagcggcagcagcccggacctggtgacccggaaggtgcagctctcggtgaagaccttccaagaggacagctctccggtggttcatcagtctctccaggaggtgagcgagcccctcacggccaccaagcaccacggcactgtgaacaagcgccacagcctggaggtgatgaacagcatggtgcggggcatggaggccatgacgctcaagtcgctccacctccccatggctcgccgcaacacgctccgggagcagggaccgcccgaggaggggtcaggcagccacgaggtcccccagctccctcagtatcaccacaagaagaccttctctgatgccactatgctaatccacagcagcgagagtgaggaggaggaggaggaggctccagaatcggtgccccagatccccatgctccgggagaagatggagtacagtgcccagctgcaggcggccctggcccgcatccccaacaagcccccgcctgagtaccccggtccaaggaagagtgtgagcaatggggctctgaggcaggaccaagccagccttcctcccgccatggccagagccagggtgctgaggcatgggccagccaaggccatcagcatgtctcggactgacccgccggctgtcaacggggcctctctcggcccatccatctcggaacccgacctgactagtgtgaaggagcgggtcaaaaaagagcctgtgaaggagagacctgtgtctgaaatgttttccctggaagacagcattatagagagagagatgatgatcaggaatctagagaagcagaagatggcaggcctggaggcacagaagaggccgctgatgttggcagcattgaatgggctctcggtggctcgagtctcagggcgggaagagaatcgagttgatgccacccgggttcccatggacgagaggttcagaaccctgaagaagaaactagaagagggaatggtgttcacagaatatgagcaaattccaaagaaaaaggcgaatggcattttcagcacagcagctctgccagaaaacgccgagcgcagccgaatccgtgaagttgtcccctatgaggagaatcgagtagagctgataccaaccaaagaaaataacacaggatacattaatgcctcccacatcaaggtggtggttggcggggcagaatggcactacatagccacccaggggcccctgccacacacgtgccacgacttctggcagatggtgtgggagcagggagtgaatgtgattgccatggtcactgcagaggaggagggtggacgaaccaaaagccaccgatactggcccaaactaggttcaaagcacagctcagccacctatggcaagttcaaggtcaccacgaagtttcgaacggattctgtttgctatgcaaccacgggcttgaaggtcaagcaccttttgtctgggcaagaaaggacggtgtggcatttacaatatactgactggccagatcacggctgtccagaagatgtccaaggatttttatcctacttggaggagatccagtcggtccgtcgccataccaacagcatgctggaaggcaccaagaaccggcacccgcccatcgtggtccactgtagtgctggggtgggaaggaccggcgtgctcattctttctgagctgatgatctactgcttggaacataacgaaaaggtggaagtgcccatgatgctgaggctcctcagggagcagaggatgttcatgatccagactatcgctcagtacaagtttgtctaccaagtcctcatccagttcctccaaaactccagactcatt

SEQ ID NO: 24623 - DNA, 3669 bp, Homo sapiens
  source 1..3669: mol_type = unassigned DNA
gaggcaagggcggggactcagtcaccggcctccgcctcccgcggcgtccacactcgccgcgcgcgcggcggccgggctggaccttgctggcccgcggcgccatgagccgcagcctggactcggcgcggagcttcctggagcggctggaagcgcggggcggccgggagggggcagtcctcgccggcgagttcagcgacatccaggcctgctcggccgcctggaaggctgacggcgtgtgctccaccgtggccggcagtcggccagagaacgtgaggaagaaccgctacaaagacgtgctgccttatgatcagacgcgagtaatcctctccctgctccaggaagagggacacagcgactacattaatggcaacttcatccggggcgtggatggaagcctggcctacattgccacgcaaggacccttgcctcacaccctgctagacttctggagactggtctgggagtttggggtcaaggtgatcctgatggcctgtcgagagatagagaatgggcggaaaaggtgtgagcggtactgggcccaggagcaggagccactgcagactgggcttttctgcatcactctgataaaggagaagtggctgaatgaggacatcatgctcaggaccctcaaggtcacattccagaaggagtcccgttctgtgtaccagctacagtatatgtcctggccagaccgtggggtccccagcagtcctgaccacatgctcgccatggtggaggaagcccgtcgcctccagggatctggccctgaacccctctgtgtccactgcagtgcgggttgtgggcgaacaggcgtcctgtgcaccgtggattatgtgaggcagctgctcctgacccagatgatcccacctgacttcagtctctttgatgtggtccttaagatgaggaagcagcggcctgcggccgtgcagacagaggagcagtacaggttcctgtaccacacggtggctcagatgttctgctccacactccagaatgccagcccccactaccagaacatcaaagagaattgtgccccactctacgacgatgccctcttcctccggactccccaggcacttctcgccataccccgcccaccaggaggggtcctcaggagcatctctgtgcccgggtccccgggccacgccatggctgacacctacgcggtggtgcagaagcgcggggctccagcgggcgccgggagtgggacgcagacggggacggggacggggacgggggcgcgcagcgcggaggaggcgccgctctacagcaaggtgacgccgcgcgcccagcgacccggggcgcacgcggaggacgcgagggggacgctgcctggccgcgttcctgctgaccaaagtcctgccggatctggcgcctacgaggacgtggcgggtggagctcagaccggtgggctaggtttcaacctgcgcattgggaggccgaagggtccccgggacccgcctgctgagtggacccgggtgtaagtctaacgccagttcctgcctgttgcctcttgtgagctcggactgctgatgccccggtgctgctgagcgccgtgcgcagaatggaaacagtgggcctggatcaaagttaaagtttctcagggtgggaaatgtgggggctttgccccaatgactgtagcattcaaggcttgaggctggaggaggtagctagggtatagtggctggtgaggctgcacagagcagattcaagaaagaagatcaggaaggggcatgacccctgagttatgaaggggagaagggacagatgagcttccggagactgctctcctcaccacacagcactagtccatcctcagcacctgagcctccctcacttggacactcaggggaccacacagagaagtggatggacacttcgccatccaggcagaactaagccaggcataaccacagccaagcagattaaccccaggcagaccgataaaaagacctccagataggcagacagacagatggaccaccaacctggacagacagccaaagcttcagagatacagtccacaggtggacaaagggatccccagccagagagagagagaccagccaacagcttgatagaccagtgcagccagagagaccaccaaacagagcccccaaaagacagacatctctgctagctggacagccaggtggaccccctaagttagattactagacagatataaacagatcccctgctgaacagatacacagagttctcagaccccacccccaccctcaggtgggctggctggctgacagaccttctggccagacagactcctaaccaaccagatggactgccagacaggcagacatcagccacatggaatcctgacatcccagccagccggccagactctcatcttgatgtcttgatggatggaccccagctagtcagacatgatcctccagattgacagacaagtcccccaaatgagtacacatctccagctattcagacagatggacccccagcaaatcaggacctatctaggcagaccccagccagacccccgccagacagactcccaaccagactgaccccttactattcacacagcctgccgagtagctgggactacaggtctaattttttttttttttaagaaatgagtttttgccatgttgcccagactggtcttgaactcccaacctcaagcaatcctcctgcctcagcctcccaaagtgctgagattacaggtgtgagccaccaggctcagccccctaagatttgaaacactttaaatggcccatggtagggttcctgctaggataaaacattaagcggctgttaaaagaaataaaaggaggacacgtctctgtgcactggtgtggacaaatctccaagtcactgcaaaatggaaaaagtataagatgctctttccctgaacctcaagggtcccgcccctctcactttcaggtctctggacctctgactgacactgtgcctgcccaggtccctgtatgcactgccacagtgccctgggccccatgtccacccctgtcctgcccttctctgggatagggctggccttcctctgcctctgcctggctgcatccatggtcgatctcaagtgccttggcatgaactccactctcctgcagccttcaatcaaggaatgatggggatgtgtacataccccaccccaccccttggcagggtgatgctgaggtgtggatttttaacagttcccagactttcccaggaggcttgggtttgggtgcccacagtgggagctggtgtgatatcataccttcgccggccgcctttccttcctgttctctgtgcccctactcccactctagagctgccccgtttctctgttttcgtgaaagagctgaccctgtgctgcctcccactctcccaatgcccctgccactcctgtgagcctgctgctggtgaggtcggtgctgacctctgtgttgctggataatgagtcatctatctctggaggagaagaaaggcaggtcctccacagccctgataaaatctccaagtctcccagtttcgggtccctctcctgggatgcagacccactgcctgcccagctggtacgatccacatgccctcttcttgggaataggggcatgggaaagtgactaaagatactgttctggctgctgtgttcactgtgagtaataaactgtccatttctccgattca

SEQ ID NO: 24624 - DNA, 2283 bp, Homo sapiens
  source 1..2283: mol_type = unassigned DNA
ggggcctgagcctctccgccggcgcaggctctgctcgcgccagctcgctcccgcagccatgcccaccaccatcgagcgggagttcgaagagttggatactcagcgtcgctggcagccgctgtacttggaaattcgaaatgagtcccatgactatcctcatagagtggccaagtttccagaaaacagaaatcgaaacagatacagagatgtaagcccatatgatcacagtcgtgttaaactgcaaaatgctgagaatgattatattaatgccagtttagttgacatagaagaggcacaaaggagttacatcttaacacagggtccacttcctaacacatgctgccatttctggcttatggtttggcagcagaagaccaaagcagttgtcatgctgaaccgcattgtggagaaagaatcggttaaatgtgcacagtactggccaacagatgaccaagagatgctgtttaaagaaacaggattcagtgtgaagctcttgtcagaagatgtgaagtcgtattatacagtacatctactacaattagaaaatatcaatagtggtgaaaccagaacaatatctcactttcattatactacctggccagattttggagtccctgaatcaccagcttcatttctcaatttcttgtttaaagtgagagaatctggctccttgaaccctgaccatgggcctgcggtgatccactgtagtgcaggcattgggcgctctggcaccttctctctggtagacacttgtcttgttttgatggaaaaaggagatgatattaacataaaacaagtgttactgaacatgagaaaataccgaatgggtcttattcagaccccagatcaactgagattctcatacatggctataatagaaggagcaaaatgtataaagggagattctagtatacagaaacgatggaaagaactttctaaggaagacttatctcctgcctttgatcattcaccaaacaaaataatgactgaaaaatacaatgggaacagaataggtctagaagaagaaaaactgacaggtgaccgatgtacaggactttcctctaaaatgcaagatacaatggaggagaacagtgagagtgctctacggaaacgtattcgagaggacagaaaggccaccacagctcagaaggtgcagcagatgaaacagaggctaaatgagaatgaacgaaaaagaaaaaggtggttatattggcaacctattctcactaagatggggtttatgtcagtcattttggttggcgcttttgttggctggacactgttttttcagcaaaatgccctataaacaattaattttgcccagcaagcttctgcactagtaactgacagtgctacattaatcataggggtttgtctgcagcaaacgcctcatatcccaaaaacggtgcagtagaatagacatcaaccagataagtgatatttacagtcacaagcccaacatctcaggactcttgactgcaggttcctctgaaccccaaactgtaaatggctgtctaaaataaagacattcatgtttgttaaaaactggtaaattttgcaactgtattcatacatgtcaaacacagtatttcacctgaccaacattgagatatcctttatcacaggatttgtttttggaggctatctggattttaacctgcacttgatataagcaataaatattgtggttttatctacgttattggaaagaaaatgacatttaaataatgtgtgtaatgtataatgtactattgacatgggcatcaacacttttattcttaagcatttcagggtaaatatattttataagtatctatttaatcttttgtagttaactgtactttttaagagctcaatttgaaaaatctgttactaaaaaaataaattgtatgtcgattgaattgtactggatacattttccatttttctaaagagaagtttgatatgagcagttagaagttggaataagcaatttctactatatattgcatttcttttatgttttacagttttccccattttaaaaagaaaagcaaacaaagaaacaaaagtttttcctaaaaatatctttgaaggaaaattctccttactgggatagtcaggtaaacagttggtcaagactttgtaaagaaattggtttctgtaaatcccattattgatatgtttatttttcatgaaaatttcaatgtagttggggtagattatgatttaggaagcaaaagtaagaagcagcattttatgattcataatttcagtttactagactgaagttttgaagtaaac

SEQ ID NO: 24625 - DNA, 1706 bp, Homo sapiens
  source 1..1706: mol_type = unassigned DNA
cgcgctcgggcgccgagtctgcgcgctgacgtccgacgctccaggtactttccccacggccgacagggcttggcgtgggggcggggcgcggcgcgcagcgcgcatgcgccgcagcgccagcgctctccccggatcgtgcggggcctgagcctctccgccggcgcaggctctgctcgcgccagctcgctcccgcagccatgcccaccaccatcgagcgggagttcgaagagttggatactcagcgtcgctggcagccgctgtacttggaaattcgaaatgagtcccatgactatcctcatagagtggccaagtttccagaaaacagaaatcgaaacagatacagagatgtaagcccatatgatcacagtcgtgttaaactgcaaaatgctgagaatgattatattaatgccagtttagttgacatagaagaggcacaaaggagttacatcttaacacagggtccacttcctaacacatgctgccatttctggcttatggtttggcagcagaagaccaaagcagttgtcatgctgaaccgcattgtggagaaagaatcggttaaatgtgcacagtactggccaacagatgaccaagagatgctgtttaaagaaacaggattcagtgtgaagctcttgtcagaagatgtgaagtcgtattatacagtacatctactacaattagaaaatatcaatagtggtgaaaccagaacaatatctcactttcattatactacctggccagattttggagtccctgaatcaccagcttcatttctcaatttcttgtttaaagtgagagaatctggctccttgaaccctgaccatgggcctgcggtgatccactgtagtgcaggcattgggcgctctggcaccttctctctggtagacacttgtcttgttttgatggaaaaaggagatgatattaacataaaacaagtgttactgaacatgagaaaataccgaatgggtcttattcagaccccagatcaactgagattctcatacatggctataatagaaggagcaaaatgtataaagggagattctagtatacagaaacgatggaaagaactttctaaggaagacttatctcctgcctttgatcattcaccaaacaaaataatgactgaaaaatacaatgggaacagaataggtctagaagaagaaaaactgacaggtgaccgatgtacaggactttcctctaaaatgcaagatacaatggaggagaacagtgagagtgctctacggaaacgtattcgagaggacagaaaggccaccacagctcagaaggtgcagcagatgaaacagaggctaaatgagaatgaacgaaaaagaaaaaggccaagattgacagacacctaatattcatgacttgagaatattctgcagctataaattttgaaccattgatgtgcaaagcaagacctgaagcccactccggaaactaaagtgaggctcgctaaccctctagattgcctcacagttgtttgtttacaaagtaaactttacatccaggggatgaagagcacccaccagcagaagactttgcagaacctttaattggatgtgttaagtgtttttaatgagtgtatgaaatgtagaaagatgtacaagaaataaattaggggagattactttgtattgtactgccattcctactgtatttttatactttttggcagcattaaatatttttgttaaatagtc

SEQ ID NO: 24626 - DNA, 2208 bp, Homo sapiens
  source 1..2208: mol_type = unassigned DNA
tgtcagcaagaatttaggatgtatggaaaggatggtaaaggcaccaactggatggatcagggagacatggaatgcagaatgcaggaaatagatgatcacagtcgtgttaaactgcaaaatgctgagaatgattatattaatgccagtttagttgacatagaagaggcacaaaggagttacatcttaacacagggtccacttcctaacacatgctgccatttctggcttatggtttggcagcagaagaccaaagcagttgtcatgctgaaccgcattgtggagaaagaatcggttaaatgtgcacagtactggccaacagatgaccaagagatgctgtttaaagaaacaggattcagtgtgaagctcttgtcagaagatgtgaagtcgtattatacagtacatctactacaattagaaaatatcaatagtggtgaaaccagaacaatatctcactttcattatactacctggccagattttggagtccctgaatcaccagcttcatttctcaatttcttgtttaaagtgagagaatctggctccttgaaccctgaccatgggcctgcggtgatccactgtagtgcaggcattgggcgctctggcaccttctctctggtagacacttgtcttgttttgatggaaaaaggagatgatattaacataaaacaagtgttactgaacatgagaaaataccgaatgggtcttattcagaccccagatcaactgagattctcatacatggctataatagaaggagcaaaatgtataaagggagattctagtatacagaaacgatggaaagaactttctaaggaagacttatctcctgcctttgatcattcaccaaacaaaataatgactgaaaaatacaatgggaacagaataggtctagaagaagaaaaactgacaggtgaccgatgtacaggactttcctctaaaatgcaagatacaatggaggagaacagtgagagtgctctacggaaacgtattcgagaggacagaaaggccaccacagctcagaaggtgcagcagatgaaacagaggctaaatgagaatgaacgaaaaagaaaaaggtggttatattggcaacctattctcactaagatggggtttatgtcagtcattttggttggcgcttttgttggctggacactgttttttcagcaaaatgccctataaacaattaattttgcccagcaagcttctgcactagtaactgacagtgctacattaatcataggggtttgtctgcagcaaacgcctcatatcccaaaaacggtgcagtagaatagacatcaaccagataagtgatatttacagtcacaagcccaacatctcaggactcttgactgcaggttcctctgaaccccaaactgtaaatggctgtctaaaataaagacattcatgtttgttaaaaactggtaaattttgcaactgtattcatacatgtcaaacacagtatttcacctgaccaacattgagatatcctttatcacaggatttgtttttggaggctatctggattttaacctgcacttgatataagcaataaatattgtggttttatctacgttattggaaagaaaatgacatttaaataatgtgtgtaatgtataatgtactattgacatgggcatcaacacttttattcttaagcatttcagggtaaatatattttataagtatctatttaatcttttgtagttaactgtactttttaagagctcaatttgaaaaatctgttactaaaaaaataaattgtatgtcgattgaattgtactggatacattttccatttttctaaagagaagtttgatatgagcagttagaagttggaataagcaatttctactatatattgcatttcttttatgttttacagttttccccattttaaaaagaaaagcaaacaaagaaacaaaagtttttcctaaaaatatctttgaaggaaaattctccttactgggatagtcaggtaaacagttggtcaagactttgtaaagaaattggtttctgtaaatcccattattgatatgtttatttttcatgaaaatttcaatgtagttggggtagattatgatttaggaagcaaaagtaagaagcagcattttatgattcataatttcagtttactagactgaagttttgaagtaaacacttttcagtttctttctacttcaataaatagtatgattatatgcaaacctt

SEQ ID NO: 24627 - DNA, 1503 bp, Homo sapiens
  source 1..1503: mol_type = unassigned DNA
agcgcgcatgcgccgcagcgccagcgctctccccggatcgtgcggggcctgagcctctccgccggcgcaggctctgctcgcgccagctcgctcccgcagccatgcccaccaccatcgagcgggagttcgaagagttggatactcagcgtcgctggcagccgctgtacttggaaattcgaaatgagtcccatgactatcctcatagagtggccaagtttccagaaaacagaaatcgaaacagatacagagatgtaagcccatatgatcacagtcgtgttaaactgcaaaatgctgagaatgattatattaatgccagtttagttgacatagaagaggcacaaaggagttacatcttaacacagggtccacttcctaacacatgctgccatttctggcttatggtttggcagcagaagaccaaagcagttgtcatgctgaaccgcattgtggagaaagaatcggttaaatgtgcacagtactggccaacagatgaccaagagatgctgtttaaagaaacaggattcagtgtgaagctcttgtcagaagatgtgaagtcgtattatacagtacatctactacaattagaaaatatcaatagtggtgaaaccagaacaatatctcactttcattatactacctggccagattttggagtccctgaatcaccagcttcatttctcaatttcttgtttaaagtgagagaatctggctccttgaaccctgaccatgggcctgcggtgatccactgtagtgcaggcattgggcgctctggcaccttctctctggtagacacttgtcttgttttgatggaaaaaggagatgatattaacataaaacaagtgttactgaacatgagaaaataccgaatgggtcttattcagaccccagatcaactgagattctcatacatggctataatagaaggagcaaaatgtataaagggagattctagtatacagaaacgatggaaagaactttctaaggaagacttatctcctgcctttgatcattcaccaaacaaaataatgactgaaaaatacaatgggaacagaataggtctagaagaagaaaaactgacaggtgaccgatgtacaggactttcctctaaaatgcaagatacaatggaggagaacagtgagaggccaagattgacagacacctaatattcatgacttgagaatattctgcagctataaattttgaaccattgatgtgcaaagcaagacctgaagcccactccggaaactaaagtgaggctcgctaaccctctagattgcctcacagttgtttgtttacaaagtaaactttacatccaggggatgaagagcacccaccagcagaagactttgcagaacctttaattggatgtgttaagtgtttttaatgagtgtatgaaatgtagaaagatgtacaagaaataaattaggggagattactttgtattgtactgccattcctactgtatttttatactttttggcagcattaaatatttttgttaaa

SEQ ID NO: 24628 - DNA, 3654 bp, Homo sapiens
  source 1..3654: mol_type = unassigned DNA
gaagtcagtaaaccacagccttcagcatgctctgctcaggcggcagcagtggctttttggaggtgtctcggccatgacacacatttgacatgccctccctcaacctacttatagactatttttcttgctctgcagcatggaccaaagagaaattctgcagaagttcctggatgaggcccaaagcaagaaaattactaaagaggagtttgccaatgaatttctgaagctgaaaaggcaatctaccaagtacaaggcagacaaaacctatcctacaactgtggctgagaagcccaagaatatcaagaaaaacagatataaggatattttgccctatgattatagccgggtagaactatccctgataacctctgatgaggattccagctacatcaatgccaacttcattaagggagtttatggacccaaggcttatattgccacccagggtcctttatctacaaccctcctggacttctggaggatgatttgggaatatagtgtccttatcattgttatggcatgcatggagtatgaaatgggaaagaaaaagtgtgagcgctactgggctgagccaggagagatgcagctggaatttggccctttctctgtatcctgtgaagctgaaaaaaggaaatctgattatataatcaggactctaaaagttaagttcaatagtgaaactcgaactatctaccagtttcattacaagaattggccagaccatgatgtaccttcatctatagaccctattcttgagctcatctgggatgtacgttgttaccaagaggatgacagtgttcccatatgcattcactgcagtgctggctgtggaaggactggtgttatttgtgctattgattatacatggatgttgctaaaagatgggataattcctgagaacttcagtgttttcagtttgatccgggaaatgcggacacagaggccttcattagttcaaacgcaggaacaatatgaactggtctacaatgctgtattagaactatttaagagacagatggatgttatcagagataaacattctggaacagagagtcaagcaaagcattgtattcctgagaaaaatcacactctccaagcagactcttattctcctaatttaccaaaaagtaccacaaaagcagcaaaaatgatgaaccaacaaaggacaaaaatggaaatcaaagaatcttcttcctttgactttaggacttctgaaataagtgcaaaagaagagctagttttgcaccctgctaaatcaagcacttcttttgactttctggagctaaattacagttttgacaaaaatgctgacacaaccatgaaatggcagacaaaggcatttccaatagttggggagcctcttcagaagcatcaaagtttggatttgggctctcttttgtttgagggatgttctaattctaaacctgtaaatgcagcaggaagatattttaattcaaaggtgccaataacacggaccaaatcaactccttttgaattgatacagcagagagaaaccaaggaggtggacagcaaggaaaacttttcttatttggaatctcaaccacatgattcttgttttgtagagatgcaggctcaaaaagtaatgcatgtttcttcagcagaactgaattattcactgccatatgactctaaacaccaaatacgtaatgcctctaatgtaaagcaccatgactctagtgctcttggtgtatattcttacatacctttagtggaaaatccttatttttcatcatggcctccaagtggtaccagttctaagatgtctcttgatttacctgagaagcaagatggaactgtttttccttcttctctgttgccaacatcctctacatccctcttctcttattacaattcacatgattctttatcactgaattctccaaccaatatttcctcactattgaaccaggagtcagctgtactagcaactgctccaaggatagatgatgaaatcccccctccacttcctgtatggacacctgaatcatttattgtggttgaggaagctggagaattctcaccaaatgttcccaaatccttatcctcagctgtgaaggtaaaaattggaacatcactggaatggggtggaacatctgaaccaaagaaatttgatgactctgtgatacttagaccaagcaagagtgtaaaactccgaagtcctaaatcagaactacatcaagatcgttcttctcccccacctcctctcccagaaagaactctagagtccttctttcttgccgatgaagattgtatgcaggcccaatctatagaaacatattctactagctatcctgacaccatggaaaattcaacatcttcaaaacagacactgaagactcctggaaaaagtttcacaaggagtaagagtttgaaaattttgcgaaacatgaaaaagagtatctgtaattcttgcccaccaaacaagcctgcagaatctgttcagtcaaataactccagctcatttctgaattttggttttgcaaaccgtttttcaaaacccaaaggaccaaggaatccaccaccaacttggaatatttaataaaactccagatttataataatatgggctgcaagtacacctgcaaataaaactactagaatactgctagttaaaataagtgctctatatgcataatatcaaatatgaagatatgctaatgtgttaatagcttttaaaagaaaagcaaaatgccaataagtgccagttttgcattttcatatcatttgcattgagttgaaaactgcaaataaaagtttgtcacttgagcttatgtacagaatgctatatgagaaacacttttagaatggatttatttttcatttttgccagttatttttattttcttttacttttctacataaacataaacttcaaaaggtttgtaagatttggatctcaactaatttctacattgccagaatatactataaaaagttaaaaaaaaaacttactttgtgggttgcaatacaaactgctcttgacaatgactattccctgacagttatttttgcctaaatggagtataccttgtaaatcttcccaaatgttgtggaaaactggaatattaagaaaatgagaaattatatttattagaataaaatgtgcaaataatgacaattatttgaatgtaacaaggaattcaactgaaatcctgataagttttaaccaaagtcattaaattaccaattctagaaaagtaatcaatgaaatataatagctatcttttggtagcaaaagatataaattgtatatgtttatacaggatctttcagatcatgtgcaatttttatctaaccaatcagaaatactagtttaaaatgaatttctatatgaatatggatctgccataagaaaatctagttcaactctaattttatgtagtaaataaattggcaggtaattgtttttacaaagaatccacctgacttcccctaatgcattaaaaatatttttatttaaataactttatttataacttttagaaacatgtagtattgtttaaacatcatttgttcttcagtatttttcatttggaagtccaatagggcaaattgaatgaagtattattatctgtctcttgtagtacaatgtatccaacagacactcaataaactttttggttgttaaactga

SEQ ID NO: 24629 - DNA, 2414 bp, Homo sapiens
  source 1..2414: mol_type = unassigned DNA
ggaggtgtctcggccatgacacacatttgacatgccctccctcaacctacttatagactatttttcttgctctgcagcatggaccaaagagaaattctgcagaagttcctggatgaggcccaaagcaagaaaattactaaagaggagtttgccaatgaatttctgaagctgaaaaggcaatctaccaagtacaaggcagacaaaacctatcctacaactgtggctgagaagcccaagaatatcaagaaaaacagatataaggatattttgccctatgattatagccgggtagaactatccctgataacctctgatgaggattccagctacatcaatgccaacttcattaagggagtttatggacccaaggcttatattgccacccagggtcctttatctacaaccctcctggacttctggaggatgatttgggaatatagtgtcctttgctggctgtggaaggactggtgttatttgtgctattgattatacatggatgttgctaaaagatgggataattcctgagaacttcagtgttttcagtttgatccgggaaatgcggacacagaggccttcattagttcaaacgcaggaacaatatgaactggtctacaatgctgtattagaactatttaagagacagatggatgttatcagagataaacattctggaacagagagtcaagcaaagcattgtattcctgagaaaaatcacactctccaagcagactcttattctcctaatttaccaaaaagtaccacaaaagcagcaaaaatgatgaaccaacaaaggacaaaaatggaaatcaaagaatcttcttcctttgactttaggacttctgaaataagtgcaaaagaagagctagttttgcaccctgctaaatcaagcacttcttttgactttctggagctaaattacagttttgacaaaaatgctgacacaaccatgaaatggcagacaaaggcatttccaatagttggggagcctcttcagaagcatcaaagtttggatttgggctctcttttgtttgagggatgttctaattctaaacctgtaaatgcagcaggaagatattttaattcaaaggtgccaataacacggaccaaatcaactccttttgaattgatacagcagagagaaaccaaggaggtggacagcaaggaaaacttttcttatttggaatctcaaccacatgattcttgttttgtagagatgcaggctcaaaaagtaatgcatgtttcttcagcagaactgaattattcactgccatatgactctaaacaccaaatacgtaatgcctctaatgtaaagcaccatgactctagtgctcttggtgtatattcttacatacctttagtggaaaatccttatttttcatcatggcctccaagtggtaccagttctaagatgtctcttgatttacctgagaagcaagatggaactgtttttccttcttctctgttgccaacatcctctacatccctcttctcttattacaattcacatgattctttatcactgaattctccaaccaatatttcctcactattgaaccaggagtcagctgtactagcaactgctccaaggatagatgatgaaatcccccctccacttcctgtatggacacctgaatcatttattgtggttgaggaagctggagaattctcaccaaatgttcccaaatccttatcctcagctgtgaaggtaaaaattggaacatcactggaatggggtggaacatctgaaccaaagaaatttgatgactctgtgatacttagaccaagcaagagtgtaaaactccgaagtcctaaatcagaactacatcaagatcgttcttctcccccacctcctctcccagaaagaactctagagtccttctttcttgccgatgaagattgtatgcaggcccaatctatagaaacatattctactagctatcctgacaccatggaaaattcaacatcttcaaaacagacactgaagactcctggaaaaagtttcacaaggagtaagagtttgaaaattttgcgaaacatgaaaaagagtatctgtaattcttgcccaccaaacaagcctgcagaatctgttcagtcaaataactccagctcatttctgaattttggttttgcaaaccgtttttcaaaacccaaaggaccaaggaatccaccaccaacttggaatatttaataaaactccagatttataataatatgggctgcaagtacacctgcaaataaaactactagaatactgctagttaaaataagtgctctatatgcataatatcaaatatgaagatatgctaatgtgttaatagcttttaaaagaaaagcaaaatgccaataagtgccagttttgcattttcatatcatttgcattgagttgaaaactgcaaataaaagtttgtcacttg

SEQ ID NO: 24630 - DNA, 5244 bp, Homo sapiens
  source 1..5244: mol_type = unassigned DNA
cggggctgggctcgtggctgagccagcagctgcagcagctacgggagtggccgggtggccggcgggtgccagccgccatggaggccgtgccccgcatgcccatgatctggctggacctgaaggaggccggtgactttcacttccagccagctgtgaagaagtttgtcctgaagaattatggagagaacccagaagcctacaatgaagaactgaagaagctggagttgctcagacagaatgctgtccgtgtcccacgagactttgagggctgtagtgtcctccgcaagtacctcggccagcttcattacctgcagagtcgggtccccatgggctcgggccaggaggccgctgtccctgtcacctggacagagatcttctcaggcaagtctgtggcccatgaggacatcaagtacgagcaggcctgtattctctacaaccttggagcgctgcactccatgctgggggccatggacaagcgggtgtctgaggagggcatgaaggtctcctgtacccatttccagtgcgcagccggcgccttcgcctacctacgggagcacttccctcaagcctacagcgtcgacatgagccgccagatccttacgctcaacgtcaacctcatgctgggccaggctcaggagtgcctcctggagaagtcgatgttggacaacaggaagagctttctggtggcccgcatcagtgcacaggtggtagattactacaaggaggcatgccgggccttggagaaccccgacactgcctcactgctgggccggatccagaaggactggaagaaacttgtgcagatgaagatctactacttcgcagccgtggctcatctgcacatgggaaagcaggccgaggagcagcagaagttcggggagcgggttgcatacttccagagcgccctggacaagctcaatgaagccatcaagttggccaagggccagcctgacactgtgcaagacgcgcttcgcttcactatggatgtcattgggggaaagtacaattctgccaagaaggacaacgacttcatttaccatgaggctgtcccagcattggacactcttcagcctgtaaaaggagcccccttggtgaagcccttgccagtgaaccccacagacccagctgttacaggccctgacatctttgccaaactggtacccatggctgcccacgaggcctcgtcactgtacagtgaggagaaggccaagctgctccgggagatgatggccaagattgaggacaagaatgaggtcctggaccagttcatggattcaatgcagttggatcccgagacggtggacaaccttgatgcctacagccacatcccaccccagctcatggagaagtgcgcggctctcagcgtccggcccgacactgtcaggaaccttgtacagtccatgcaagtgctgtcaggtgtgttcacggatgtggaggcttccctgaaggacatcagagatctgttggaggaggatgagctgctagagcagaagtttcaggaggcggtgggccaggcaggggccatctccatcacctccaaggctgagctggcagaggtgaggcgagaatgggccaagtacatggaagtccatgagaaggcctccttcaccaacagtgagctgcaccgtgccatgaacctgcacgtcggcaacctgcgcctgctcagcgggccgcttgaccaggtccgggctgccctgcccacaccggccctctccccagaggacaaggccgtgctgcaaaacctaaagcgcatcctggctaaggtgcaggagatgcgggaccagcgcgtgtccctggagcagcagctgcgtgagcttatccagaaagatgacatcactgcctcgctggtcaccacagaccactcagagatgaagaagttgttcgaggagcagctgaaaaagtatgaccagctgaaggtgtacctggagcagaacctggccgcccaggaccgtgtcctctgtgcactgacagaggccaacgtgcagtacgcagccgtgcggcgggtactcagcgacttggaccaaaagtggaactccacgctgcagaccctggtggcctcgtatgaagcctatgaggacctgatgaagaagtcgcaggagggcagggacttctacgcagatctggagagcaaggtggctgctctgctggagcgcacgcagtccacctgccaggcccgcgaggctgcccgccagcagctcctggacagggagctgaagaagaagccgccgccacggcccacagccccaaagccgctgctgccccgcagggaggagagtgaggcagtggaagcaggagacccccctgaggagctgcgcagcctcccccctgacatggtggctggcccacgactgcctgacaccttcctgggaagtgccaccccgctccactttcctcccagccccttccccagctccacaggcccaggaccccactatctctcaggccccttgccccctggtacctactcgggccccacccagctgatacagcccagggccccagggccccatgcaatgcccgtagcacctgggcctgccctctacccagcccctgcctacacaccggagctgggccttgtgccccgatcctccccacagcatggcgtggtgagcagtccctatgtgggggtagggccggccccaccagttgcaggtctcccctcggccccacctcctcaattctcaggccccgagttggccatggcggttcggccagccaccaccacagtagatagcatccaggcgcccatccccagccacacagccccacggccaaaccccacccctgctcctcccccgccctgcttccctgtgcccccaccgcagccactgcccacgccttacacctaccctgcaggggctaagcaacccatcccggcacagcaccacttctcttctgggatccccgcaggttttccagccccaaggattgggccccagccccagccccatcctcagccccatccttcacaagcgtttgggcctcagcccccacagcagccccttccactccagcatccacatctcttcccaccccaggccccaggactcctacccccacaatccccctacccctatgcccctcagcctggggtcctggggcagccgccaccccccctacacacccagctctacccaggtcccgctcaagaccctctgccagcccactcaggggctctgcctttccccagccctgggccccctcagcctccccatcccccactggcatatggtcctgccccttctaccagacccatgggcccccaggcagcccctcttaccattcgagggccctcgtctgctggccagtccacccctagtccccacctggtgccttcacctgccccatctccagggcctggtccggtaccccctcgccccccagcagcagaaccacccccttgcctgcgccgaggcgccgcagctgcagacctgctctcctccagcccggagagccagcatggcggcactcagtctcctgggggtgggcagcccctgctgcagcccaccaaggtggatgcagctgagggtcgtcggccgcaggccctgcggctgattgagcgggacccctatgagcatcctgagaggctgcggcagttgcagcaggagctggaggcctttcggggtcagctgggggatgtgggagctctggacactgtctggcgagagctgcaagatgcgcaggaacatgatgcccgaggccgttccatcgccattgcccgctgctactcactgaagaaccggcaccaggatgtcatgccctatgacagtaaccgtgtggtgctgcgctcaggcaaggatgactacatcaatgccagctgcgtggaggggctctccccatactgccccccgctagtggcaacccaggccccactgcctggcacagctgctgacttctggctcatggtccatgagcagaaagtgtcagtcattgtcatgctggtttctgaggctgagatggagaagcaaaaagtggcacgctacttccccaccgagaggggccagcccatggtgcacggtgccctgagcctggcattgagcagcgtccgcagcaccgaaacccatgtggagcgcgtgctgagcctgcagttccgagaccagagcctcaagcgctctcttgtgcacctgcacttccccacttggcctgagttaggcctgcccgacagccccagcaacttgctgcgcttcatccaggaggtgcacgcacattacctgcatcagcggccgctgcacacgcccatcattgtgcactgcagctctggtgtgggccgcacgggagcctttgcactgctctatgcagctgtgcaggaggtggaggctgggaacggaatccctgagctgcctcagctggtgcggcgcatgcggcagcagagaaagcacatgctgcaggagaagctgcacctcaggttctgctatgaggcagtggtgagacacgtggagcaggtcctgcagcgccatggtgtgcctcctccatgcaaacccttggccagtgcaagcatcagccagaagaaccaccttcctcaggactcccaggacctggtcctcggtggggatgtgcccatcagctccatccaggccaccattgccaagctcagcattcggcctcctggggggttggagtccccggttgccagcttgccaggccctgcagagcccccaggcctcccgccagccagcctcccagagtctaccccaatcccatcttcctccccgccccccctttcctccccactacctgaggctccccagcctaaggaggagccgccagtgcctgaagcccccagctcggggcccccctcctcctccctggaattgctggcctccttgaccccagaggccttctccctggacagctccctgcggggcaaacagcggatgagcaagcataactttctgcaggcccataacgggcaagggctgcgggccacccggccctctgacgaccccctcagccttctggatccactctggacactcaacaagacctgaacaggttttgcctacctggtccttacactacatcatcatcatctcatgcccacctgcccacacccagcagagcttctcagtgggcacagtctcttactcccatttctgctgcctttggccctgcctggcccagcctgcacccctgtggggtggaaatgtactgcaggctctgggtcaggttctgctcctttatgggacccgacatttttcagctctttgctattgaaataataaaccaccctgttctgtggcccgt

SEQ ID NO: 24631 - DNA, 4741 bp, Homo sapiens
  source 1..4741: mol_type = unassigned DNA
aaggggcggggctgggctcgtggctgagccagcagctgcagcagctacgggagtggccgggtggccggcgggtgccagccgccatggaggccgtgccccgcatgcccatgatctggctggacctgaaggaggccggtgactttcacttccagccagctgtgaagaagaatgctgtccgtgtcccacgagactttgagggctgtagtgtcctccgcaagtacctcggccagcttcattacctgcagagtcgggtccccatgggctcgggccaggaggccgctgtccctgtcacctggacagagatcttctcaggcaagtctgtggcccatgaggacatcaagtacgagcaggcctgtattctctacaaccttggagcgctgcactccatgctgggggccatggacaagcgggtgtctgaggagtgcgcagccggcgccttcgcctacctacgggagcacttccctcaagcctacagcgtcgacatgagccgccagatccttacgctcaacgtcaacctcatgctgggccaggctcaggagtgcctcctggagaagtcgatgttggacaacaggaagagctttctggtggcccgcatcagtgcacaggtggtagattactacaaggaggcatgccgggccttggagaaccccgacactgcctcactgctgggccggatccagaaggactggaagaaacttgtgcagatgaagatctactacttcgcagccgtggctcatctgcacatgggaaagcaggccgaggagcagcagaagttcggggagcgggttgcatacttccagagcgccctggacaagctcaatgaagccatcaagttggccaagggccagcctgacactgtgcaagacgcgcttcgcttcactatggatgtcattgggggaaagtacaattctgccaagaaggacaacgacttcatttaccatgaggctgtcccagcattggacactcttcagcctgtaaaaggagcccccttggtgaagcccttgccagtgaaccccacagacccagctgttacaggccctgacatctttgccaaactggtacccatggctgcccacgaggcctcgtcactgtacagtgaggagaaggccaagctgctccgggagatgatggccaagattgaggacaagaatgaggtcctggaccagttcatggattcaatgcagttggatcccgagacggtggacaaccttgatgcctacagccacatcccaccccagctcatggagaagtgcgcggctctcagcgtccggcccgacactgtcaggaaccttgtacagtccatgcaagtgctgtcaggtgtgttcacggatgtggaggcttccctgaaggacatcagagatctgttggaggaggatgagctgctagagcagaagtttcaggaggcggtgggccaggcaggggccatctccatcacctccaaggctgagctggcagaggtgaggcgagaatgggccaagtacatggaagtccatgagaaggcctccttcaccaacagtgagctgcaccgtgccatgaacctgcacgtcggcaacctgcgcctgctcagcgggccgcttgaccaggtccgggctgccctgcccacaccggccctctccccagaggacaaggccgtgctgcaaaacctaaagcgcatcctggctaaggtgcaggagatgcgggaccagcgcgtgtccctggagcagcagctgcgtgagcttatccagaaagatgacatcactgcctcgctggtcaccacagaccactcagagatgaagaagttgttcgaggagcagctgaaaaagtatgaccagctgaaggtgtacctggagcagaacctggccgcccaggaccgtgtcctctgtgcactgacagaggccaacgtgcagtacgcagccgtgcggcgggtactcagcgacttggaccaaaagtggaactccacgctgcagaccctggtggcctcgtatgaagcctatgaggacctgatgaagaagtcgcaggagggcagggacttctacgcagatctggagagcaaggtggctgctctgctggagcgcacgcagtccacctgccaggcccgcgaggctgcccgccagcagctcctggacagggagctgaagaagaagccgccgccacggcccacagccccaaagccgctgctgccccgcagggaggagagtgaggcagtggaagcaggagacccccctgaggagctgcgcagcctcccccctgacatggtggctggcccacgactgcctgacaccttcctgggaagtgccaccccgctccactttcctcccagccccttccccagctccacaggcccaggaccccactatctctcaggccccttgccccctggtacctactcgggccccacccagctgatacagcccagggccccagggccccatgcaatgcccgtagcacctgggcctgccctctacccagccccatcctcagccccatccttcacaagcgtttgggcctcagcccccacagcagccccttccactccagcatccacatctcttcccaccccaggccccaggactcctacccccacaatccccctacccctatgcccctcagcctggggtcctggggcagccgccaccccccctacacacccagctctacccaggtcccgctcaagaccctctgccagcccactcaggggctctgcctttccccagccctgggccccctcagcctccccatcccccactggcatatggtcctgccccttctaccagacccatgggcccccaggcagcccctcttaccattcgagggccctcgtctgctggccagtccacccctagtccccacctggtgccttcacctgccccatctccagggcctggtccggtaccccctcgccccccagcagcagaaccacccccttgcctgcgccgaggcgccgcagctgcagacctgctctcctccagcccggagagccagcatggcggcactcagtctcctgggggtgggcagcccctgctgcagcccaccaaggtggatgcagctgagggtcgtcggccgcaggccctgcggctgattgagcgggacccctatgagcatcctgagaggctgcggcagttgcagcaggagctggaggcctttcggggtcagctgggggatgtgggagctctggacactgtctggcgagagctgcaagatgcgcaggaacatgatgcccgaggccgttccatcgccattgcccgctgctactcactgaagaaccggcaccaggatgtcatgccctatgacagtaaccgtgtggtgctgcgctcaggcaaggatgactacatcaatgccagctgcgtggaggggctctccccatactgccccccgctagtggcaacccaggccccactgcctggcacagctgctgacttctggctcatggtccatgagcagaaagtgtcagtcattgtcatgctggtttctgaggctgagatggagaagcaaaaagtggcacgctacttccccaccgagaggggccagcccatggtgcacggtgccctgagcctggcattgagcagcgtccgcagcaccgaaacccatgtggagcgcgtgctgagcctgcagttccgagaccagagcctcaagcgctctcttgtgcacctgcacttccccacttggcctgagttaggcctgcccgacagccccagcaacttgctgcgcttcatccaggaggtgcacgcacattacctgcatcagcggccgctgcacacgcccatcattgtgcactgcagctctggtgtgggccgcacgggagcctttgcactgctctatgcagctgtgcaggaggtggaggctgggaacggaatccctgagctgcctcagctggtgcggcgcatgcggcagcagagaaagcacatgctgcaggagaagctgcacctcaggttctgctatgaggcagtggtgagacacgtggagcaggtcctgcagcgccatggtgtgcctcctccatgcaaacccttggccagtgcaagcatcagccagaagaaccaccttcctcaggactcccaggacctggtcctcggtggggatgtgcccatcagctccatccaggccaccattgccaagctcagcattcggcctcctggggggttggagtccccggttgccagcttgccaggccctgcagagcccccaggcctcccgccagccagcctcccagagtctaccccaatcccatcttcctccccgccccccctttcctccccactacctgaggctccccagcctaaggaggagccgccagtgcctgaagcccccagctcggggcccccctcctcctccctggaattgctggcctccttgaccccagaggccttctccctggacagctccctgcggggcaaacagcggatgagcaagcataactttctgcaggcccataacgggcaagggctgcgggccacccggccctctgacgaccccctcagccttctggatccactctggacactcaacaagacctgaacaggttttgcctacctggtccttacactacatcatcatcatctcatgcccacctgcccacacccagcagagcttctcagtgggcacagtctcttactcccatttctgctgcctttggccctgcctggcccagcctgcacccctgtggggtggaaatgtactgcaggctctgggtcaggttctgctcctttatgggacccgacatttttcagctctttgctattgaaataataaaccaccctgttctgtg

SEQ ID NO: 24632 - DNA, 3135 bp, Homo sapiens
  source 1..3135: mol_type = unassigned DNA
gccggggctggggggtgccaaacccacccggcggctgcgccagcgactctgcagctgaagcgcatttggtgaggcggtcgggcgagggagcgcgcacggagcgcgggacggagcgccaggcggacggaccgaaggacggaggcaccgaaggacggacgcccccgcacacgcagacgcacagagctcggcgcggcccccgtcgcatacacactggcacagacacaagcagggacacacgcagacacacgcacactcgcgcgcgcatcctcccgccagcctgcccgcctgctcgccggcgcccggagcccgctctggccgctggatgatctgaagctgccctctctccttcatttatatcaccagcttgctttttgctgagaaagcttcctgccctggaagatggcacccttccccatccagacaccttgggaatgaattatgagggagccaggagtgagagagagaaccacgctgctgatgactccgagggaggggccctggacatgtgctgcagtgagaggctaccgggtctcccccagccgatagtgatggaggcactggacgaggctgaagggctccaggactcacagagagagatgccgccaccccctcctccctcgccgccctcagatccagctcagaagccaccacctcgaggcgctgggagccactccctcactgtcaggagcagcctgtgcctgttcgctgcctcacagttcctgcttgcctgtggggtgctctggttcagcggttatggccacatctggtcacagaacgccacaaacctcgtctcctctttgctgacgctcctgaaacagctggaacccacggcctggcttgactctgggacgtggggagtccccagtctgctgctggtctttctgtccgtgggcctggtcctcgttaccaccctggtgtggcacctcctgaggacacccccagagccacccaccccactgccccctgaggacaggcgccagtcagtgagccgccagccctccttcacctactcagagtggatggaggagaagatcgaggatgacttcctggacctcgacccggtgcccgagactcctgtgtttgattgtgtgatggacatcaagcctgaggctgaccccacctcactcaccgtcaagtccatgggtctgcaggagaggaggggttccaatgtctccctgaccctggacatgtgcactccgggctgcaacgaggagggctttggctatctcatgtccccacgtgaggagtccgcccgcgagtacctgctcagcgcctcccgtgtcctccaagcagaagagcttcatgaaaaggccctggaccctttcctgctgcaggcggaattctttgaaatccccatgaactttgtggatccgaaagagtacgacatccctgggctggtgcggaagaaccggtacaaaaccatacttcccaaccctcacagcagagtgtgtctgacctcaccagaccctgacgaccctctgagttcctacatcaatgccaactacatccggggctatggtggggaggagaaggtgtacatcgccactcagggacccatcgtcagcacggtcgccgacttctggcgcatggtgtggcaggagcacacgcccatcattgtcatgatcaccaacatcgaggagatgaacgagaaatgcaccgagtattggccggaggagcaggtggcgtacgacggtgttgagatcactgtgcagaaagtcattcacacggaggattaccggctgcgactcatctccctcaagagtgggactgaggagcgaggcctgaagcattactggttcacatcctggcccgaccagaagaccccagaccgggcccccccactcctgcacctggtgcgggaggtggaggaggcagcccagcaggaggggccccactgtgcccccatcatcgtccactgcagtgcagggattgggaggaccggctgcttcattgccaccagcatctgctgccagcagctgcggcaggagggtgtggtggacatcctgaagaccacgtgccagctccgtcaggacaggggcggcatgatccagacatgcgagcagtaccagtttgtgcaccacgtcatgagcctctacgaaaagcagctgtcccaccagtccccagaatgactgcgcttctcctacaaggttctctgggcactgcccagcctgagtctcggccctcacccagggccctgcctcgggtcctgggcctgctccccgcttcctccccttcagtcagctccctctgtcctctgtcagcctggcctgacccctaccctccagcattgctcttcctactgtacatattggggagtggggggcagggtcgggaagggacatgccaggccaggcctggggccccggggcctgacccacaccacgcagaccccgggctccagtttttaacgatggttccatcaatacctgatccagaatgtttccgtgctacactttgtgtcctgctgcaatgtgttctgtctgtccatccatctctgccctctgtaccggacactgtgtctcctcagccaggaaggggtaatgagctccagcccctaagcaaccggacttgcctgcctcggcctcacccgcacttctcccaaaaggcagatgacggggagttaggcatggggagctccagaaggtcaccagagagctttcagctgagggagagttctctaggttggagtgggcatcacagccagggtggcctctgggtgtcagatgctctcaggagggtgcccagcctgtgaggcactggcaaggtagggggcagatggggcatggagaacccagaggatctaggccctgttggggaggggaggggagctcaaggtttgggtggggactcagcccagatctacgtgagacatttttctgtgtcactgtgggaaagccttcccagaagtctcactgcgtgttgctctgcgtgtgttcccatgtccatgcgtgtgttgagagcccatcaggagggcatgcatgactctttggcaacatgtattatcttggagccacgtgtttttattgctgactttaaatatttatcccacggcagacagagacatttggtgtctttttataattcgctcgtggtcattgaatagagcaataaacggagcattttgagcaaaactaa

SEQ ID NO: 24633 - DNA, 3037 bp, Homo sapiens
  source 1..3037: mol_type = unassigned DNA
gccggggctggggggtgccaaacccacccggcggctgcgccagcgactctgcagctgaagcgcatttggtgaggcggtcgggcgagggagcgcgcacggagcgcgggacggagcgccaggcggacggaccgaaggacggaggcaccgaaggacggacgcccccgcacacgcagacgcacagagctcggcgcggcccccgtcgcatacacactggcacagacacaagcagggacacacgcagacacacgcacactcgcgcgcgcatcctcccgccagcctgcccgcctgctcgccggcgcccggagcccgctctggccgctggatgatctgaagctgccctctctccttcatttatatcaccagcttgctttttgctgagaaagcttcctgccctggaagatggcacccttccccatccagacaccttgggaatgaattatgagggagccaggagtgagagagagaaccacgctgctgatgactccgagggaggggccctggacatgtgctgcagtgagaggctaccgggtctcccccagccgatagtgatggaggcactggacgaggctgaagggctccaggactcacagagagagatgccgccaccccctcctccctcgccgccctcagatccagctcagaagccaccacctcgaggcgctgggagccactccctcactgtcaggagcagcctgtgcctgttcgctgcctcacagttcctgctggaacccacggcctggcttgactctgggacgtggggagtccccagtctgctgctggtctttctgtccgtgggcctggtcctcgttaccaccctggtgtggcacctcctgaggacacccccagagccacccaccccactgccccctgaggacaggcgccagtcagtgagccgccagccctccttcacctactcagagtggatggaggagaagatcgaggatgacttcctggacctcgacccggtgcccgagactcctgtgtttgattgtgtgatggacatcaagcctgaggctgaccccacctcactcaccgtcaagtccatgggtctgcaggagaggaggggttccaatgtctccctgaccctggacatgtgcactccgggctgcaacgaggagggctttggctatctcatgtccccacgtgaggagtccgcccgcgagtacctgctcagcgcctcccgtgtcctccaagcagaagagcttcatgaaaaggccctggaccctttcctgctgcaggcggaattctttgaaatccccatgaactttgtggatccgaaagagtacgacatccctgggctggtgcggaagaaccggtacaaaaccatacttcccaaccctcacagcagagtgtgtctgacctcaccagaccctgacgaccctctgagttcctacatcaatgccaactacatccggggctatggtggggaggagaaggtgtacatcgccactcagggacccatcgtcagcacggtcgccgacttctggcgcatggtgtggcaggagcacacgcccatcattgtcatgatcaccaacatcgaggagatgaacgagaaatgcaccgagtattggccggaggagcaggtggcgtacgacggtgttgagatcactgtgcagaaagtcattcacacggaggattaccggctgcgactcatctccctcaagagtgggactgaggagcgaggcctgaagcattactggttcacatcctggcccgaccagaagaccccagaccgggcccccccactcctgcacctggtgcgggaggtggaggaggcagcccagcaggaggggccccactgtgcccccatcatcgtccactgcagtgcagggattgggaggaccggctgcttcattgccaccagcatctgctgccagcagctgcggcaggagggtgtggtggacatcctgaagaccacgtgccagctccgtcaggacaggggcggcatgatccagacatgcgagcagtaccagtttgtgcaccacgtcatgagcctctacgaaaagcagctgtcccaccagtccccagaatgactgcgcttctcctacaaggttctctgggcactgcccagcctgagtctcggccctcacccagggccctgcctcgggtcctgggcctgctccccgcttcctccccttcagtcagctccctctgtcctctgtcagcctggcctgacccctaccctccagcattgctcttcctactgtacatattggggagtggggggcagggtcgggaagggacatgccaggccaggcctggggccccggggcctgacccacaccacgcagaccccgggctccagtttttaacgatggttccatcaatacctgatccagaatgtttccgtgctacactttgtgtcctgctgcaatgtgttctgtctgtccatccatctctgccctctgtaccggacactgtgtctcctcagccaggaaggggtaatgagctccagcccctaagcaaccggacttgcctgcctcggcctcacccgcacttctcccaaaaggcagatgacggggagttaggcatggggagctccagaaggtcaccagagagctttcagctgagggagagttctctaggttggagtgggcatcacagccagggtggcctctgggtgtcagatgctctcaggagggtgcccagcctgtgaggcactggcaaggtagggggcagatggggcatggagaacccagaggatctaggccctgttggggaggggaggggagctcaaggtttgggtggggactcagcccagatctacgtgagacatttttctgtgtcactgtgggaaagccttcccagaagtctcactgcgtgttgctctgcgtgtgttcccatgtccatgcgtgtgttgagagcccatcaggagggcatgcatgactctttggcaacatgtattatcttggagccacgtgtttttattgctgactttaaatatttatcccacggcagacagagacatttggtgtctttttataattcgctcgtggtcattgaatagagcaataaacggagcattttgagcaaaact

SEQ ID NO: 24634 - DNA, 3088 bp, Homo sapiens
  source 1..3088: mol_type = unassigned DNA
gccggggctggggggtgccaaacccacccggcggctgcgccagcgactctgcagctgaagcgcatttggtgaggcggtcgggcgagggagcgcgcacggagcgcgggacggagcgccaggcggacggaccgaaggacggaggcaccgaaggacggacgcccccgcacacgcagacgcacagagctcggcgcggcccccgtcgcatacacactggcacagacacaagcagggacacacgcagacacacgcacactcgcgcgcgcatcctcccgccagcctgcccgcctgctcgccggcgcccggagcccgctctggccgcttgctttttgctgagaaagcttcctgccctggaagatggcacccttccccatccagacaccttgggaatgaattatgagggagccaggagtgagagagagaaccacgctgctgatgactccgagggaggggccctggacatgtgctgcagtgagaggctaccgggtctcccccagccgatagtgatggaggcactggacgaggctgaagggctccaggactcacagagagagatgccgccaccccctcctccctcgccgccctcagatccagctcagaagccaccacctcgaggcgctgggagccactccctcactgtcaggagcagcctgtgcctgttcgctgcctcacagttcctgcttgcctgtggggtgctctggttcagcggttatggccacatctggtcacagaacgccacaaacctcgtctcctctttgctgacgctcctgaaacagctggaacccacggcctggcttgactctgggacgtggggagtccccagtctgctgctggtctttctgtccgtgggcctggtcctcgttaccaccctggtgtggcacctcctgaggacacccccagagccacccaccccactgccccctgaggacaggcgccagtcagtgagccgccagccctccttcacctactcagagtggatggaggagaagatcgaggatgacttcctggacctcgacccggtgcccgagactcctgtgtttgattgtgtgatggacatcaagcctgaggctgaccccacctcactcaccgtcaagtccatgggtctgcaggagaggaggggttccaatgtctccctgaccctggacatgtgcactccgggctgcaacgaggagggctttggctatctcatgtccccacgtgaggagtccgcccgcgagtacctgctcagcgcctcccgtgtcctccaagcagaagagcttcatgaaaaggccctggaccctttcctgctgcaggcggaattctttgaaatccccatgaactttgtggatccgaaagagtacgacatccctgggctggtgcggaagaaccggtacaaaaccatacttcccaaccctcacagcagagtgtgtctgacctcaccagaccctgacgaccctctgagttcctacatcaatgccaactacatccggggctatggtggggaggagaaggtgtacatcgccactcagggacccatcgtcagcacggtcgccgacttctggcgcatggtgtggcaggagcacacgcccatcattgtcatgatcaccaacatcgaggagatgaacgagaaatgcaccgagtattggccggaggagcaggtggcgtacgacggtgttgagatcactgtgcagaaagtcattcacacggaggattaccggctgcgactcatctccctcaagagtgggactgaggagcgaggcctgaagcattactggttcacatcctggcccgaccagaagaccccagaccgggcccccccactcctgcacctggtgcgggaggtggaggaggcagcccagcaggaggggccccactgtgcccccatcatcgtccactgcagtgcagggattgggaggaccggctgcttcattgccaccagcatctgctgccagcagctgcggcaggagggtgtggtggacatcctgaagaccacgtgccagctccgtcaggacaggggcggcatgatccagacatgcgagcagtaccagtttgtgcaccacgtcatgagcctctacgaaaagcagctgtcccaccagtccccagaatgactgcgcttctcctacaaggttctctgggcactgcccagcctgagtctcggccctcacccagggccctgcctcgggtcctgggcctgctccccgcttcctccccttcagtcagctccctctgtcctctgtcagcctggcctgacccctaccctccagcattgctcttcctactgtacatattggggagtggggggcagggtcgggaagggacatgccaggccaggcctggggccccggggcctgacccacaccacgcagaccccgggctccagtttttaacgatggttccatcaatacctgatccagaatgtttccgtgctacactttgtgtcctgctgcaatgtgttctgtctgtccatccatctctgccctctgtaccggacactgtgtctcctcagccaggaaggggtaatgagctccagcccctaagcaaccggacttgcctgcctcggcctcacccgcacttctcccaaaaggcagatgacggggagttaggcatggggagctccagaaggtcaccagagagctttcagctgagggagagttctctaggttggagtgggcatcacagccagggtggcctctgggtgtcagatgctctcaggagggtgcccagcctgtgaggcactggcaaggtagggggcagatggggcatggagaacccagaggatctaggccctgttggggaggggaggggagctcaaggtttgggtggggactcagcccagatctacgtgagacatttttctgtgtcactgtgggaaagccttcccagaagtctcactgcgtgttgctctgcgtgtgttcccatgtccatgcgtgtgttgagagcccatcaggagggcatgcatgactctttggcaacatgtattatcttggagccacgtgtttttattgctgactttaaatatttatcccacggcagacagagacatttggtgtctttttataattcgctcgtggtcattgaatagagcaataaacggagcattttgagcaaaact

SEQ ID NO: 24635 - DNA, 2245 bp, Homo sapiens
  source 1..2245: mol_type = unassigned DNA
gtgctctaaaacgagaagtacaagtgagttcccccaaggggtcggccgcgcctcttcctgtccccgccctgccggctgccccaggccagtggagtggcagccccagaactgggaccaccgggggtggtgaggcggcccggcactgggagctgcatctgaggcttagtccctgagctctctgcctgcccagactagctgcacctcctcattccctgcgcccccttcctctccggaagcccccaggatggtgaggtggtttcaccgagacctcagtgggctggatgcagagaccctgctcaagggccgaggtgtccacggtagcttcctggctcggcccagtcgcaagaaccagggtgacttctcgctctccgtcagggtgggggatcaggtgacccatattcggatccagaactcaggggatttctatgacctgtatggaggggagaagtttgcgactctgacagagctggtggagtactacactcagcagcagggtgtcctgcaggaccgcgacggcaccatcatccacctcaagtacccgctgaactgctccgatcccactagtgagaggtggtaccatggccacatgtctggcgggcaggcagagacgctgctgcaggccaagggcgagccctggacgtttcttgtgcgtgagagcctcagccagcctggagacttcgtgctttctgtgctcagtgaccagcccaaggctggcccaggctccccgctcagggtcacccacatcaaggtcatgtgcgagggtggacgctacacagtgggtggtttggagaccttcgacagcctcacggacctggtggagcatttcaagaagacggggattgaggaggcctcaggcgcctttgtctacctgcggcagccgtactatgccacgagggtgaatgcggctgacattgagaaccgagtgttggaactgaacaagaagcaggagtccgaggatacagccaaggctggcttctgggaggagtttgagagtttgcagaagcaggaggtgaagaacttgcaccagcgtctggaagggcagcggccagagaacaagggcaagaaccgctacaagaacattctcccctttgaccacagccgagtgatcctgcagggacgggacagtaacatccccgggtccgactacatcaatgccaactacatcaagaaccagctgctaggccctgatgagaacgctaagacctacatcgccagccagggttgtctggaggccacggtcaatgacttctggcagatggcgtggcaggagaacagccgtgtcatcgtcatgaccacccgagaggtggagaaaggccggaacaaatgcgtcccatactggcccgaggtgggcatgcagcgtgcttatgggccctactctgtgaccaactgcggggagcatgacacaaccgaatacaaactccgtaccttacaggtctccccgctggacaatggagacctgattcgggagatctggcattaccagtacctgagctggcccgaccatggggtccccagtgagcctgggggtgtcctcagcttcctggaccagatcaaccagcggcaggaaagtctgcctcacgcagggcccatcatcgtgcactgcagcgccggcatcggccgcacaggcaccatcattgtcatcgacatgctcatggagaacatctccaccaagggcctggactgtgacattgacatccagaagaccatccagatggtgcgggcgcagcgctcgggcatggtgcagacggaggcgcagtacaagttcatctacgtggccatcgcccagttcattgaaaccactaagaagaagctggaggtcctgcagtcgcagaagggccaggagtcggagtacgggaacatcacctatcccccagccatgaagaatgcccatgccaaggcctcccgcacctcgtccaaacacaaggaggatgtgtatgagaacctgcacactaagaacaagagggaggagaaagtgaagaagcagcggtcagcagacaaggagaagagcaagggttccctcaagaggaagtgagcggtgctgtcctcaggtggccatgcctcagccctgaccctgtggaagcatttcgcgatggacagactcacaacctgaacctaggagtgccccattcttttgtaatttaaatggctgcatcccccccacctctccctgaccctgtatatagcccagccaggccccaggcagggccaacccttctcctcttgtaaataaagccctgggatcact

SEQ ID NO: 24636 - DNA, 2159 bp, Homo sapiens
  source 1..2159: mol_type = unassigned DNA
attggcctggcaggcaggatcgaggaggaagtggctgattactgagcggttcttcctcacctggcttgggccactgtgcacagctgtgccgctggctcagccccgccccctgcggccctctgccgtggcttccccctccctacagagagatgctgtcccgtgggtggtttcaccgagacctcagtgggctggatgcagagaccctgctcaagggccgaggtgtccacggtagcttcctggctcggcccagtcgcaagaaccagggtgacttctcgctctccgtcagggtgggggatcaggtgacccatattcggatccagaactcaggggatttctatgacctgtatggaggggagaagtttgcgactctgacagagctggtggagtactacactcagcagcagggtgtcctgcaggaccgcgacggcaccatcatccacctcaagtacccgctgaactgctccgatcccactagtgagaggtggtaccatggccacatgtctggcgggcaggcagagacgctgctgcaggccaagggcgagccctggacgtttcttgtgcgtgagagcctcagccagcctggagacttcgtgctttctgtgctcagtgaccagcccaaggctggcccaggctccccgctcagggtcacccacatcaaggtcatgtgcgagggtggacgctacacagtgggtggtttggagaccttcgacagcctcacggacctggtggagcatttcaagaagacggggattgaggaggcctcaggcgcctttgtctacctgcggcagccgtactatgccacgagggtgaatgcggctgacattgagaaccgagtgttggaactgaacaagaagcaggagtccgaggatacagccaaggctggcttctgggaggagtttgagagtttgcagaagcaggaggtgaagaacttgcaccagcgtctggaagggcagcggccagagaacaagggcaagaaccgctacaagaacattctcccctttgaccacagccgagtgatcctgcagggacgggacagtaacatccccgggtccgactacatcaatgccaactacatcaagaaccagctgctaggccctgatgagaacgctaagacctacatcgccagccagggttgtctggaggccacggtcaatgacttctggcagatggcgtggcaggagaacagccgtgtcatcgtcatgaccacccgagaggtggagaaaggccggaacaaatgcgtcccatactggcccgaggtgggcatgcagcgtgcttatgggccctactctgtgaccaactgcggggagcatgacacaaccgaatacaaactccgtaccttacaggtctccccgctggacaatggagacctgattcgggagatctggcattaccagtacctgagctggcccgaccatggggtccccagtgagcctgggggtgtcctcagcttcctggaccagatcaaccagcggcaggaaagtctgcctcacgcagggcccatcatcgtgcactgcagcgccggcatcggccgcacaggcaccatcattgtcatcgacatgctcatggagaacatctccaccaagggcctggactgtgacattgacatccagaagaccatccagatggtgcgggcgcagcgctcgggcatggtgcagacggaggcgcagtacaagttcatctacgtggccatcgcccagttcattgaaaccactaagaagaagctggaggtcctgcagtcgcagaagggccaggagtcggagtacgggaacatcacctatcccccagccatgaagaatgcccatgccaaggcctcccgcacctcgtccaaacacaaggaggatgtgtatgagaacctgcacactaagaacaagagggaggagaaagtgaagaagcagcggtcagcagacaaggagaagagcaagggttccctcaagaggaagtgagcggtgctgtcctcaggtggccatgcctcagccctgaccctgtggaagcatttcgcgatggacagactcacaacctgaacctaggagtgccccattcttttgtaatttaaatggctgcatcccccccacctctccctgaccctgtatatagcccagccaggccccaggcagggccaacccttctcctcttgtaaataaagccctgggatcactgtg

SEQ ID NO: 24637 - DNA, 1971 bp, Homo sapiens
  source 1..1971: mol_type = unassigned DNA
gctgattactgagcggttcttcctcacctggcttgggccactgtgcacagctgtgccgctggctcagccccgccccctgcggccctctgccgtggcttccccctccctacagagagatgctgtcccgtggggtgggggatcaggtgacccatattcggatccagaactcaggggatttctatgacctgtatggaggggagaagtttgcgactctgacagagctggtggagtactacactcagcagcagggtgtcctgcaggaccgcgacggcaccatcatccacctcaagtacccgctgaactgctccgatcccactagtgagaggtggtaccatggccacatgtctggcgggcaggcagagacgctgctgcaggccaagggcgagccctggacgtttcttgtgcgtgagagcctcagccagcctggagacttcgtgctttctgtgctcagtgaccagcccaaggctggcccaggctccccgctcagggtcacccacatcaaggtcatgtgcgagggtggacgctacacagtgggtggtttggagaccttcgacagcctcacggacctggtggagcatttcaagaagacggggattgaggaggcctcaggcgcctttgtctacctgcggcagccgtactatgccacgagggtgaatgcggctgacattgagaaccgagtgttggaactgaacaagaagcaggagtccgaggatacagccaaggctggcttctgggaggagtttgagagtttgcagaagcaggaggtgaagaacttgcaccagcgtctggaagggcagcggccagagaacaagggcaagaaccgctacaagaacattctcccctttgaccacagccgagtgatcctgcagggacgggacagtaacatccccgggtccgactacatcaatgccaactacatcaagaaccagctgctaggccctgatgagaacgctaagacctacatcgccagccagggttgtctggaggccacggtcaatgacttctggcagatggcgtggcaggagaacagccgtgtcatcgtcatgaccacccgagaggtggagaaaggccggaacaaatgcgtcccatactggcccgaggtgggcatgcagcgtgcttatgggccctactctgtgaccaactgcggggagcatgacacaaccgaatacaaactccgtaccttacaggtctccccgctggacaatggagacctgattcgggagatctggcattaccagtacctgagctggcccgaccatggggtccccagtgagcctgggggtgtcctcagcttcctggaccagatcaaccagcggcaggaaagtctgcctcacgcagggcccatcatcgtgcactgcagcgccggcatcggccgcacaggcaccatcattgtcatcgacatgctcatggagaacatctccaccaagggcctggactgtgacattgacatccagaagaccatccagatggtgcgggcgcagcgctcgggcatggtgcagacggaggcgcagtacaagttcatctacgtggccatcgcccagttcattgaaaccactaagaagaagctggaggtcctgcagtcgcagaagggccaggagtcggagtacgggaacatcacctatcccccagccatgaagaatgcccatgccaaggcctcccgcacctcgtccaaacacaaggaggatgtgtatgagaacctgcacactaagaacaagagggaggagaaagtgaagaagcagcggtcagcagacaaggagaagagcaagggttccctcaagaggaagtgagcggtgctgtcctcaggtggccatgcctcagccctgaccctgtggaagcatttcgcgatggacagactcacaacctgaacctaggagtgccccattcttttgtaatttaaatggctgcatcccccccacctctccctgaccctgtatatagcccagccaggccccaggcagggccaacccttct

SEQ ID NO: 24638 - DNA, 2389 bp, Homo sapiens
  source 1..2389: mol_type = unassigned DNA
gctctaaaacgagaagtacaagtgagttcccccaaggggtcggccgcgcctcttcctgtccccgccctgccggctgccccaggccagtggagtggcagccccagaactgggaccaccgggggtggtgaggcggcccggcactgggagctgcatctgaggcttagtccctgagctctctgcctgcccagactagctgcacctcctcattccctgcgcccccttcctctccggaagcccccaggatggtgaggtggtttcaccgagacctcagtgggctggatgcagagaccctgctcaagggccgaggtgtccacggtagcttcctggctcggcccagtcgcaagaaccagggtgacttctcgctctccgtcagggtgggggatcaggtgacccatattcggatccagaactcaggggatttctatgacctgtatggaggggagaagtttgcgactctgacagagctggtggagtactacactcagcagcagggtgtcctgcaggaccgcgacggcaccatcatccacctcaagtacccgctgaactgctccgatcccactagtgagaggtggtaccatggccacatgtctggcgggcaggcagagacgctgctgcaggccaagggcgagccctggacgtttcttgtgcgtgagagcctcagccagcctggagacttcgtgctttctgtgctcagtgaccagcccaaggctggcccaggctccccgctcagggtcacccacatcaaggtcatgtgcgagggtggacgctacacagtgggtggtttggagaccttcgacagcctcacggacctggtggagcatttcaagaagacggggattgaggaggcctcaggcgcctttgtctacctgcggcagccgtactatgccacgagggtgaatgcggctgacattgagaaccgagtgttggaactgaacaagaagcaggagtccgaggatacagccaaggctggcttctgggaggagtttgagagtttgcagaagcaggaggtgaagaacttgcaccagcgtctggaagggcagcggccagagaacaagggcaagaaccgctacaagaacattctcccctttgaccacagccgagtgatcctgcagggacgggacagtaacatccccgggtccgactacatcaatgccaactacatcaagaaccagctgctaggccctgatgagaacgctaagacctacatcgccagccagggttgtctggaggccacggtcaatgacttctggcagatggcgtggcaggagaacagccgtgtcatcgtcatgaccacccgagaggtggagaaaggccggaacaaatgcgtcccatactggcccgaggtgggcatgcagcgtgcttatgggccctactctgtgaccaactgcggggagcatgacacaaccgaatacaaactccgtaccttacaggtctccccgctggacaatggagacctgattcgggagatctggcattaccagtacctgagctggcccgaccatggggtccccagtgagcctgggggtgtcctcagcttcctggaccagatcaaccagcggcaggaaagtctgcctcacgcagggcccatcatcgtgcactgcagcgccggcatcggccgcacaggcaccatcattgtcatcgacatgctcatggagaacatctccaccaagggcctggactgtgacattgacatccagaagaccatccagatggtgcgggcgcagcgctcgggcatggtgcagacggaggcgcagtacaagttcatctacgtggccatcgcccagttcattgaaaccactaagaagaagctggaggtcctgcagtcgcagaagggccaggagtcggagtacgggaacatcacctatcccccagccatgaagaatgcccatgccaaggcctcccgcacctcgtccaagagcttggagtctagtgcagggaccgtggctgcgtcacctgtgagacggggtggccagaggggactgccagtgccgggtccccctgtgctgtctcctgacctgcaccaactgcctgtacttgcccccctgcacccggctgcagacacaaggaggatgtgtatgagaacctgcacactaagaacaagagggaggagaaagtgaagaagcagcggtcagcagacaaggagaagagcaagggttccctcaagaggaagtgagcggtgctgtcctcaggtggccatgcctcagccctgaccctgtggaagcatttcgcgatggacagactcacaacctgaacctaggagtgccccattcttttgtaatttaaatggctgcatcccccccacctctccctgaccctgtatatagcccagccaggccccaggcagggccaacccttctcctcttgtaaataaagccctgggatcactgtg

SEQ ID NO: 24639 - DNA, 2805 bp, Homo sapiens
  source 1..2805: mol_type = unassigned DNA
gccttctcagccctcaaagacagaccgacagacagacagacagctggcaagaggcagcctgggggccacagctgcttcagcagacctcatggctgagtgagcctcccctgggcccagcaccccacctcagcatggtccaagcccatggggggcgctccagagcacagccgttgaccttgtctttgggggcagccatgacccagcctccgcctgaaaaaacgccagccaagaagcatgtgcgactgcaggagaggcggggctccaatgtggctctgatgctggacgttcggtccctgggggccgtagaacccatctgctctgtgaacacaccccgggaggtcaccctacactttctgcgcactgctggacacccccttacccgctgggcccttcagcgccagccacccagccccaagcaactggaagaagaattcttgaagatcccttcaaactttgtcagccccgaagacctggacatccctggccacgcctccaaggaccgatacaagaccatcttgccaaatccccagagccgtgtctgtctaggccgggcacagagccaggaggacggagattacatcaatgccaactacatccgaggctatgacgggaaggagaaggtctacattgccacccagggccccatgcccaacactgtgtcggacttctgggagatggtgtggcaagaggaagtgtccctcattgtcatgctcactcagctccgagagggcaaggagaaatgtgtccactactggcccacagaagaggaaacctatggacccttccagatccgcatccaggacatgaaagagtgcccagaatacactgtgcggcagctcaccatccagtaccaggaagagcgccggtcagtaaagcacatcctcttttcggcctggccagaccatcagacaccagaatcagctgggcccctgctgcgcctagtggcagaggtggaggagagcccggagacagccgcccaccccgggcctatcgtagtccactgcagtgcagggattggccggacgggctgcttcatcgccacgcgaattggctgtcaacagctgaaagcccgaggagaagtggacattctgggtattgtgtgccaactgcggctagacagaggggggatgatccagacggcagagcagtaccagttcctgcaccacactttggccctgtatgcaggccagctgcctgaggaacccagcccctgacccctgccaccctccggtggcccaggtgcctacctccctcaagcctgggaaggtgggtctggggaaagtgggccgagtgatctgggggtaccccttgggttggtgtggggaaggagtgcctccttagtggtgcttgcagtcacaggaagcagcagcagtaaggacaaggggccggattccaggtcttcaacactggccactcctctgcttcctctgttggccccagatggacagtaaggggaacctccaatgtctctctgaacttaaagacaggagctggcatttatgacagacaaagaaagaagcccaggtgtcctggtgttctctgagacactctttgtgagcttcagtttcctgttctataacatgaacataagtgcttagctgccatgagggaaaagtaatgagagaagtttctagaagccactccagccactccttcctggggctgacaaaagggtgattccaagatcatccttcacccgaggtcctgcccaagcacaggccagatgcaagaatggggaaaagtctggtcctgatctccaagtctcaacatcctatcagtgactctgctccctgaccacacatcggaagggctggatgaccccaatcaaaagaaagaacaaggactctggttacccttgcctccacccatgtgtcataagagtaggctacagaggtgaccaggcctggcagttgaaatctctggaagagggaacatgtggggactactcagaggcaaagaggagctgctcctgcctccatggttgctggccactcccaccaactactcttagggaggctaagcagtctctgttttgcttccatggctcaaataataccctgggtatgcaggacccactataccttgcatttgctgagtacacctagagagcttggctgtttccaaaaacaatcagggtcataaccatccatgcagacatggaggctcggctgaaccaggactcctcactgtctacctgagagaatgagcacccctcatccatctcagcatcaacacaatttccaggggacctcaggtctacctcaggactgaacgccacacctcaggattcctcctccttgaatctgagactggctgcccattctgagatggggatgaaggtaagatgccgcatcaccaggcacgccgcccctgacagctgccttgataccagctctctgtggaaacccccgaggagttggatctggagaacagctgggcctcctcactcaggacttctctcctgaagaacacgcagtgctaaaactgaggatgatttccctaatgcttctgcttggccttatggaggagctgctccttccttacagccttggggatggacttgcccacacctccacctcccctgagccctgtgagaggcacgactgtctatgccaatgaggctcggtggggggctctcaagtgcctgatcctgccctgggctcagagccagcccagagggaagcaactgcacagccccacaggccctccctggcactgtccccccaaccccatctcagagctcagagggtacaagctccagaacagtaaccaagtgggaaaataaagacttcttggatgactgac

SEQ ID NO: 24640 - DNA, 3765 bp, Homo sapiens
  source 1..3765: mol_type = unassigned DNA
aaaaggaggcgtgcagcgagcatgaaccggctgggctgctggcccgcaaggagcctgccaaggtcaggcaggggcagtgggcagaggagtcttggacttgggggccacccttcaggtcccaggcatccaggcaccccagcagcgaagaggacatgggagtcccctggtgtgagggccagagactgtccactgtctgtaagtcttctaagtagatgtcagggttctgggaggaggcctgcagggggctgagggcccaggggaagcccctcggactccctcccacaagtggactctgctatctgcttcctgctgggctggcctacactcaggccgtgggctgtggagagctgggccgtggcacaggcgtggagacgacctttttggcctggccccggccctttccttcacattgtgaggcatggattcttgcttcttctttttccccaccccgagtctgtgccacatctgctctgggaagatgtggtctgtgcttggccatgaattcccaaggcttgaagcagcaagggctttgagggagagggccttgagggagagggccttgagggagagggctgtggggcagaagcagagaaggagaaataagcctccggccaaggtcaggttgagcaggagagccttgggttctttgtgggacagcacagagctgggggtcaggcgagctgtgcccagcaagtaggcagcggctggatgtgacaaagacccagaggagaaacacagaagaggggagagggtctggaagctggggaaagcaggatggtcgggaaggcctggcccctcacccattcccagggaacggggccttgggccccagaagggcacaggcgggaggcagccgacccctggtggcagcggcagcaggcacaggagggcagaatgcagctggggtgtgcgtgggtggcagcaaggaggggcggagggaggaagctggcttcctggagccttctcagccctcaaagacagaccgacagacagacagacagctggcaagaggcagcctgggggccacagctgcttcagcagacctcatggctgagtgagcctcccctgggcccagcaccccacctcagcatggtccaagcccatggggggcgctccagagcacagccgttgaccttgtctttgggggcagccatgacccagcctccgcctgaaaaaacgccagccaagaagcatgtgcgactgcaggagaggcggggctccaatgtggctctgatgctggacgttcggtccctgggggccgtagaacccatctgctctgtgaacacaccccgggaggtcaccctacactttctgcgcactgctggacacccccttacccgctgggcccttcagcgccagccacccagccccaagcaactggaagaagaattcttgaagatcccttcaaactttgtcagccccgaagacctggacatccctggccacgcctccaaggaccgatacaagaccatcttgccaaatccccagagccgtgtctgtctaggccgggcacagagccaggaggacggagattacatcaatgccaactacatccgaggctatgacgggaaggagaaggtctacattgccacccagggccccatgcccaacactgtgtcggacttctgggagatggtgtggcaagaggaagtgtccctcattgtcatgctcactcagctccgagagggcaaggagaaatgtgtccactactggcccacagaagaggaaacctatggacccttccagatccgcatccaggacatgaaagagtgcccagaatacactgtgcggcagctcaccatccagtaccaggaagagcgccggtcagtaaagcacatcctcttttcggcctggccagaccatcagacaccagaatcagctgggcccctgctgcgcctagtggcagaggtggaggagagcccggagacagccgcccaccccgggcctatcgtagtccactgcagtgcagggattggccggacgggctgcttcatcgccacgcgaattggctgtcaacagctgaaagcccgaggagaagtggacattctgggtattgtgtgccaactgcggctagacagaggggggatgatccagacggcagagcagtaccagttcctgcaccacactttggccctgtatgcaggccagctgcctgaggaacccagcccctgacccctgccaccctccggtggcccaggtgcctacctccctcaagcctgggaaggtgggtctggggaaagtgggccgagtgatctgggggtaccccttgggttggtgtggggaaggagtgcctccttagtggtgcttgcagtcacaggaagcagcagcagtaaggacaaggggccggattccaggtcttcaacactggccactcctctgcttcctctgttggccccagatggacagtaaggggaacctccaatgtctctctgaacttaaagacaggagctggcatttatgacagacaaagaaagaagcccaggtgtcctggtgttctctgagacactctttgtgagcttcagtttcctgttctataacatgaacataagtgcttagctgccatgagggaaaagtaatgagagaagtttctagaagccactccagccactccttcctggggctgacaaaagggtgattccaagatcatccttcacccgaggtcctgcccaagcacaggccagatgcaagaatggggaaaagtctggtcctgatctccaagtctcaacatcctatcagtgactctgctccctgaccacacatcggaagggctggatgaccccaatcaaaagaaagaacaaggactctggttacccttgcctccacccatgtgtcataagagtaggctacagaggtgaccaggcctggcagttgaaatctctggaagagggaacatgtggggactactcagaggcaaagaggagctgctcctgcctccatggttgctggccactcccaccaactactcttagggaggctaagcagtctctgttttgcttccatggctcaaataataccctgggtatgcaggacccactataccttgcatttgctgagtacacctagagagcttggctgtttccaaaaacaatcagggtcataaccatccatgcagacatggaggctcggctgaaccaggactcctcactgtctacctgagagaatgagcacccctcatccatctcagcatcaacacaatttccaggggacctcaggtctacctcaggactgaacgccacacctcaggattcctcctccttgaatctgagactggctgcccattctgagatggggatgaaggtaagatgccgcatcaccaggcacgccgcccctgacagctgccttgataccagctctctgtggaaacccccgaggagttggatctggagaacagctgggcctcctcactcaggacttctctcctgaagaacacgcagtgctaaaactgaggatgatttccctaatgcttctgcttggccttatggaggagctgctccttccttacagccttggggatggacttgcccacacctccacctcccctgagccctgtgagaggcacgactgtctatgccaatgaggctcggtggggggctctcaagtgcctgatcctgccctgggctcagagccagcccagagggaagcaactgcacagccccacaggccctccctggcactgtccccccaaccccatctcagagctcagagggtacaagctccagaacagtaaccaagtgggaaaataaagacttcttggatgactgactc

SEQ ID NO: 24641 - DNA, 3265 bp, Homo sapiens
  source 1..3265: mol_type = unassigned DNA
ccagaaacagacctgggagtggaacagcagcagttaggagaggaccctgctggggtccaggagcccgcctgcctggctgcccaaccagctccaacactgctggaggcctccattctctgttcaggggaaggcccactggttagctcagagatggcttctgcgtgctttctcccttccgtcctagagaacacatattttctgtttcctcccttgccttctcccacttggacctgctcagagccctgtgtactctggtgtgtggcctctctcccctctctcttttcctccttctggattctttcctatcttcatccacaatctctaccctttatcttgccgttactctaccccgagactgccttctgccctgggtcccaccaaatagatcctgtccttcccttagtgaaaatgaggccacctcttggggaacagaagacgccccagtgaaaacagagtgcaaacctggcctggcatgggagcctccttctggccaatcaggcaggccagagaacagcagcggagggccctgtctttcaggcagacctcatggctgagtgagcctcccctgggcccagcaccccacctcagcatggtccaagcccatggggggcgctccagagcacagccgttgaccttgtctttgggggcagccatgacccagcctccgcctgaaaaaacgccagccaagaagcatgtgcgactgcaggagaggcggggctccaatgtggctctgatgctggacgttcggtccctgggggccgtagaacccatctgctctgtgaacacaccccgggaggtcaccctacactttctgcgcactgctggacacccccttacccgctgggcccttcagcgccagccacccagccccaagcaactggaagaagaattcttgaagatcccttcaaactttgtcagccccgaagacctggacatccctggccacgcctccaaggaccgatacaagaccatcttgccaaatccccagagccgtgtctgtctaggccgggcacagagccaggaggacggagattacatcaatgccaactacatccgaggctatgacgggaaggagaaggtctacattgccacccagggccccatgcccaacactgtgtcggacttctgggagatggtgtggcaagaggaagtgtccctcattgtcatgctcactcagctccgagagggcaaggagaaatgtgtccactactggcccacagaagaggaaacctatggacccttccagatccgcatccaggacatgaaagagtgcccagaatacactgtgcggcagctcaccatccagtaccaggaagagcgccggtcagtaaagcacatcctcttttcggcctggccagaccatcagacaccagaatcagctgggcccctgctgcgcctagtggcagaggtggaggagagcccggagacagccgcccaccccgggcctatcgtagtccactgcagtgcagggattggccggacgggctgcttcatcgccacgcgaattggctgtcaacagctgaaagcccgaggagaagtggacattctgggtattgtgtgccaactgcggctagacagaggggggatgatccagacggcagagcagtaccagttcctgcaccacactttggccctgtatgcaggccagctgcctgaggaacccagcccctgacccctgccaccctccggtggcccaggtgcctacctccctcaagcctgggaaggtgggtctggggaaagtgggccgagtgatctgggggtaccccttgggttggtgtggggaaggagtgcctccttagtggtgcttgcagtcacaggaagcagcagcagtaaggacaaggggccggattccaggtcttcaacactggccactcctctgcttcctctgttggccccagatggacagtaaggggaacctccaatgtctctctgaacttaaagacaggagctggcatttatgacagacaaagaaagaagcccaggtgtcctggtgttctctgagacactctttgtgagcttcagtttcctgttctataacatgaacataagtgcttagctgccatgagggaaaagtaatgagagaagtttctagaagccactccagccactccttcctggggctgacaaaagggtgattccaagatcatccttcacccgaggtcctgcccaagcacaggccagatgcaagaatggggaaaagtctggtcctgatctccaagtctcaacatcctatcagtgactctgctccctgaccacacatcggaagggctggatgaccccaatcaaaagaaagaacaaggactctggttacccttgcctccacccatgtgtcataagagtaggctacagaggtgaccaggcctggcagttgaaatctctggaagagggaacatgtggggactactcagaggcaaagaggagctgctcctgcctccatggttgctggccactcccaccaactactcttagggaggctaagcagtctctgttttgcttccatggctcaaataataccctgggtatgcaggacccactataccttgcatttgctgagtacacctagagagcttggctgtttccaaaaacaatcagggtcataaccatccatgcagacatggaggctcggctgaaccaggactcctcactgtctacctgagagaatgagcacccctcatccatctcagcatcaacacaatttccaggggacctcaggtctacctcaggactgaacgccacacctcaggattcctcctccttgaatctgagactggctgcccattctgagatggggatgaaggtaagatgccgcatcaccaggcacgccgcccctgacagctgccttgataccagctctctgtggaaacccccgaggagttggatctggagaacagctgggcctcctcactcaggacttctctcctgaagaacacgcagtgctaaaactgaggatgatttccctaatgcttctgcttggccttatggaggagctgctccttccttacagccttggggatggacttgcccacacctccacctcccctgagccctgtgagaggcacgactgtctatgccaatgaggctcggtggggggctctcaagtgcctgatcctgccctgggctcagagccagcccagagggaagcaactgcacagccccacaggccctccctggcactgtccccccaaccccatctcagagctcagagggtacaagctccagaacagtaaccaagtgggaaaataaagacttcttggatgactgactc

SEQ ID NO: 24642 - DNA, 542 bp, Homo sapiens
  source 1..542: mol_type = unassigned DNA
aaagacagaccgacagacagacagacagctggcaagaggcagcctgggggccacagctgcttcacaccccacctcagcatggtccaagcccatggggggcgctccagagcacagccgttgaccttgtctttgggggcagccatgacccagcctccgcctgaaaaaacgccagccaagaagcatgtgcgactgcaggagaggcggggctccaatgtggctctgatgctggacgttcggtccctgggggccgtagaacccatctgctctgtgaacacaccccgggaggtcaccctacactttctgcgcactgctggacacccccttacccgctgggcccttcagcgccagccacccagccccaagcaactggaagaagaattcttgaagatcccttcaaactttgtcagccccgaagacctggacatccctggccacgcctccaaggaccgatacaagaccatcttgccaaatccccagagccgtgtctgtctaggccgggcacagagccaggaggacggagattacatcaatgccaactacat

SEQ ID NO: 24643 - DNA, 1432 bp, Homo sapiens
  source 1..1432: mol_type = unassigned DNA
aaaaggaggcgtgcagcgagcatgaaccggctgggctgctggcccgcaaggagcctgccaaggtcaggcaggggcagtgggcagaggagtcttggacttgggggccacccttcaggtcccaggcatccaggcaccccagcagcgaagaggacatgggagtcccctggtgtgagggccagagactgtccactgtctacctcatggctgagtgagcctcccctgggcccagcaccccacctcagcatggtccaagcccatggggggcgctccagagcacagccgttgaccttgtctttgggggcagccatgacccagcctccgcctgaaaaaacgccagccaagaagcatgtgcgactgcaggagaggcggggctccaatgtggctctgatgctggacgttcggtccctgggggccgtagaacccatctgctctgtgaacacaccccgggaggtcaccctacactttctgcgcactgctggacacccccttacccgctgggcccttcagcgccagccacccagccccaagcaactggaagaagaattcttgaagatcccttcaaactttgtcagccccgaagacctggacatccctggccacgcctccaaggaccgatacaagaccatcttgccaaatccccagagccgtgtctgtctaggccgggcacagagccaggaggacggagattacatcaatgccaactacatccgaggctatgacgggaaggagaaggtctacattgccacccagggccccatgcccaacactgtgtcggacttctgggagatggtgtggcaagaggaagtgtccctcattgtcatgctcactcagctccgagagggcaaggagaaatgtgtccactactggcccacagaagaggaaacctatggacccttccagatccgcatccaggacatgaaagagtgcccagaatacactgtgcggcagctcaccatccagtaccaggaagagcgccggtcagtaaagcacatcctcttttcggcctggccagaccatcagacaccagaatcagctgggcccctgctgcgcctagtggcagaggtggaggagagcccggagacagccgcccaccccgggcctatcgtagtccactgcagtgcagggattggccggacgggctgcttcatcgccacgcgaattggctgtcaacagctgaaagcccgaggagaagtggacattctgggtattgtgtgccaactgcggctagacagaggggggatgatccagacggcagagcagtaccagttcctgcaccacactttggccctgtatgcaggccagctgcctgaggaacccagcccctgacccctgccaccctccggtggcccaggtgcctacctccctcaagcctgggaaggtgggtctggggaaagtgggccgagtgatctgggggtaccccttgggttggtgt

SEQ ID NO: 24644 - DNA, 551 bp, Homo sapiens
  source 1..551: mol_type = unassigned DNA
aaagacagaccgacagacagacagacagctggcaagaggcagcctgggggccacagctgcttcaggccctgtctttcaggcagacctcatggctgagtgagcctcccctgggcccagcaccccacctcagcatggtccaagcccatggggggcgctccagagcacagccgttgaccttgtctttgggggcagccatgacccagcctccgcctgaaaaaacgccagccaagaagcatgtgcgactgcaggagaggcggggctccaatgtggctctgatgctggacgttcggtccctgggggccgtagaacccatctgctctgtgaacacaccccgggaggtcaccctacactttctgcgcactgctggacacccccttacccgctgggcccttcagcgccagccacccagccccaagcaactggaagaagaattcttgaagatcccttcaaactttgtcagccccgaagacctggacatccctggccacgcctccaaggaccgatacaagaccatcttgccaaatccccagagccgtgtctgtctaggccgg

SEQ ID NO: 24645 - DNA, 2689 bp, Homo sapiens
  source 1..2689: mol_type = unassigned DNA
agacagacagacagctggcaagaggcagcctgggggccacagctgcttcagcagacctcatggctgagtgagcctcccctgggcccagcaccccacctcagcatggtccaagcccatggggggcgctccagagcacagccgttgaccttgtctttgggggcagccatgacccagcctccgcctgaaaaaacgccagccaagaagcatgtgcgactgcaggagaggcggggctccaatgtggctctgatgctggacgttcggtccctgggggccgtagaacccatctgctctgtgaacacaccccgggaggtcaccctacactttctgcgcactgctggacacccccttacccgctgggcccttcagcgccagccacccagccccaagcaactggaagaagaattcttgaagatcccttcaaactttgtcagccccgaagacctggacatccctggccacgcctccaaggaccgatacaagaccatcttgccaaatccccagagccgtgtctgtctaggccgggcacagagccaggaggacggagattacatcaatgccaactacatccgaggctatgacgggaaggagaaggtctacattgccacccagggccccatgcccaacactgtgtcggacttctgggagatggtgtggcaagaggaagtgtccctcattgtcatgctcactcagctccgagagggcaaggagaaatgtgtccactactggcccacagaagaggaaacctatggacccttccagatccgcatccaggacatgaaagagtgcccagaatacactgtgcggcagctcaccatccagtaccaggaagagcgccggtcagtaaagcacatcctcttttcggcctggccagaccatcagacaccagaatcagctgggcccctgctgcgcctagtggcagaggtggaggagagcccggagacagccgcccaccccgggcctatcgtagtccactgcagtgcagggattggccggacgggctgcttcatcgccacgcgaattggctgtcaacagctgaaagcccgaggagaagtggacattctgggtattgtgtgccaactgcggctagacagaggggggatgatccagacggcagagcagtaccagttcctgcaccacactttggccctgtatgcaggccagctgcctgaggaacccagcccctgacccctgccaccctccggtggcccaggtgcctacctccctcaagcctgggaagtcacaggaagcagcagcagtaaggacaaggggccggattccaggtcttcaacactggccactcctctgcttcctctgttggccccagatggacagtaaggggaacctccaatgtctctctgaacttaaagacaggagctggcatttatgacagacaaagaaagaagcccaggtgtcctggtgttctctgagacactctttgtgagcttcagtttcctgttctataacatgaacataagtgcttagctgccatgagggaaaagtaatgagagaagtttctagaagccactccagccactccttcctggggctgacaaaagggtgattccaagatcatccttcacccgaggtcctgcccaagcacaggccagatgcaagaatggggaaaagtctggtcctgatctccaagtctcaacatcctatcagtgactctgctccctgaccacacatcggaagggctggatgaccccaatcaaaagaaagaacaaggactctggttacccttgcctccacccatgtgtcataagagtaggctacagaggtgaccaggcctggcagttgaaatctctggaagagggaacatgtggggactactcagaggcaaagaggagctgctcctgcctccatggttgctggccactcccaccaactactcttagggaggctaagcagtctctgttttgcttccatggctcaaataataccctgggtatgcaggacccactataccttgcatttgctgagtacacctagagagcttggctgtttccaaaaacaatcagggtcataaccatccatgcagacatggaggctcggctgaaccaggactcctcactgtctacctgagagaatgagcacccctcatccatctcagcatcaacacaatttccaggggacctcaggtctacctcaggactgaacgccacacctcaggattcctcctccttgaatctgagactggctgcccattctgagatggggatgaaggtaagatgccgcatcaccaggcacgccgcccctgacagctgccttgataccagctctctgtggaaacccccgaggagttggatctggagaacagctgggcctcctcactcaggacttctctcctgaagaacacgcagtgctaaaactgaggatgatttccctaatgcttctgcttggccttatggaggagctgctccttccttacagccttggggatggacttgcccacacctccacctcccctgagccctgtgagaggcacgactgtctatgccaatgaggctcggtggggggctctcaagtgcctgatcctgccctgggctcagagccagcccagagggaagcaactgcacagccccacaggccctccctggcactgtccccccaaccccatctcagagctcagagggtacaagctccagaacagtaaccaagtgggaaaataaagacttcttggatgactgac

SEQ ID NO: 24646 - DNA, 1189 bp, Homo sapiens
  source 1..1189: mol_type = unassigned DNA
agccctcaaagacagaccgacagacagacagacagctggcaagaggcagcctgggggccacagctgcttcagcagacctcatggctgagtgagcctcccctgggcccagcaccccacctcagcatggtccaagcccatggggggcgctccagagcacagccgttgaccttgtctttgggggcagccatgacccagcctccgcctgaaaaaacgccagccaagaagcatgtgcgactgcaggagagaagatcccttcaaactttgtcagccccgaagacctggacatccctggccacgcctccaaggaccgatacaagaccatcttgccaaatccccagagccgtgtctgtctaggccgggcacagagccaggaggacggagattacatcaatgccaactacatccgaggctatgacgggaaggagaaggtctacattgccacccagggccccatgcccaacactgtgtcggacttctgggagatggtgtggcaagaggaagtgtccctcattgtcatgctcactcagctccgagagggcaaggagaaatgtgtccactactggcccacagaagaggaaacctatggacccttccagatccgcatccaggacatgaaagagtgcccagaatacactgtgcggcagctcaccatccagtaccaggaagagcgccggtcagtaaagcacatcctcttttcggcctggccagaccatcagacaccagaatcagctgggcccctgctgcgcctagtggcagaggtggaggagagcccggagacagccgcccaccccgggcctatcgtagtccactgcagtgcagggattggccggacgggctgcttcatcgccacgcgaattggctgtcaacagctgaaagcccgaggagaagtggacattctgggtattgtgtgccaactgcggctagacagaggggggatgatccagacggcagagcagtaccagttcctgcaccacactttggccctgtatgcaggccagctgcctgaggaacccagcccctgacccctgccaccctccggtggcccaggtgcctacctccctcaagcctgggaaggtgggtctggggaaagtgggccgagtgatctgggggtaccccttgggttggtgtggggaaggagtgcctccttagtggtgcttgcagtcacaggaagcagcagcagtaaggacaa

SEQ ID NO: 24647 - DNA, 1147 bp, Homo sapiens
  source 1..1147: mol_type = unassigned DNA
aaagacagaccgacagacagacagacagctggcaagaggcagcctgggggccacagctgcttcagcagacctcatggctgagtgagcctcccctgggcccagcaccccacctcagcatggtccaagcccatggggggcgctccagagcacagccgttgaccttgtctttgggggcagccatgacccagcctccgcctgaaaaaacgccagccaagaagcatgtgcgactgcaggagaggcggggctccaatgtggctctgatgctggacgttcggtccctgggggccgtagaacccatctgctctgtgaacacaccccgggaggtcaccctacactttctgcgcactgctggacacccccttacccgctgggcccttcagcgccagccacccagccccaagcaactggaagaagaattcttgaagaggaaacctatggacccttccagatccgcatccaggacatgaaagagtgcccagaatacactgtgcggcagctcaccatccagtaccaggaagagcgccggtcagtaaagcacatcctcttttcggcctggccagaccatcagacaccagaatcagctgggcccctgctgcgcctagtggcagaggtggaggagagcccggagacagccgcccaccccgggcctatcgtagtccactgcagtgcagggattggccggacgggctgcttcatcgccacgcgaattggctgtcaacagctgaaagcccgaggagaagtggacattctgggtattgtgtgccaactgcggctagacagaggggggatgatccagacggcagagcagtaccagttcctgcaccacactttggccctgtatgcaggccagctgcctgaggaacccagcccctgacccctgccaccctccggtggcccaggaagcagcagcagtaaggacaaggggccggattccaggtcttcaacactggccactcctctgcttcctctgttggccccagatggacagtaaggggaacctccaatgtctctctgaacttaaagacaggagctggcatttatgacagacaaagaaagaagcccaggtgtcctggtgttctctgagacactctttgtgagcttcagtttcctgttctataacatgaacataagtgcttagctgccatga

SEQ ID NO: 24648 - DNA, 3323 bp, Homo sapiens
  source 1..3323: mol_type = unassigned DNA
agcgaggctgcggcgagtgcggcgctgacagagacgcgcgcgcgcgcgatcgcgctcggaccccggccgctgccgccatcactgtcgcccgcccagtcgcccctcagccgcttcccctcgccatggaggcgaggccgccgccgccgccgcggggctcggagccgcgggccgggcggcggccctgagggctagtggcggcccgaaacgccgccgcggagccgaggcggagccgctgtcctcgtccccagcggtcccgcccaacgcccgactctgtgacacaactaaaaaaaaacaaaggtatttatggaattccactgagtggtaatggatgatgcagttcaaataactaaggacacatgttcaaagagcataattaactttttaaaagaagctaataagcatggattcctggttcattcttgttctgctcggcagtggtctgatatgtgtcagtgccaacaatgctaccacagttgcaccttctgtaggaattacaagattaattaactcatcaacggcagaaccagttaaagaagaggccaaaacttcaaatccaacttcttcactaacttctctttctgtggcaccaacattcagcccaaatataactctgggacccacctatttaaccactgtcaattcttcagactctgacaatgggaccacaagaacagcaagcaccaattctataggcattacaatttcaccaaatggaacgtggcttccagataaccagttcacggatgccagaacagaaccctgggaggggaattccagcaccgcagcaaccactccagaaactttccctccttcagatgagacaccaattattgcggtgatggtggccctgtcctctctgctagtgatcgtgtttattatcatagttttgtacatgttaaggtttaagaaatacaagcaagctgggagccattccaattctttccgcttatccaacggccgcactgaggatgtggagccccagagtgtgccacttctggccagatccccaagcaccaacaggaaatacccacccctgcccgtggacaagctggaagaggaaattaaccggagaatggcagacgacaataagctcttcagggaggaattcaacgctctccctgcatgtcctatccaggccacctgtgaggctgcttccaaggaggaaaacaaggaaaaaaatcgatatgtaaacatcttgccttatgaccactctagagtccacctgacaccggttgaaggggttccagattctgattacatcaatgcttcattcatcaacggctaccaagaaaagaacaaattcattgctgcacaaggaccaaaagaagaaacggtgaatgatttctggcggatgatctgggaacaaaacacagccaccatcgtcatggttaccaacctgaaggagagaaaggagtgcaagtgcgcccagtactggccagaccaaggctgctggacctatgggaatattcgggtgtctgtagaggatgtgactgtcctggtggactacacagtacggaagttctgcatccagcaggtgggcgacatgaccaacagaaagccacagcgcctcatcactcagttccactttaccagctggccagactttggggtgccttttaccccgatcggcatgctcaagttcctcaagaaggtgaaggcctgtaaccctcagtatgcaggggccatcgtggtccactgcagtgcaggtgtagggcgtacaggtacctttgtcgtcattgatgccatgctggacatgatgcatacagaacggaaggtggacgtgtatggctttgtgagccggatccgggcacagcgctgccagatggtgcaaaccgatatgcagtatgtcttcatataccaagcccttctggagcattatctctatggagatacagaactggaagtgacctctctagaaacccacctgcagaaaatttacaacaaaatcccagggaccagcaacaatggattagaggaggagtttaagaagttaacatcaatcaaaatccagaatgacaagatgcggactggaaaccttccagccaacatgaagaagaaccgtgttttacagatcattccatatgaattcaacagagtgatcattccagttaagcggggcgaagagaatacagactatgtgaacgcatcctttattgatggctaccggcagaaggactcctatatcgccagccagggccctcttctccacacaattgaggacttctggcgaatgatctgggagtggaaatcctgctctatcgtgatgctaacagaactggaggagagaggccaggagaagtgtgcccagtactggccatctgatggactggtgtcctatggagatattacagtggaactgaagaaggaggaggaatgtgagagctacaccgtccgagacctcctggtcaccaacaccagggagaataagagccggcagatccggcagttccacttccatggctggcctgaagtgggcatccccagtgacggaaagggcatgatcagcatcatcgccgccgtgcagaagcagcagcagcagtcagggaaccaccccatcaccgtgcactgcagcgccggggcaggaaggacggggaccttctgtgccctgagcaccgtcctggagcgtgtgaaagcagaggggattttggatgtcttccagactgtcaagagcctgcggctacagaggccacacatggtccagacactggaacagtatgagttctgctacaaggtggtgcaggagtatattgatgcattctcagattatgccaacttcaagtaagcggcaacaagggtccgtggaccaggaggattgcctttaatattttgtaatattctgttttgttaatataccccaaattgtgtatatatcttataactgttttagaaattggtacataggcttctattacctattaggtggaaattttatatgtaaatgtgttagcactgatagtcctttttccaatgttttattggggaattaaatagtgtgatgtttggattgatatcgtgaaatcctcagccgagaaattgggctggattgtgctttggttaatacatctttccctaaagaagataaacacaaaatccattccaggtagctcggcaccaactaagaaaaaaagcacaaagttctcagagctctcgaggaaagtggttgtccccgtaccaccatgcactgtaaatatccctcccctctctccctggtcccctcccccatccccaccactgatatcatggggagtaataggaccagagcggtatctctggcaccacactagggactatcaggtaataaaagctttgactccctgaggaaa

SEQ ID NO: 24649 - DNA, 3219 bp, Homo sapiens
  source 1..3219: mol_type = unassigned DNA
gcggcccgaaacgccgccgcggagccgaggcggagccgctgtcctcgtccccagcggtcccgcccaacgcccgactctgtgacacaactaaaaaaaaacaaaggtatttatggaattccactgagtggtaatggatgatgcagttcaaataactaaggacacatgttcaaagagcataattaactttttaaaagaagctagacttcttcagaagcttgccagtttttcaagctgatttctctcactggcaactcttcagagtgctgttcctactccaccctcccctggtgataagcatggattcctggttcattcttgttctgctcggcagtggtctgatatgtgtcagtgccaacaatgctaccacagttgcaccttctgtaggaattacaagattaattaactcatcaacggcagaaccagttaaagaagaggccaaaacttcaaatccaacttcttcactaacttctctttctgtggcaccaacattcagcccaaatataactctgggacccacctatttaaccactgtcaattcttcagactctgacaatgggaccacaagaacagcaagcaccaattctataggcattacaatttcaccaaatggaacgtggcttccagataaccagttcacggatgccagaacagaaccctgggaggggaattccagcaccgcagcaaccactccagaaactttccctccttcagatgagacaccaattattgcggtgatggtggccctgtcctctctgctagtgatcgtgtttattatcatagttttgtacatgttaaggtttaagaaatacaagcaagctgggagccattccaattctttccgcttatccaacggccgcactgaggatgtggagccccagagtgtgccacttctggccagatccccaagcaccaacaggaaatacccacccctgcccgtggacaagctggaagaggaaattaaccggagaatggcagacgacaataagctcttcagggaggaattcaacgctctccctgcatgtcctatccaggccacctgtgaggctgcttccaaggaggaaaacaaggaaaaaaatcgatatgtaaacatcttgccttatgaccactctagagtccacctgacaccggttgaaggggttccagattctgattacatcaatgcttcattcatcaacggctaccaagaaaagaacaaattcattgctgcacaaggaccaaaagaagaaacggtgaatgatttctggcggatgatctgggaacaaaacacagccaccatcgtcatggttaccaacctgaaggagagaaaggagtgcaagtgcgcccagtactggccagaccaaggctgctggacctatgggaatattcgggtgtctgtagaggatgtgactgtcctggtggactacacagtacggaagttctgcatccagcaggtgggcgacatgaccaacagaaagccacagcgcctcatcactcagttccactttaccagctggccagactttggggtgccttttaccccgatcggcatgctcaagttcctcaagaaggtgaaggcctgtaaccctcagtatgcaggggccatcgtggtccactgcagtgcaggtgtagggcgtacaggtacctttgtcgtcattgatgccatgctggacatgatgcatacagaacggaaggtggacgtgtatggctttgtgagccggatccgggcacagcgctgccagatggtgcaaaccgatatgcagtatgtcttcatataccaagcccttctggagcattatctctatggagatacagaactggaagtgacctctctagaaacccacctgcagaaaatttacaacaaaatcccagggaccagcaacaatggattagaggaggagtttaagaagttaacatcaatcaaaatccagaatgacaagatgcggactggaaaccttccagccaacatgaagaagaaccgtgttttacagatcattccatatgaattcaacagagtgatcattccagttaagcggggcgaagagaatacagactatgtgaacgcatcctttattgatggctaccggcagaaggactcctatatcgccagccagggccctcttctccacacaattgaggacttctggcgaatgatctgggagtggaaatcctgctctatcgtgatgctaacagaactggaggagagaggccaggagaagtgtgcccagtactggccatctgatggactggtgtcctatggagatattacagtggaactgaagaaggaggaggaatgtgagagctacaccgtccgagacctcctggtcaccaacaccagggagaataagagccggcagatccggcagttccacttccatggctggcctgaagtgggcatccccagtgacggaaagggcatgatcagcatcatcgccgccgtgcagaagcagcagcagcagtcagggaaccaccccatcaccgtgcactgcagcgccggggcaggaaggacggggaccttctgtgccctgagcaccgtcctggagcgtgtgaaagcagaggggattttggatgtcttccagactgtcaagagcctgcggctacagaggccacacatggtccagacactggaacagtatgagttctgctacaaggtggtgcaggagtatattgatgcattctcagattatgccaacttcaagtaagcggcaacaagggtccgtggaccaggaggattgcctttaatattttgtaatattctgttttgttaatataccccaaattgtgtatatatcttataactgttttagaaattggtacataggcttctattacctattaggtggaaattttatatgtaaatgtgttagcactgatagtcctttttccaatgttttattggggaattaaatagtgtgatgtttggattgatatcgtgaaatcctcagccgagaaattgggctggattgtgctttggttaatacatctttccctaaagaagataaacacaaaatccattccaggtagctcggcaccaactaagaaaaaaagcacaaagttctcagagctctcgaggaaagtggttgtccccgtaccaccatgcactgtaaatatccctcccctctctccctggtcccctcccccatccccaccactgatatcatggggagtaataggaccagagcggtatctctggcaccacactagggactatcaggtaataaaagctttgactccctgaggaaa

SEQ ID NO: 24650 - DNA, 3135 bp, Homo sapiens
  source 1..3135: mol_type = unassigned DNA
gtgacacaactaaaaaaaaacaaaggtatttatggaattccactgagtggtaatggatgatgcagttcaaataactaaggacacatgttcaaagagcataattaactttttaaaagaagctagacttcttcagaagcttgccagtttttcaagctgatttctctcactggcaactcttcagagtgctgttcctactccaccctcccctggtgataagcatggattcctggttcattcttgttctgctcggcagtggtctgatatgtgtcagtgccaacaatgctaccacagttgcaccttctgtaggaattacaagattaattaactcatcaacggcagaaccagttaaagaagaggccaaaacttcaaatccaacttcttcactaacttctctttctgtggcaccaacattcagcccaaatataactctgggacccacctatttaaccactgtcaattcttcagactctgacaatgggaccacaagaacagcaagcaccaattctataggcattacaatttcaccaaatggaacgtggcttccagataaccagttcacggatgccagaacagaaccctgggaggggaattccagcaccgcagcaaccactccagaaactttccctccttcagatgagacaccaattattgcggtgatggtggccctgtcctctctgctagtgatcgtgtttattatcatagttttgtacatgttaaggtttaagaaatacaagcaagctgggagccattccaattctttccgcttatccaacggccgcactgaggatgtggagccccagagtgtgccacttctggccagatccccaagcaccaacaggaaatacccacccctgcccgtggacaagctggaagaggaaattaaccggagaatggcagacgacaataagctcttcagggaggaattcaacgctctccctgcatgtcctatccaggccacctgtgaggctgcttccaaggaggaaaacaaggaaaaaaatcgatatgtaaacatcttgccttatgaccactctagagtccacctgacaccggttgaaggggttccagattctgattacatcaatgcttcattcatcaacggctaccaagaaaagaacaaattcattgctgcacaaggaccaaaagaagaaacggtgaatgatttctggcggatgatctgggaacaaaacacagccaccatcgtcatggttaccaacctgaaggagagaaaggagtgcaagtgcgcccagtactggccagaccaaggctgctggacctatgggaatattcgggtgtctgtagaggatgtgactgtcctggtggactacacagtacggaagttctgcatccagcaggtgggcgacatgaccaacagaaagccacagcgcctcatcactcagttccactttaccagctggccagactttggggtgccttttaccccgatcggcatgctcaagttcctcaagaaggtgaaggcctgtaaccctcagtatgcaggggccatcgtggtccactgcagtgcaggtgtagggcgtacaggtacctttgtcgtcattgatgccatgctggacatgatgcatacagaacggaaggtggacgtgtatggctttgtgagccggatccgggcacagcgctgccagatggtgcaaaccgatatgcagtatgtcttcatataccaagcccttctggagcattatctctatggagatacagaactggaagtgacctctctagaaacccacctgcagaaaatttacaacaaaatcccagggaccagcaacaatggattagaggaggagtttaagaagttaacatcaatcaaaatccagaatgacaagatgcggactggaaaccttccagccaacatgaagaagaaccgtgttttacagatcattccatatgaattcaacagagtgatcattccagttaagcggggcgaagagaatacagactatgtgaacgcatcctttattgatggctaccggcagaaggactcctatatcgccagccagggccctcttctccacacaattgaggacttctggcgaatgatctgggagtggaaatcctgctctatcgtgatgctaacagaactggaggagagaggccaggagaagtgtgcccagtactggccatctgatggactggtgtcctatggagatattacagtggaactgaagaaggaggaggaatgtgagagctacaccgtccgagacctcctggtcaccaacaccagggagaataagagccggcagatccggcagttccacttccatggctggcctgaagtgggcatccccagtgacggaaagggcatgatcagcatcatcgccgccgtgcagaagcagcagcagcagtcagggaaccaccccatcaccgtgcactgcagcgccggggcaggaaggacggggaccttctgtgccctgagcaccgtcctggagcgtgtgaaagcagaggggattttggatgtcttccagactgtcaagagcctgcggctacagaggccacacatggtccagacactggaacagtatgagttctgctacaaggtggtgcaggagtatattgatgcattctcagattatgccaacttcaagtaagcggcaacaagggtccgtggaccaggaggattgcctttaatattttgtaatattctgttttgttaatataccccaaattgtgtatatatcttataactgttttagaaattggtacataggcttctattacctattaggtggaaattttatatgtaaatgtgttagcactgatagtcctttttccaatgttttattggggaattaaatagtgtgatgtttggattgatatcgtgaaatcctcagccgagaaattgggctggattgtgctttggttaatacatctttccctaaagaagataaacacaaaatccattccaggtagctcggcaccaactaagaaaaaaagcacaaagttctcagagctctcgaggaaagtggttgtccccgtaccaccatgcactgtaaatatccctcccctctctccctggtcccctcccccatccccaccactgatatcatggggagtaataggaccagagcggtatctctggcaccacactagggactatcaggtaataaaagctttgactccctg

SEQ ID NO: 24651 - DNA, 3343 bp, Homo sapiens
  source 1..3343: mol_type = unassigned DNA
ctgcggcgagtgcggcgctgacagagacgcgcgcgcgcgcgatcgcgctcggaccccggccgctgccgccatcactgtcgcccgcccagtcgcccctcagccgcttcccctcgccatggaggcgaggccgccgccgccgccgcggggctcggagccgcgggccgggcggcggccctgagggctagtggcggcccgaaacgccgccgcggagccgaggcggagccgctgtcctcgtccccagcggtcccgcccaacgcccgactctgtgacacaactaaaaaaaaacaaaggtatttatggaattccactgagtggtaatggatgatgcagttcaaataactaaggacacatgttcaaagagcataattaactttttaaaagaagctaataagcatggattcctggttcattcttgttctgctcggcagtggtctgatatgtgtcagtgccaacaatgctaccacagttgcaccttctgtaggaattacaagattaattaactcatcaacggcagaaccagttaaagaagaggccaaaacttcaaatccaacttcttcactaacttctctttctgtggcaccaacattcagcccaaatataactctgggacccacctatttaaccactgtcaattcttcagactctgacaatgggaccacaagaacagcaagcaccaattctataggcattacaatttcaccaaatggaacgtggcttccagataaccagttcacggatgccagaacagaaccctgggaggggaattccagcaccgcagcaaccactccagaaactttccctccttcagatgagacaccaattattgcggtgatggtggccctgtcctctctgctagtgatcgtgtttattatcatagttttgtacatgttaaggcgatttagaaaggctgaattgatgagcaggaatacagagaaatacaagcaagctgggagccattccaattctttccgcttatccaacggccgcactgaggatgtggagccccagagtgtgccacttctggccagatccccaagcaccaacaggaaatacccacccctgcccgtggacaagctggaagaggaaattaaccggagaatggcagacgacaataagctcttcagggaggaattcaacgctctccctgcatgtcctatccaggccacctgtgaggctgcttccaaggaggaaaacaaggaaaaaaatcgatatgtaaacatcttgccttatgaccactctagagtccacctgacaccggttgaaggggttccagattctgattacatcaatgcttcattcatcaacggctaccaagaaaagaacaaattcattgctgcacaaggaccaaaagaagaaacggtgaatgatttctggcggatgatctgggaacaaaacacagccaccatcgtcatggttaccaacctgaaggagagaaaggagtgcaagtgcgcccagtactggccagaccaaggctgctggacctatgggaatattcgggtgtctgtagaggatgtgactgtcctggtggactacacagtacggaagttctgcatccagcaggtgggcgacatgaccaacagaaagccacagcgcctcatcactcagttccactttaccagctggccagactttggggtgccttttaccccgatcggcatgctcaagttcctcaagaaggtgaaggcctgtaaccctcagtatgcaggggccatcgtggtccactgcagtgcaggtgtagggcgtacaggtacctttgtcgtcattgatgccatgctggacatgatgcatacagaacggaaggtggacgtgtatggctttgtgagccggatccgggcacagcgctgccagatggtgcaaaccgatatgcagtatgtcttcatataccaagcccttctggagcattatctctatggagatacagaactggaagtgacctctctagaaacccacctgcagaaaatttacaacaaaatcccagggaccagcaacaatggattagaggaggagtttaagaagttaacatcaatcaaaatccagaatgacaagatgcggactggaaaccttccagccaacatgaagaagaaccgtgttttacagatcattccatatgaattcaacagagtgatcattccagttaagcggggcgaagagaatacagactatgtgaacgcatcctttattgatggctaccggcagaaggactcctatatcgccagccagggccctcttctccacacaattgaggacttctggcgaatgatctgggagtggaaatcctgctctatcgtgatgctaacagaactggaggagagaggccaggagaagtgtgcccagtactggccatctgatggactggtgtcctatggagatattacagtggaactgaagaaggaggaggaatgtgagagctacaccgtccgagacctcctggtcaccaacaccagggagaataagagccggcagatccggcagttccacttccatggctggcctgaagtgggcatccccagtgacggaaagggcatgatcagcatcatcgccgccgtgcagaagcagcagcagcagtcagggaaccaccccatcaccgtgcactgcagcgccggggcaggaaggacggggaccttctgtgccctgagcaccgtcctggagcgtgtgaaagcagaggggattttggatgtcttccagactgtcaagagcctgcggctacagaggccacacatggtccagacactggaacagtatgagttctgctacaaggtggtgcaggagtatattgatgcattctcagattatgccaacttcaagtaagcggcaacaagggtccgtggaccaggaggattgcctttaatattttgtaatattctgttttgttaatataccccaaattgtgtatatatcttataactgttttagaaattggtacataggcttctattacctattaggtggaaattttatatgtaaatgtgttagcactgatagtcctttttccaatgttttattggggaattaaatagtgtgatgtttggattgatatcgtgaaatcctcagccgagaaattgggctggattgtgctttggttaatacatctttccctaaagaagataaacacaaaatccattccaggtagctcggcaccaactaagaaaaaaagcacaaagttctcagagctctcgaggaaagtggttgtccccgtaccaccatgcactgtaaatatccctcccctctctccctggtcccctcccccatccccaccactgatatcatggggagtaataggaccagagcggtatctctggcaccacactagggactatcaggtaataaaagctttgactccctg

SEQ ID NO: 24652 - DNA, 3636 bp, Homo sapiens
  source 1..3636: mol_type = unassigned DNA
ggagtatgagccacgctcaggggagcaggtaccccttctcctaaagatgaagaggagcaaactggcactaagcaaggccatcgagagcggggacactgacctggtgttcacggtgttgctgcacctgaagaacgagctgaaccgaggagattttttcatgacccttcggaatcagcccatggccctcagtttgtaccgacagttctgtaagcatcaggagctagagacgctgaaggacctttacaatcaggatgacaatcaccaggaattgggcagcttccacatccgagccagctatgctgcagaagagcgtattgaggggcgagtagcagctctgcagacagccgccgatgccttctacaaggccaagaatgagtttgcagccaaggctacagaggatcaaatgcggctcctacggctgcagcggcgcctagaagacgagctggggggccagttcctagacctgtctctacatgacacagttaccaccctcattcttggcggtcacaacaagcgtgcagagcagctggcacgtgacttccgcatccctgacaagaggtgacacaactaaaaaaaaacaaaggtatttatggaattccactgagtggtaatggatgatgcagttcaaataactaaggacacatgttcaaagagcataattaactttttaaaagaagctaataagcatggattcctggttcattcttgttctgctcggcagtggtctgatatgtgtcagtgccaacaatgctaccacagttgcaccttctgtaggaattacaagattaattaactcatcaacggcagaaccagttaaagaagaggccaaaacttcaaatccaacttcttcactaacttctctttctgtggcaccaacattcagcccaaatataactctgggacccacctatttaaccactgtcaattcttcagactctgacaatgggaccacaagaacagcaagcaccaattctataggcattacaatttcaccaaatggaacgtggcttccagataaccagttcacggatgccagaacagaaccctgggaggggaattccagcaccgcagcaaccactccagaaactttccctccttcaggtaattctgactcgaaggacagaagagatgagacaccaattattgcggtgatggtggccctgtcctctctgctagtgatcgtgtttattatcatagttttgtacatgttaaggtttaagaaatacaagcaagctgggagccattccaattctttccgcttatccaacggccgcactgaggatgtggagccccagagtgtgccacttctggccagatccccaagcaccaacaggaaatacccacccctgcccgtggacaagctggaagaggaaattaaccggagaatggcagacgacaataagctcttcagggaggaattcaacgctctccctgcatgtcctatccaggccacctgtgaggctgcttccaaggaggaaaacaaggaaaaaaatcgatatgtaaacatcttgccttatgaccactctagagtccacctgacaccggttgaaggggttccagattctgattacatcaatgcttcattcatcaacggctaccaagaaaagaacaaattcattgctgcacaaggaccaaaagaagaaacggtgaatgatttctggcggatgatctgggaacaaaacacagccaccatcgtcatggttaccaacctgaaggagagaaaggagtgcaagtgcgcccagtactggccagaccaaggctgctggacctatgggaatattcgggtgtctgtagaggatgtgactgtcctggtggactacacagtacggaagttctgcatccagcaggtgggcgacatgaccaacagaaagccacagcgcctcatcactcagttccactttaccagctggccagactttggggtgccttttaccccgatcggcatgctcaagttcctcaagaaggtgaaggcctgtaaccctcagtatgcaggggccatcgtggtccactgcagtgcaggtgtagggcgtacaggtacctttgtcgtcattgatgccatgctggacatgatgcatacagaacggaaggtggacgtgtatggctttgtgagccggatccgggcacagcgctgccagatggtgcaaaccgatatgcagtatgtcttcatataccaagcccttctggagcattatctctatggagatacagaactggaagtgacctctctagaaacccacctgcagaaaatttacaacaaaatcccagggaccagcaacaatggattagaggaggagtttaagaagttaacatcaatcaaaatccagaatgacaagatgcggactggaaaccttccagccaacatgaagaagaaccgtgttttacagatcattccatatgaattcaacagagtgatcattccagttaagcggggcgaagagaatacagactatgtgaacgcatcctttattgatggctaccggcagaaggactcctatatcgccagccagggccctcttctccacacaattgaggacttctggcgaatgatctgggagtggaaatcctgctctatcgtgatgctaacagaactggaggagagaggccaggagaagtgtgcccagtactggccatctgatggactggtgtcctatggagatattacagtggaactgaagaaggaggaggaatgtgagagctacaccgtccgagacctcctggtcaccaacaccagggagaataagagccggcagatccggcagttccacttccatggctggcctgaagtgggcatccccagtgacggaaagggcatgatcagcatcatcgccgccgtgcagaagcagcagcagcagtcagggaaccaccccatcaccgtgcactgcagcgccggggcaggaaggacggggaccttctgtgccctgagcaccgtcctggagcgtgtgaaagcagaggggattttggatgtcttccagactgtcaagagcctgcggctacagaggccacacatggtccagacactggaacagtatgagttctgctacaaggtggtgcaggagtatattgatgcattctcagattatgccaacttcaagtaagcggcaacaagggtccgtggaccaggaggattgcctttaatattttgtaatattctgttttgttaatataccccaaattgtgtatatatcttataactgttttagaaattggtacataggcttctattacctattaggtggaaattttatatgtaaatgtgttagcactgatagtcctttttccaatgttttattggggaattaaatagtgtgatgtttggattgatatcgtgaaatcctcagccgagaaattgggctggattgtgctttggttaatacatctttccctaaagaagataaacacaaaatccattccaggtagctcggcaccaactaagaaaaaaagcacaaagttctcagagctctcgaggaaagtggttgtccccgtaccaccatgcactgtaaatatccctcccctctctccctggtcccctcccccatccccaccactgatatcatggggagtaataggaccagagcggtatctctggcaccacactagggactatcaggtaataaaagctttgactccctgaggaaa

SEQ ID NO: 24653 - DNA, 3337 bp, Homo sapiens
  source 1..3337: mol_type = unassigned DNA
ctgcggcgagtgcggcgctgacagagacgcgcgcgcgcgcgatcgcgctcggaccccggccgctgccgccatcactgtcgcccgcccagtcgcccctcagccgcttcccctcgccatggaggcgaggccgccgccgccgccgcggggctcggagccgcgggccgggcggcggccctgagggctagtggcggcccgaaacgccgccgcggagccgaggcggagccgctgtcctcgtccccagcggtcccgcccaacgcccgactctgtgacacaactaaaaaaaaacaaaggtatttatggaattccactgagtggtaatggatgatgcagttcaaataactaaggacacatgttcaaagagcataattaactttttaaaagaagctaataagcatggattcctggttcattcttgttctgctcggcagtggtctgatatgtgtcagtgccaacaatgctaccacagttgcaccttctgtaggaattacaagattaattaactcatcaacggcagaaccagttaaagaagaggccaaaacttcaaatccaacttcttcactaacttctctttctgtggcaccaacattcagcccaaatataactctgggacccacctatttaaccactgtcaattcttcagactctgacaatgggaccacaagaacagcaagcaccaattctataggcattacaatttcaccaaatggaacgtggcttccagataaccagttcacggatgccagaacagaaccctgggaggggaattccagcaccgcagcaaccactccagaaactttccctccttcaggtaattctgactcgaaggacagaagagatgagacaccaattattgcggtgatggtggccctgtcctctctgctagtgatcgtgtttattatcatagttttgtacatgttaaggtttaagaaatacaagcaagctgggagccattccaattctttccgcttatccaacggccgcactgaggatgtggagccccagagtgtgccacttctggccagatccccaagcaccaacaggaaatacccacccctgcccgtggacaagctggaagaggaaattaaccggagaatggcagacgacaataagctcttcagggaggaattcaacgctctccctgcatgtcctatccaggccacctgtgaggctgcttccaaggaggaaaacaaggaaaaaaatcgatatgtaaacatcttgccttatgaccactctagagtccacctgacaccggttgaaggggttccagattctgattacatcaatgcttcattcatcaacggctaccaagaaaagaacaaattcattgctgcacaaggaccaaaagaagaaacggtgaatgatttctggcggatgatctgggaacaaaacacagccaccatcgtcatggttaccaacctgaaggagagaaaggagtgcaagtgcgcccagtactggccagaccaaggctgctggacctatgggaatattcgggtgtctgtagaggatgtgactgtcctggtggactacacagtacggaagttctgcatccagcaggtgggcgacatgaccaacagaaagccacagcgcctcatcactcagttccactttaccagctggccagactttggggtgccttttaccccgatcggcatgctcaagttcctcaagaaggtgaaggcctgtaaccctcagtatgcaggggccatcgtggtccactgcagtgcaggtgtagggcgtacaggtacctttgtcgtcattgatgccatgctggacatgatgcatacagaacggaaggtggacgtgtatggctttgtgagccggatccgggcacagcgctgccagatggtgcaaaccgatatgcagtatgtcttcatataccaagcccttctggagcattatctctatggagatacagaactggaagtgacctctctagaaacccacctgcagaaaatttacaacaaaatcccagggaccagcaacaatggattagaggaggagtttaagaagttaacatcaatcaaaatccagaatgacaagatgcggactggaaaccttccagccaacatgaagaagaaccgtgttttacagatcattccatatgaattcaacagagtgatcattccagttaagcggggcgaagagaatacagactatgtgaacgcatcctttattgatggctaccggcagaaggactcctatatcgccagccagggccctcttctccacacaattgaggacttctggcgaatgatctgggagtggaaatcctgctctatcgtgatgctaacagaactggaggagagaggccaggagaagtgtgcccagtactggccatctgatggactggtgtcctatggagatattacagtggaactgaagaaggaggaggaatgtgagagctacaccgtccgagacctcctggtcaccaacaccagggagaataagagccggcagatccggcagttccacttccatggctggcctgaagtgggcatccccagtgacggaaagggcatgatcagcatcatcgccgccgtgcagaagcagcagcagcagtcagggaaccaccccatcaccgtgcactgcagcgccggggcaggaaggacggggaccttctgtgccctgagcaccgtcctggagcgtgtgaaagcagaggggattttggatgtcttccagactgtcaagagcctgcggctacagaggccacacatggtccagacactggaacagtatgagttctgctacaaggtggtgcaggagtatattgatgcattctcagattatgccaacttcaagtaagcggcaacaagggtccgtggaccaggaggattgcctttaatattttgtaatattctgttttgttaatataccccaaattgtgtatatatcttataactgttttagaaattggtacataggcttctattacctattaggtggaaattttatatgtaaatgtgttagcactgatagtcctttttccaatgttttattggggaattaaatagtgtgatgtttggattgatatcgtgaaatcctcagccgagaaattgggctggattgtgctttggttaatacatctttccctaaagaagataaacacaaaatccattccaggtagctcggcaccaactaagaaaaaaagcacaaagttctcagagctctcgaggaaagtggttgtccccgtaccaccatgcactgtaaatatccctcccctctctccctggtcccctcccccatccccaccactgatatcatggggagtaataggaccagagcggtatctctggcaccacactagggactatcaggtaataaaagctttgactccctg

SEQ ID NO: 24654 - DNA, 749 bp, Homo sapiens
  source 1..749: mol_type = unassigned DNA
gacgcgcgcgcgcgcgatcgcgctcggaccccggccgctgccgccatcactgtcgcccgcccagtgacacaactaaaaaaaaacaaaggtatttatggaattccactgagtggtaatggatgatgcagttcaaataactaagataagcatggattcctggttcattcttgttctgctcggcagtggtctgatatgtgtcagtgccaacaatgctaccacagttgcaccttctgtaggaattacaagattaattaactcatcaacggcagaaccagttaaagaagaggccaaaacttcaaatccaacttcttcactaacttctctttctgtggcaccaacattcagcccaaatataactctgggacccacctatttaaccactgtcaattcttcagactctgacaatgggaccacaagaacagcaagcaccaattctataggcattacaatttcaccaaatggaacgtggcttccagataaccagttcacggatgccagaacagaaccctgggaggggaattccagcaccgcagcaaccactccagaaactttccctccttcaggtaattctgactcgaaggacagaagagatgagacaccaattattgcggtgatggtggccctgtcctctctgctagtgatcgtgtttattatcatagttttgtacatgttaaggtttaagaaatacaagcaagctgggagccattccaattctttccgcttatccaacggccgcactgaggatgtgg

SEQ ID NO: 24655 - DNA, 2932 bp, Homo sapiens
  source 1..2932: mol_type = unassigned DNA
actgtcgcccgcccagtcgcccctcagccgcttcccctcgccatggaggcgaggccgccgccgccgccgcggggctcggagccgcgggccgggcggcggccctgagggctagtggcggcccgaaacgccgccgcggagccgaggcggagccgctgtcctcgtccccagcggtcccgcccaacgcccgactctgtgacacaactaaaaaaaaacaaaggtatttatggaattccactgagtggtaatggatgatgcagttcaaataactaagataagcatggattcctggttcattcttgttctgctcggcagtggtctgatatgtgtcagtgccaacaatgctaccacagttgcaccttctgtaggaattacaagattaattaactcatcaacggcagaaccagttaaagaagaggccaaaacttcaaatccaacttcttcactaacttctctttctgtggcaccaacattcagcccaaatataactctgggacccacctatttaaccactgtcaattcttcagactctgacaatgggaccacaagaacagcaagcaccaattctataggcattacaatttcaccaaatggaacgtggcttccagataaccagttcacggatgccagaacagaaccctgggaggggaattccagcaccgcagcaaccactccagaaactttccctccttcaggtaattctgactcgaaggacagaagagatgagacaccaattattgcggtgatggtggccctgtcctctctgctagtgatcgtgtttattatcatagttttgtacatgttaaggtttaagaaatacaagcaagctgggagccattccaattctttccgcttatccaacggccgcactgaggatgtggagccccagagtgtgccacttctggccagatccccaagcaccaacaggaaatacccacccctgcccgtggacaagctggaagaggaaattaaccggagaatggcagacgacaataagctcttcagggaggaattcaacgctctccctgcatgtcctatccaggccacctgtgaggctgcttccaaggaggaaaacaaggaaaaaaatcgatatgtaaacatcttgccttatgaccactctagagtccacctgacaccggttgaaggggttccagattctgattacatcaatgcttcattcatcaacggctaccaagaaaagaacaaattcattgctgcacaaggaccaaaagaagaaacggtgaatgatttctggcggatgatctgggaacaaaacacagccaccatcgtcatggttaccaacctgaaggagagaaaggagtgcaagtgcgcccagtactggccagaccaaggctgctggacctatgggaatattcgggtgtctgtagaggatgtgactgtcctggtggactacacagtacggaagttctgcatccagcaggtgggcgacatgaccaacagaaagccacagcgcctcatcactcagttccactttaccagctggccagactttggggtgccttttaccccgatcggcatgctcaagttcctcaagaaggtgaaggcctgtaaccctcagtatgcaggggccatcgtggtccactgcagtgcaggtgtagggcgtacaggtacctttgtcgtcattgatgccatgctggacatgatgcatacagaacggaaggtggacgtgtatggctttgtgagccggatccgggcacagcgctgccagatggtgcaaaccgatatgcagtatgtcttcatataccaagcccttctggagcattatctctatggagatacagaactggaagtgacctctctagaaacccacctgcagaaaatttacaacaaaatcccagggaccagcaacaatggattagaggaggagtttaagaagttaacatcaatcaaaatccagaatgacaagatgcggactggaaaccttccagccaacatgaagaagaaccgtgttttacagatcattccatatgaattcaacagagtgatcattccagttaagcggggcgaagagaatacagactatgtgaacgcatcctttattgatggctaccggcagaaggactcctatatcgccagccagggccctcttctccacacaattgaggacttctggcgaatgatctgggagtggaaatcctgctctatcgtgatgctaacagaactggaggagagaggccaggagaagtgtgcccagtactggccatctgatggactggtgtcctatggagatattacagtggaactgaagaaggaggaggaatgtgagagctacaccgtccgagacctcctggtcaccaacaccagggagaataagagccggcagatccggcagttccacttccatggctggcctgaagtgggcatccccagtgacggaaagggcatgatcagcatcatcgccgccgtgcagaagcagcagcagcagtcagggaaccaccccatcaccgtgcactgcagcgccggggcaggaaggacggggaccttctgtgccctgagcaccgtcctggagcgtgtgaaagcagaggggattttggatgtcttccagactgtcaagagcctgcggctacagaggccacacatggtccagacactggaacagtatgagttctgctacaaggtggtgcaggagtatattgatgcattctcagattatgccaacttcaagtaagcggcaacaagggtccgtggaccaggaggattgcctttaatattttgtaatattctgttttgttaatataccccaaattgtgtatatatcttataactgttttagaaattggtacataggcttctattacctattaggtggaaattttatatgtaaatgtgttagcactgatagtcctttttccaatgttttattggggaattaaatagtgtgatgtttggattgatatcgtgaaatcctcagccg

SEQ ID NO: 24656 - DNA, 733 bp, Homo sapiens
  source 1..733: mol_type = unassigned DNA
gcggcccgaaacgccgccgcggagccgaggcggagccgctgtcctcgtccccagcggtcccgcccaacgcccgactctgtgacacaactaaaaaaaaacaaaggtatttatggaattccactgagtggtaatggatgatgcagttcaaataactaaggacacatgttcaaagagcataattaactttttaaaagaagctaataagcatggattcctggttcattcttgttctgctcggcagtggtctgatatgtgtcagtgccaacaatgctaccacagttgcaccttctgtaggaattacaagattaattaactcatcaacggcagaaccagttaaagaagaggccaaaacttcaaatccaacttcttcactaacttctctttctgtggcaccaacattcagcccaaatataactctgggacccacctatttaaccactgtcaattcttcagactctgacaatgggaccacaagaacagcaagcaccaattctataggcattacaatttcaccaaatggaacgtggcttccagataaccagttcacggatgccagaacagaaccctgggaggggaattccagcaccgcagcaaccactccagaaactttccctccttcaggtaattctgactcgaaggacagaagagatgagacaccaattattgcggtgatggtggccctgtcctctctgctagtgatcgtgtttattatcatagttttgtacatgttaag

SEQ ID NO: 24657 - DNA, 707 bp, Homo sapiens
  source 1..707: mol_type = unassigned DNA
agagacgcgcgcgcgcgcgatcgcgctcggaccccggccgctgccgccatcactgtcgcccgcccagtcgcccctcagccgcttcccctcgccatggaggcgaggccgccgccgccgccgcggggctcggagccgcgggccgggcggcggccctgagggctagtggcggcccgaaacgccgccgcggagccgaggcggagccgctgtcctcgtccccagcggtcccgcccaacgcccgactctgacacatgttcaaagagcataattaactttttaaaagaagctaataagcatggattcctggttcattcttgttctgctcggcagtggtctgatatgtgtcagtgccaacaatgctaccacagttgcaccttctgtaggaattacaagattaattaactcatcaacggcagaaccagttaaagaagaggccaaaacttcaaatccaacttcttcactaacttctctttctgtggcaccaacattcagcccaaatataactctgggacccacctatttaaccactgtcaattcttcagactctgacaatgggaccacaagaacagcaagcaccaattctataggcattacaatttcaccaaatggaacgtggcttccagataaccagttcacggatgccagaacagaaccctgggaggggaattccagcaccgcagcaaccactccagaaactttccctccttcag

SEQ ID NO: 24658 - DNA, 1107 bp, Homo sapiens
  source 1..1107: mol_type = unassigned DNA
tgtcggccaaccagcgcctgtctctgaacagccaatgaacacgcgtcttacagccaaggccgggtcgggagcgaggctgcggcgagtgcggcgctgacagagacgcgcgcgcgcgcgatcgcgctcggaccccggccgctgccgccatcactgtcgcccgcccagtcgcccctcagccgcttcccctcgccatggaggcgaggccgccgccgccgccgcggggctcggagccgcgggccgggcggcggccctgagggctagtggcggcccgaaacgccgccgcggagccgaggcggagccgctgtcctcgtccccagcggtcccgcccaacgcccgactctataagcatggattcctggttcattcttgttctgctcggcagtggtctgatatgtgtcagtgccaacaatgctaccacagttgcaccttctgtaggaattacaagattaattaactcatcaacggcagaaccagttaaagaagaggccaaaacttcaaatccaacttcttcactaacttctctttctgtggcaccaacattcagcccaaatataactctgggacccacctatttaaccactgtcaattcttcagactctgacaatgggaccacaagaacagcaagcaccaattctataggcattacaatttcaccaaatggaacgtggcttccagataaccagttcacggatgccagaacagaaccctgggaggggaattccagcaccgcagcaaccactccagaaactttccctccttcagatgagacaccaattattgcggtgatggtggccctgtcctctctgctagtgatcgtgtttattatcatagttttgtacatgttaaggtttaagaaatacaagcaagctgggagccattccaattctttccgcttatccaacggccgcactgaggatgtggagccccagagtgtgccacttctggccagatccccaagcaccaacaggaaatacccacccctgcccgtggacaagctggaagaggaaattaaccggagaatggcagacgacaataagctcttcagggaggaattcaacgctctccctgcatgtcctatccaggccacctgtgaggctgcttccaagg

SEQ ID NO: 24659 - DNA, 2338 bp, Homo sapiens
  source 1..2338: mol_type = unassigned DNA
gatcgcgctcggaccccggccgctgccgccatcactgtcgcccgcccagtcgcccctcagccgcttcccctcgccatggaggcgaggccgccgccgccgccgcggggctcggagccgcgggccgggcggcggccctgagggctagtggcggcccgaaacgccgccgcggagccgaggcggagccgctgtcctcgtccccagcggtcccgcccaacgcccgactctgtgacacaactaaaaaaaaacaaaggtatttatggaattccactgagtggtaatggatgatgcagttcaaataactaaggacacatgttcaaagagcataattaactttttaaaagaagctagtaattctgactcgaaggacagaagagatgagacaccaattattgcggtgatggtggccctgtcctctctgctagtgatcgtgtttattatcatagttttgtacatgttaaggtttaagaaatacaagcaagctgggagccattccaattctttccgcttatccaacggccgcactgaggatgtggagccccagagtgtgccacttctggccagatccccaagcaccaacaggaaatacccacccctgcccgtggacaagctggaagaggaaattaaccggagaatggcagacgacaataagctcttcagggaggaattcaacgctctccctgcatgtcctatccaggccacctgtgaggctgcttccaaggaggaaaacaaggaaaaaaatcgatatgtaaacatcttgccttatgaccaacagaaagccacagcgcctcatcactcagttccactttaccagctggccagactttggggtgccttttaccccgatcggcatgctcaagttcctcaagaaggtgaaggcctgtaaccctcagtatgcaggggccatcgtggtccactgcagtgcaggtgtagggcgtacaggtacctttgtcgtcattgatgccatgctggacatgatgcatacagaacggaaggtggacgtgtatggctttgtgagccggatccgggcacagcgctgccagatggtgcaaaccgatatgcagtatgtcttcatataccaagcccttctggagcattatctctatggagatacagaactggaagtgacctctctagaaacccacctgcagaaaatttacaacaaaatcccagggaccagcaacaatggattagaggaggagtttaagaagttaacatcaatcaaaatccagaatgacaagatgcggactggaaaccttccagccaacatgaagaagaaccgtgttttacagatcattccatatgaattcaacagagtgatcattccagttaagcggggcgaagagaatacagactatgtgaacgcatcctttattgatggctaccggcagaaggactcctatatcgccagccagggccctcttctccacacaattgaggacttctggcgaatgatctgggagtggaaatcctgctctatcgtgatgctaacagaactggaggagagaggccaggagaagtgtgcccagtactggccatctgatggactggtgtcctatggagatattacagtggaactgaagaaggaggaggaatgtgagagctacaccgtccgagacctcctggtcaccaacaccagggagaataagagccggcagatccggcagttccacttccatggctggcctgaagtgggcatccccagtgacggaaagggcatgatcagcatcatcgccgccgtgcagaagcagcagcagcagtcagggaaccaccccatcaccgtgcactgcagcgccggggcaggaaggacggggaccttctgtgccctgagcaccgtcctggagcgtgtgaaagcagaggggattttggatgtcttccagactgtcaagagcctgcggctacagaggccacacatggtccagacactggaacagtatgagttctgctacaaggtggtgcaggagtatattgatgcattctcagattatgccaacttcaagtaagcggcaacaagggtccgtggaccaggaggattgcctttaatattttgtaatattctgttttgttaatataccccaaattgtgtatatatcttataactgttttagaaattggtacataggcttctattacctattaggtggaaattttatatgtaaatgtgttagcactgatagtcctttttccaatgttttattggggaattaaatagtgtgatgtttggattgatatcgtgaaatcctcagccgagaaattgggctggattgtgctttggttaatacatctttccctaaagaagataaacacaaaatccattccaggtagctcggcaccaactaag

SEQ ID NO: 24660 - DNA, 6110 bp, Homo sapiens
  source 1..6110: mol_type = unassigned DNA
gtctcctctggatcttaactactgagcgcaatgctgagccatggagccgggttggccttgtggatcacactgagcctgctgcagactggactggcggagccagagagatgtaacttcaccctggcggagtccaaggcctccagccattctgtgtctatccagtggagaattttgggctcaccctgtaactttagcctcatctatagcagtgacaccctgggggccgcgttgtgccctacctttcggatagacaacaccacatacggatgtaaccttcaagatttacaagcaggaaccatctataacttcaggattatttctctggatgaagagagaacagtggtcttgcaaacagatcctttacctcctgctaggtttggagtcagtaaagagaagacgacttcaaccagcttgcatgtttggtggactccttcttccggaaaagtcacctcatatgaggtgcaattatttgatgaaaataaccaaaagatacagggggttcaaattcaagaaagtacttcatggaatgaatacacttttttcaatctcactgctggtagtaaatacaatattgccatcacagctgtttctggaggaaaacgttctttttcagtttataccaatggatcaacagtgccatctccagtgaaagatattggtatttccacaaaagccaattctctcctgatttcctggtcccatggttctgggaatgtggaacgataccggctgatgctaatggataaagggatcctagttcatggcggtgttgtggacaaacatgctacttcctatgcttttcacgggctgacccctggctacctctacaacctcactgttatgactgaggctgcagggctgcaaaactacaggtggaaactagtcaggacagcccccatggaagtctcaaatctgaaggtgacaaatgatggcagtttgacctctctaaaagtcaaatggcaaagacctcctggaaatgtggattcttacaatatcaccctgtctcacaaagggaccatcaaggaatccagagtattagcaccttggattactgaaactcactttaaagagttagtccccggtcgactttatcaagttactgtcagctgtgtctctggtgaactgtctgctcagaagatggcagtgggcagaacatttccagacaaagttgcaaacctggaggcaaacaataatggcaggatgaggtctcttgtagtgagctggtcgccccctgctggagactgggagcagtatcggatcctactcttcaatgattctgtggtgctgctcaacatcactgtgggaaaggaagaaacacagtatgtcatggatgacacggggctcgtaccgggaagacagtatgaggtggaagtcattgttgagagtggaaatttgaagaattctgagcgttgccaaggcaggacagtccccctggctgtcctccagcttcgtgtcaaacatgccaatgaaacctcactgagtatcatgtggcagacccctgtagcagaatgggagaaatacatcatttccctagctgacagagacctcttactgatccacaagtcactctccaaagatgccaaagaattcacttttactgacctggtgcctggacgaaaatacatggctacagtcaccagtattagtggagacttaaaaaattcctcttcagtaaaaggaagaacagtgcctgcccaagtgactgacttgcatgtggccaaccaaggaatgaccagtagtctgtttactaactggacccaggcacaaggagacgtagaattttaccaagtcttactgatccatgaaaatgtggtcattaaaaatgaaagcatctccagtgagaccagcagatacagcttccactctctcaagtccggcagcctgtactccgtggtggtaacaacagtgagtggagggatctcttcccgacaagtggttgtggagggaagaacagtcccttccagtgtgagtggagtaacggtgaacaattccggtcgtaatgactacctcagcgtttcctggctgctggcgcccggagatgtggataactatgaggtaacattgtctcatgacggcaaggtggttcagtcccttgtcattgccaagtctgtcagagaatgttccttcagctccctcaccccaggccgcctctacaccgtgaccataactacaaggagtggcaagtatgaaaatcactccttcagccaagagcggacagtgcctgacaaagtccagggagtcagtgttagcaactcagccaggagtgactatttaagggtatcctgggtgcatgccactggagactttgatcactatgaagtcaccattaaaaacaaaaacaacttcattcaaactaaaagcattcccaagtcagaaaacgaatgtgtatttgttcagctagtccctggacggttgtacagtgtcactgttactacaaaaagtggacaatatgaagccaatgaacaagggaatgggagaacaattccagagcctgttaaggatctaacattgcgcaacaggagcactgaggacttgcatgtgacttggtcaggagctaatggggatgtcgaccaatatgagatccagctgctcttcaatgacatgaaagtatttcctccttttcaccttgtaaataccgcaaccgagtatcgatttacttccctaacaccaggccgccaatacaaaattcttgtcttgacgattagcggggatgtacagcagtcagccttcattgagggcttcacagttcctagtgctgtcaaaaatattcacatttctcccaatggagcaacagatagcctgacggtgaactggactcctggtgggggagacgttgattcctacacggtgtcggcattcaggcacagtcaaaaggttgactctcagactattcccaagcacgtctttgagcacacgttccacagactggaggccggggagcagtaccagatcatgattgcctcagtcagcgggtccctgaagaatcagataaatgtggttgggcggacagttccagcatctgtccaaggagtaattgcagacaatgcatacagcagttattccttaatagtaagttggcaaaaagctgctggtgtggcagaaagatatgatatcctgcttctaactgaaaatggaatccttctgcgcaacacatcagagccagccaccactaagcaacacaaatttgaagatctaacaccaggcaagaaatacaagatacagatcctaactgtcagtggaggcctctttagcaaggaagcccagactgaaggccgaacagtcccagcagctgtcaccgacctgaggatcacagagaactccaccaggcacctgtccttccgctggaccgcctcagagggggagctcagctggtacaacatctttttgtacaacccagatgggaatctccaggagagagctcaagttgacccactagtccagagcttctctttccagaacttgctacaaggcagaatgtacaagatggtgattgtaactcacagtggggagctgtctaatgagtctttcatatttggtagaacagtcccagcctctgtgagtcatctcagggggtccaatcggaacacgacagacagcctttggttcaactggagtccagcctctggggactttgacttttatgagctgattctctataatcccaatggcacaaagaaggaaaactggaaagacaaggacctgacggagtggcggtttcaaggccttgttcctggaaggaagtacgtgctgtgggtggtaactcacagtggagatctcagcaataaagtcacagcggagagcagaacagctccaagtcctcccagtcttatgtcatttgctgacattgcaaacacatccttggccatcacgtggaaagggcccccagactggacagactacaacgactttgagctgcagtggttgcccagagatgcacttactgtcttcaacccctacaacaacagaaaatcagaaggacgcattgtgtatggtcttcgtccagggagatcctatcaattcaacgtcaagactgtcagtggtgattcctggaaaacttacagcaaaccaatttttggatctgtgaggacaaagcctgacaagatacaaaacctgcattgccggcctcagaactccacggccattgcctgttcttggatccctcctgattctgactttgatggttatagtattgaatgccggaaaatggacacccaagaagttgagttttccagaaagctggagaaagaaaaatctctgctcaacatcatgatgctagtgccccataagaggtacctggtgtccatcaaagtgcagtcggccggcatgaccagcgaggtggttgaagacagcactatcacaatgatagaccgcccccctcctccacccccacacattcgtgtgaatgaaaaggatgtgctaattagcaagtcttccatcaactttactgtcaactgcagctggttcagcgacaccaatggagctgtgaaatacttcacagtggtggtgagagaggctgatggcagtgatgagctgaagccagaacagcagcaccctctcccttcctacctggagtacaggcacaatgcctccattcgggtgtatcagactaattattttgccagcaaatgtgccgaaaatcctaacagcaactccaagagttttaacattaagcttggagcagagatggagagcctaggtggaaaatgcgatcccactcagcaaaaattctgtgatggaccactgaagccacacactgcctacagaatcagcattcgagcttttacacagctctttgatgaggacctgaaggaattcacaaagccactctattcagacacatttttttctttacccatcactactgaatcagagcccttgtttggagctattgaaggtgtgagtgctggtctgtttttaattggcatgctagtggctgttgttgccttattgatctgcagacagaaagtgagccatggtcgagaaagaccctctgcccgtctgagcattcgtagggatcgaccattatctgtccacttaaacctgggccagaaaggtaaccggaaaacttcttgtccaataaaaataaatcagtttgaagggcatttcatgaagctacaggctgactccaactaccttctatccaaggaatacgaggagttaaaagacgtgggccgaaaccagtcatgtgacattgcactcttgccggagaatagagggaaaaatcgatacaacaatatattgccctatgatgccacgcgagtgaagctctccaatgtagatgatgatccttgctctgactacatcaatgccagctacatccctggcaacaacttcagaagagaatacattgtcactcagggaccgcttcctggcaccaaggatgacttctggaaaatggtgtgggaacaaaacgttcacaacatcgtcatggtgacccagtgtgttgagaagggccgagtaaagtgtgatcattactggccagcggaccaggattccctctactatggggacctcatcctgcagatgctctcagagtccgtcctgcctgagtggaccatccgggagtttaagatatgcggtgaggaacagcttgatgcacacagactcatccgccactttcactatacggtgtggccagaccatggagtcccagaaaccacccagtctctgatccagtttgtgagaactgtcagggactacatcaacagaagcccgggtgctgggcccactgtggtgcactgcagtgctggtgtgggtaggactggaacctttattgcattggaccgaatcctccagcagttagactccaaagactctgtggacatttatggagcagtgcacgacctaagacttcacagggttcacatggtccagactgagtgtcagtatgtctacctacatcagtgtgtaagagatgtcctcagagcaagaaagctacggagtgaacaagaaaaccccttgtttccaatctatgaaaatgtgaatccagagtatcacagagatccagtctattcaaggcattgagaatgtacctgaagagctcctggataaaaattattcactgtgtgatttgtttttaaaaacttgcttcatgccctacagaggtgcca

SEQ ID NO: 24661 - DNA, 11332 bp, Homo sapiens
  source 1..11332: mol_type = unassigned DNA
ttttttttttccccaagcgaagcatgaacagttgctaagtggaaaatggaggctgaattttacatggtgattcttacctgcttgatcttcaggaactcagaagggtttcagattgtccatgtccagaaacaacagtgtcttttcaaaaatgagaaagtggtcgtgggctcatgcaacaggaccatccagaaccagcagtggatgtggactgaggatgaaaagctccttcatgttaaatctgcactgtgcttggccatctccaactcttcccgcggcccctcccgctcagccatcttggaccgctgttcccaggcaccccgatggacctgctatgatcaggaaggcttccttgaggtggaaaatgcctctctctttctccagaaacaaggctccagagtagtggtcaagaaggccaggaaatacctccatagctggatgaaaatagatgtcaacaaggagggaaaactggtcaatgaaagcctctgtttacaaaaagctggcctgggagcagaagtttcggtgaggagcactagaaacacggctccaccccagattctcactacctttaatgcagttccagatggcctggtattccttattaggaataccacagaggccttcatcagaaatgctgcagaaaactacagccaaaacagcagcgagaggcagcatcccaatctgcacatgactggaattacagacacatcatgggttttgtcgactactcagcccttctccagcaccactgaagagactggactggcggagccagagagatgtaacttcaccctggcggagtccaaggcctccagccattctgtgtctatccagtggagaattttgggctcaccctgtaactttagcctcatctatagcagtgacaccctgggggccgcgttgtgccctacctttcggatagacaacaccacatacggatgtaaccttcaagatttacaagcaggaaccatctataacttcaggattatttctctggatgaagagagaacagtggtcttgcaaacagatcctttacctcctgctaggtttggagtcagtaaagagaagacgacttcaaccagcttgcatgtttggtggactccttcttccggaaaagtcacctcatatgaggtgcaattatttgatgaaaataaccaaaagatacagggggttcaaattcaagaaagtacttcatggaatgaatacacttttttcaatctcactgctggtagtaaatacaatattgccatcacagctgtttctggaggaaaacgttctttttcagtttataccaatggatcaacagtgccatctccagtgaaagatattggtatttccacaaaagccaattctctcctgatttcctggtcccatggttctgggaatgtggaacgataccggctgatgctaatggataaagggatcctagttcatggcggtgttgtggacaaacatgctacttcctatgcttttcacgggctgacccctggctacctctacaacctcactgttatgactgaggctgcagggctgcaaaactacaggtggaaactagtcaggacagcccccatggaagtctcaaatctgaaggtgacaaatgatggcagtttgacctctctaaaagtcaaatggcaaagacctcctggaaatgtggattcttacaatatcaccctgtctcacaaagggaccatcaaggaatccagagtattagcaccttggattactgaaactcactttaaagagttagtccccggtcgactttatcaagttactgtcagctgtgtctctggtgaactgtctgctcagaagatggcagtgggcagaacatttccagacaaagttgcaaacctggaggcaaacaataatggcaggatgaggtctcttgtagtgagctggtcgccccctgctggagactgggagcagtatcggatcctactcttcaatgattctgtggtgctgctcaacatcactgtgggaaaggaagaaacacagtatgtcatggatgacacggggctcgtaccgggaagacagtatgaggtggaagtcattgttgagagtggaaatttgaagaattctgagcgttgccaaggcaggacagtccccctggctgtcctccagcttcgtgtcaaacatgccaatgaaacctcactgagtatcatgtggcagacccctgtagcagaatgggagaaatacatcatttccctagctgacagagacctcttactgatccacaagtcactctccaaagatgccaaagaattcacttttactgacctggtgcctggacgaaaatacatggctacagtcaccagtattagtggagacttaaaaaattcctcttcagtaaaaggaagaacagtgcctgcccaagtgactgacttgcatgtggccaaccaaggaatgaccagtagtctgtttactaactggacccaggcacaaggagacgtagaattttaccaagtcttactgatccatgaaaatgtggtcattaaaaatgaaagcatctccagtgagaccagcagatacagcttccactctctcaagtccggcagcctgtactccgtggtggtaacaacagtgagtggagggatctcttcccgacaagtggttgtggagggaagaacagtcccttccagtgtgagtggagtaacggtgaacaattccggtcgtaatgactacctcagcgtttcctggctgctggcgcccggagatgtggataactatgaggtaacattgtctcatgacggcaaggtggttcagtcccttgtcattgccaagtctgtcagagaatgttccttcagctccctcaccccaggccgcctctacaccgtgaccataactacaaggagtggcaagtatgaaaatcactccttcagccaagagcggacagtgcctgacaaagtccagggagtcagtgttagcaactcagccaggagtgactatttaagggtatcctgggtgcatgccactggagactttgatcactatgaagtcaccattaaaaacaaaaacaacttcattcaaactaaaagcattcccaagtcagaaaacgaatgtgtatttgttcagctagtccctggacggttgtacagtgtcactgttactacaaaaagtggacaatatgaagccaatgaacaagggaatgggagaacaattccagagcctgttaaggatctaacattgcgcaacaggagcactgaggacttgcatgtgacttggtcaggagctaatggggatgtcgaccaatatgagatccagctgctcttcaatgacatgaaagtatttcctccttttcaccttgtaaataccgcaaccgagtatcgatttacttccctaacaccaggccgccaatacaaaattcttgtcttgacgattagcggggatgtacagcagtcagccttcattgagggcttcacagttcctagtgctgtcaaaaatattcacatttctcccaatggagcaacagatagcctgacggtgaactggactcctggtgggggagacgttgattcctacacggtgtcggcattcaggcacagtcaaaaggttgactctcagactattcccaagcacgtctttgagcacacgttccacagactggaggccggggagcagtaccagatcatgattgcctcagtcagcgggtccctgaagaatcagataaatgtggttgggcggacagttccagcatctgtccaaggagtaattgcagacaatgcatacagcagttattccttaatagtaagttggcaaaaagctgctggtgtggcagaaagatatgatatcctgcttctaactgaaaatggaatccttctgcgcaacacatcagagccagccaccactaagcaacacaaatttgaagatctaacaccaggcaagaaatacaagatacagatcctaactgtcagtggaggcctctttagcaaggaagcccagactgaaggccgaacagtcccagcagctgtcaccgacctgaggatcacagagaactccaccaggcacctgtccttccgctggaccgcctcagagggggagctcagctggtacaacatctttttgtacaacccagatgggaatctccaggagagagctcaagttgacccactagtccagagcttctctttccagaacttgctacaaggcagaatgtacaagatggtgattgtaactcacagtggggagctgtctaatgagtctttcatatttggtagaacagtcccagcctctgtgagtcatctcagggggtccaatcggaacacgacagacagcctttggttcaactggagtccagcctctggggactttgacttttatgagctgattctctataatcccaatggcacaaagaaggaaaactggaaagacaaggacctgacggagtggcggtttcaaggccttgttcctggaaggaagtacgtgctgtgggtggtaactcacagtggagatctcagcaataaagtcacagcggagagcagaacagctccaagtcctcccagtcttatgtcatttgctgacattgcaaacacatccttggccatcacgtggaaagggcccccagactggacagactacaacgactttgagctgcagtggttgcccagagatgcacttactgtcttcaacccctacaacaacagaaaatcagaaggacgcattgtgtatggtcttcgtccagggagatcctatcaattcaacgtcaagactgtcagtggtgattcctggaaaacttacagcaaaccaatttttggatctgtgaggacaaagcctgacaagatacaaaacctgcattgccggcctcagaactccacggccattgcctgttcttggatccctcctgattctgactttgatggttatagtattgaatgccggaaaatggacacccaagaagttgagttttccagaaagctggagaaagaaaaatctctgctcaacatcatgatgctagtgccccataagaggtacctggtgtccatcaaagtgcagtcggccggcatgaccagcgaggtggttgaagacagcactatcacaatgatagaccgcccccctcctccacccccacacattcgtgtgaatgaaaaggatgtgctaattagcaagtcttccatcaactttactgtcaactgcagctggttcagcgacaccaatggagctgtgaaatacttcacagtggtggtgagagaggctgatggcagtgatgagctgaagccagaacagcagcaccctctcccttcctacctggagtacaggcacaatgcctccattcgggtgtatcagactaattattttgccagcaaatgtgccgaaaatcctaacagcaactccaagagttttaacattaagcttggagcagagatggagagcctaggtggaaaatgcgatcccactcagcaaaaattctgtgatggaccactgaagccacacactgcctacagaatcagcattcgagcttttacacagctctttgatgaggacctgaaggaattcacaaagccactctattcagacacatttttttctttacccatcactactgaatcagagcccttgtttggagctattgaaggtgtgagtgctggtctgtttttaattggcatgctagtggctgttgttgccttattgatctgcagacagaaagtgagccatggtcgagaaagaccctctgcccgtctgagcattcgtagggatcgaccattatctgtccacttaaacctgggccagaaaggtaaccggaaaacttcttgtccaataaaaataaatcagtttgaagggcatttcatgaagctacaggctgactccaactaccttctatccaaggaatacgaggagttaaaagacgtgggccgaaaccagtcatgtgacattgcactcttgccggagaatagagggaaaaatcgatacaacaatatattgccctatgatgccacgcgagtgaagctctccaatgtagatgatgatccttgctctgactacatcaatgccagctacatccctggcaacaacttcagaagagaatacattgtcactcagggaccgcttcctggcaccaaggatgacttctggaaaatggtgtgggaacaaaacgttcacaacatcgtcatggtgacccagtgtgttgagaagggccgagtaaagtgtgatcattactggccagcggaccaggattccctctactatggggacctcatcctgcagatgctctcagagtccgtcctgcctgagtggaccatccgggagtttaagatatgcggtgaggaacagcttgatgcacacagactcatccgccactttcactatacggtgtggccagaccatggagtcccagaaaccacccagtctctgatccagtttgtgagaactgtcagggactacatcaacagaagcccgggtgctgggcccactgtggtgcactgcagtgctggtgtgggtaggactggaacctttattgcattggaccgaatcctccagcagttagactccaaagactctgtggacatttatggagcagtgcacgacctaagacttcacagggttcacatggtccagactgagtgtcagtatgtctacctacatcagtgtgtaagagatgtcctcagagcaagaaagctacggagtgaacaagaaaaccccttgtttccaatctatgaaaatgtgaatccagagtatcacagagatccagtctattcaaggcattgagaatgtacctgaagagctcctggataaaaattattcactgtgtgatttgtttttaaaaacttgcttcatgccctacagaggtgccagctatttctgttgatactatgtataatttattaatctggagaatgtttaaaattttatataatttaaaggtaacagatattattgtacatagttgtattttgtagtttcttctgtaaatatgtatttttcataatgtttaatattaagctttatataatactatttttccacactaaagtgttcatgacttgttctacataaaactaattcaacctgtatgacaggactactggtaaaatgcatatggaggtggtggcagagacaatccttcaggccatgttttctacctgttttgatattcactggacaggaaaaagggcagggctagagagagcaaatactatggctagatttgctgcattgctgtcccatgaatctcgagagccaacagacatgtcctaacttgctattaggacaaatgtgacagtcaaaaaaaggattagagggagggagaaaaaagaattaagcagtaccaaagctgaactagatgcttgtgtctgaactagttgctctctctctcctttctccttccagggattcaagccaaagtggtcagctcagggatcatgtaacttgcagtgcaagcccaggatggtaggatgcagggttgagggttctgatagagaatgattccaaacagaagtgatgaattccttttgttaataagatgccagctatacccagactggaaacataacatgcaaagcactatctacagtgattagagatcctttcattgcattcatggtgtggagtgtgaacatccacacccatactgtaatgtatttatacacactagtttctgtctcattttcagtggtctccattcctagaaaagtcacaattatccattcctacttgatttcccattaaaagaatattatggtagcagattgtgcccctcattaaaaggcttaatgccaacattttcatagaaatgactacaaacatcatatatagtaaatttaaaaacaatagcaaaaacaaaaacagtggtcttcagtaaaattttcaaaacttcttttagtaaatcaatgaagtcaaaatgtcaagtaatcacccaaagttgcatttaataacaaaaggcactacatactgtaccaagtttatcttcaatatttgtgccttacttactttgactataacaaattccaatgagtcagaaagtatttccttcatcaaggtccagttccgacagcattcctgggaaaaatttgaaaggagtttgtacggaatcttcatagatacctgagaagatgagctggagatgtttgcctttttcacactacaaatttttctgtaataaacttgggaattagaggtcaagtttgttgatggcatagcttcctttgcataaagagtatatttcttttcaaagtatatatttttgtaacctaccataaagtccgtaagtgaatacaacgaatgtaattgacataataattgaaaatcattgactatacctaaaatagttctttataattaaataactctacacccaatctggaaatttttccaaggttatttgaagtttacaaaaatgtgaagcataatcataagcttcaaagattcacagtttcattgtgctcaatgctcttgtgaaatgacagtcttaagctctgattctgtatcaaggaactaagtgaatcttctggaaatgaaaaggaacaacatatgtgtaagtgcagtagatgtaccaccagcgagaaaatagaggtcagagatctacaacgtgtggcatccattagaaatcacctttcctacattgaaaagaaaaaagagaaaaagcagaattttacactaatgttgcttgatgcaaagcacattaatgcttggaaggatacattcattttcgacttttcattcactcagaaaacttctagtaagtatctgcaacctgctaggcactgttccagaatctacacatttctactcacataaagagaatcctcataaagttaggattgttgttactaccttcaattgagcttaaaagacagcctcatcaagggaatgggataactgagccagtctaggacagtggtcaccttccacaggccacacactggaaagtgctaatgctactttaatagcaaacctctggatctaggagagagagcaattaattgcacaaaccaggagttaaaaccataaaaaaaacctatgcatctgtaatagtaaataacactcacgtactctggcaacatctagggtagtatcagaattatgtaaatggacatgacagggaaaaatcgtaggtttttttagtctaatccaacccaggaaatgtttattcctaccctacacctaattttaaaccttcttagcaacaaatatttcactattcgctcctactcctgggaagactaaatatataattgacttatttattaaatttaggagaaaaaaaaagttttccttgacattcagctctattggatttatttccatttaattgcatcatgtgttatgtcttggtaaacactccatttcctgtcttggtgggcatcctgtctgtgtacctgtgcagtacactttaatcatcaagacttcaaagtgcttttgagctatcaaatcttgggagagtcccatctagcatcttaataattatttttccaagttcgttataattaactcctttaacctcatctcattaaatcaattttgtattgtcattctgttgttctctggaaagcagccaattgttcagctcttgaatcagaattttcaaagactcacctctcttacctgggcttgcacatatttgtcctaagtaattctctatcccttaaacctctgagtccctctgttttattacttgccccactcctcctacttgaatatgtttgttttcccagttgaatgtgatttttatctactgttcatattatcttttatacccatgagtataatttcatagtcctttcaggttccacatcatcaaagagatgaccataatttcacttttttttgaaatgaagtcttgctctgttgcccaggctggagtgcagtggcacaatctcagctcactacaacctccgcctcccaggttcaagcgattctgccttagcctcccaagtagctggaattacaggtgcctgccaccatgtctggctaatttttgtgtttttagtagagatggggtttcaccatgttggccaggctggtcttgaactcgtgaccttaggtgatccacccacctcaacctcccaaagtgctaggattacaagagtgagccaccgcacctggccaattcacttttaaatactaaaaggcacacagcacacagacattttcggggcagttttctttgggagggtctttgataaattttgtaatcacctctcggaagaaagcccaaaatgacatgtgaaaataatattaaaccatttaccagatgtccagcaatataaaaatagacctcacatgctacccttcacatgctgattctcttgccttgctgtttaaggatccagtttcttatgttaaacattttccttaccttttgcaataatattattggccatatactaaattctcattcacttagctttctaagaattctttgaggttggaatcctgaaatcataaagctaccagatctgcacaacagcagtggtagtatctgagcccaaactctgagacgctctagagttttagtttacaaacatgagccagaccaaacctgacctggtgaaaatcaataggtaataaactgcttgtatatgatagcagttcaagggctttctgggttccatttcactgaggaaatgaaaatataactgattagccaagacagagtggcaataaggaataactgatcctcctccaagttgcagtgagcaagccctcaagcctacctcattcctgaagagttgaaggagaaaatgccgtgctaattttctgccctgctatttttaacctgaaatttagaattacatcaggtattcaaagaatgttccctatcaaaggaaaatctgtaaacgatgactgcaaaaagcaagtgaaatgatgcaaagagaaaatatttgcaaaacagaatctaaccagacatcatcatgaagataaaatggcatctcttctgtgtggcctgggtgtgcttggacaatcctgtcacacgtttctattaggacatgttgcccttttgaggattcactctatgttggccagatggtttaactgattaaacaattgaatcaatttattttgctttttgaattgaccagatatttaactaaatgtactgggtttggcattttagacacactgccttagattcttgtagtgcatgatgactttgaaaatgtttggccattttagttaaaatgcagggtaacatttgatgcagccatgataacaggaaaaatctgttctgttctaaaaatgtttctagcaatagaagtatttctggctaagagaatactcttgacttgtagggaggctccctcggaataaatgtatgcaacacaaataaggcattttattttttaaaagattgtctatataagatacacttattaaataaagaaattgttggtgaatgctctgaaaa

SEQ ID NO: 24662 - DNA, 10363 bp, Homo sapiens
  source 1..10363: mol_type = unassigned DNA
atgctgagccatggagccgggttggccttgtggatcacactgagcctgctgcagactggactggcggagccagagagatgtaacttcaccctggcggagtccaaggcctccagccattctgtgtctatccagtggagaattttgggctcaccctgtaactttagcctcatctatagcagtgacaccctgggggccgcgttgtgccctacctttcggatagacaacaccacatacggatgtaaccttcaagatttacaagcaggaaccatctataacttcaggattatttctctggatgaagagagaacagtggtcttgcaaacagatcctttacctcctgctaggtttggagtcagtaaagagaagacgacttcaaccagcttgcatgtttggtggactccttcttccggaaaagtcacctcatatgaggtgcaattatttgatgaaaataaccaaaagatacagggggttcaaattcaagaaagtacttcatggaatgaatacacttttttcaatctcactgctggtagtaaatacaatattgccatcacagctgtttctggaggaaaacgttctttttcagtttataccaatggatcaacagtgccatctccagtgaaagatattggtatttccacaaaagccaattctctcctgatttcctggtcccatggttctgggaatgtggaacgataccggctgatgctaatggataaagggatcctagttcatggcggtgttgtggacaaacatgctacttcctatgcttttcacgggctgacccctggctacctctacaacctcactgttatgactgaggctgcagggctgcaaaactacaggtggaaactagtcaggacagcccccatggaagtctcaaatctgaaggtgacaaatgatggcagtttgacctctctaaaagtcaaatggcaaagacctcctggaaatgtggattcttacaatatcaccctgtctcacaaagggaccatcaaggaatccagagtattagcaccttggattactgaaactcactttaaagagttagtccccggtcgactttatcaagttactgtcagctgtgtctctggtgaactgtctgctcagaagatggcagtgggcagaacattccccctggctgtcctccagcttcgtgtcaaacatgccaatgaaacctcactgagtatcatgtggcagacccctgtagcagaatgggagaaatacatcatttccctagctgacagagacctcttactgatccacaagtcactctccaaagatgccaaagaattcacttttactgacctggtgcctggacgaaaatacatggctacagtcaccagtattagtggagacttaaaaaattcctcttcagtaaaaggaagaacagtgcctgcccaagtgactgacttgcatgtggccaaccaaggaatgaccagtagtctgtttactaactggacccaggcacaaggagacgtagaattttaccaagtcttactgatccatgaaaatgtggtcattaaaaatgaaagcatctccagtgagaccagcagatacagcttccactctctcaagtccggcagcctgtactccgtggtggtaacaacagtgagtggagggatctcttcccgacaagtggttgtggagggaagaacagtcccttccagtgtgagtggagtaacggtgaacaattccggtcgtaatgactacctcagcgtttcctggctgctggcgcccggagatgtggataactatgaggtaacattgtctcatgacggcaaggtggttcagtcccttgtcattgccaagtctgtcagagaatgttccttcagctccctcaccccaggccgcctctacaccgtgaccataactacaaggagtggcaagtatgaaaatcactccttcagccaagagcggacagtgcctgacaaagtccagggagtcagtgttagcaactcagccaggagtgactatttaagggtatcctgggtgcatgccactggagactttgatcactatgaagtcaccattaaaaacaaaaacaacttcattcaaactaaaagcattcccaagtcagaaaacgaatgtgtatttgttcagctagtccctggacggttgtacagtgtcactgttactacaaaaagtggacaatatgaagccaatgaacaagggaatgggagaacaattccagagcctgttaaggatctaacattgcgcaacaggagcactgaggacttgcatgtgacttggtcaggagctaatggggatgtcgaccaatatgagatccagctgctcttcaatgacatgaaagtatttcctccttttcaccttgtaaataccgcaaccgagtatcgatttacttccctaacaccaggccgccaatacaaaattcttgtcttgacgattagcggggatgtacagcagtcagccttcattgagggcttcacagttcctagtgctgtcaaaaatattcacatttctcccaatggagcaacagatagcctgacggtgaactggactcctggtgggggagacgttgattcctacacggtgtcggcattcaggcacagtcaaaaggttgactctcagactattcccaagcacgtctttgagcacacgttccacagactggaggccggggagcagtaccagatcatgattgcctcagtcagcgggtccctgaagaatcagataaatgtggttgggcggacagttccagcatctgtccaaggagtaattgcagacaatgcatacagcagttattccttaatagtaagttggcaaaaagctgctggtgtggcagaaagatatgatatcctgcttctaactgaaaatggaatccttctgcgcaacacatcagagccagccaccactaagcaacacaaatttgaagatctaacaccaggcaagaaatacaagatacagatcctaactgtcagtggaggcctctttagcaaggaagcccagactgaaggccgaacagtcccagcagctgtcaccgacctgaggatcacagagaactccaccaggcacctgtccttccgctggaccgcctcagagggggagctcagctggtacaacatctttttgtacaacccagatgggaatctccaggagagagctcaagttgacccactagtccagagcttctctttccagaacttgctacaaggcagaatgtacaagatggtgattgtaactcacagtggggagctgtctaatgagtctttcatatttggtagaacagtcccagcctctgtgagtcatctcagggggtccaatcggaacacgacagacagcctttggttcaactggagtccagcctctggggactttgacttttatgagctgattctctataatcccaatggcacaaagaaggaaaactggaaagacaaggacctgacggagtggcggtttcaaggccttgttcctggaaggaagtacgtgctgtgggtggtaactcacagtggagatctcagcaataaagtcacagcggagagcagaacagctccaagtcctcccagtcttatgtcatttgctgacattgcaaacacatccttggccatcacgtggaaagggcccccagactggacagactacaacgactttgagctgcagtggttgcccagagatgcacttactgtcttcaacccctacaacaacagaaaatcagaaggacgcattgtgtatggtcttcgtccagggagatcctatcaattcaacgtcaagactgtcagtggtgattcctggaaaacttacagcaaaccaatttttggatctgtgaggacaaagcctgacaagatacaaaacctgcattgccggcctcagaactccacggccattgcctgttcttggatccctcctgattctgactttgatggttatagtattgaatgccggaaaatggacacccaagaagttgagttttccagaaagctggagaaagaaaaatctctgctcaacatcatgatgctagtgccccataagaggtacctggtgtccatcaaagtgcagtcggccggcatgaccagcgaggtggttgaagacagcactatcacaatgatagaccgcccccctcctccacccccacacattcgtgtgaatgaaaaggatgtgctaattagcaagtcttccatcaactttactgtcaactgcagctggttcagcgacaccaatggagctgtgaaatacttcacagtggtggtgagagaggctgatggtaatgatgagctgaagccagaacagcagcaccctctcccttcctacctggagtacaggcacaatgcctccattcgggtgtatcagactaattattttgccagcaaatgtgccgaaaatcctaacagcaactccaagagttttaacattaagcttggagcagagatggagagcctaggtggaaaatgcgatcccactcagcaaaaattctgtgatggaccactgaagccacacactgcctacagaatcagcattcgagcttttacacagctctttgatgaggacctgaaggaattcacaaagccactctattcagacacatttttttctttacccatcactactgaatcagagcccttgtttggagctattgaaggtgtgagtgctggtctgtttttaattggcatgctagtggctgttgttgccttattgatctgcagacagaaagtgagccatggtcgagaaagaccctctgcccgtctgagcattcgtagggatcgaccattatctgtccacttaaacctgggccagaaaggtaaccggaaaacttcttgtccaataaaaataaatcagtttgaagggcatttcatgaagctacaggctgactccaactaccttctatccaaggaatacgaggagttaaaagacgtgggccgaaaccagtcatgtgacattgcactcttgccggagaatagagggaaaaatcgatacaacaatatattgccctatgatgccacgcgagtgaagctctccaatgtagatgatgatccttgctctgactacatcaatgccagctacatccctggcaacaacttcagaagagaatacattgtcactcagggaccgcttcctggcaccaaggatgacttctggaaaatggtgtgggaacaaaacgttcacaacatcgtcatggtgacccagtgtgttgagaagggccgagtaaagtgtgatcattactggccagcggaccaggattccctctactatggggacctcatcctgcagatgctctcagagtccgtcctgcctgagtggaccatccgggagtttaagatatgcggtgaggaacagcttgatgcacacagactcatccgccactttcactatacggtgtggccagaccatggagtcccagaaaccacccagtctctgatccagtttgtgagaactgtcagggactacatcaacagaagcccgggtgctgggcccactgtggtgcactgcagtgctggtgtgggtaggactggaacctttattgcattggaccgaatcctccagcagttagactccaaagactctgtggacatttatggagcagtgcacgacctaagacttcacagggttcacatggtccagactgagtgtcagtatgtctacctacatcagtgtgtaagagatgtcctcagagcaagaaagctacggagtgaacaagaaaaccccttgtttccaatctatgaaaatgtgaatccagagtatcacagagatccagtctattcaaggcattgagaatgtacctgaagagctcctggataaaaattattcactgtgtgatttgtttttaaaaacttgcttcatgccctacagaggtgccagctatttctgttgatactatgtataatttattaatctggagaatgtttaaaattttatataatttaaaggtaacagatattattgtacatagttgtattttgtagtttcttctgtaaatatgtatttttcataatgtttaatattaagctttatataatactatttttccacactaaagtgttcatgacttgttctacataaaactaattcaacctgtatgacaggactactggtaaaatgcatatggaggtggtggcagagacaatccttcaggccatgttttctacctgttttgatattcactggacaggaaaaagggcagggctagagagagcaaatactatggctagatttgctgcattgctgtcccatgaatctcgagagccaacagacatgtcctaacttgctattaggacaaatgtgacagtcaaaaaaaggattagagggagggagaaaaaagaattaagcagtaccaaagctgaactagatgcttgtgtctgaactagttgctctctctctcctttctccttccagggattcaagccaaagtggtcagctcagggatcatgtaacttgcagtgcaagcccaggatggtaggatgcagggttgagggttctgatagagaatgattccaaacagaagtgatgaattccttttgttaataagatgccagctatacccagactggaaacataacatgcaaagcactatctacagtgattagagatcctttcattgcattcatggtgtggagtgtgaacatccacacccatactgtaatgtatttatacacactagtttctgtctcattttcagtggtctccattcctagaaaagtcacaattatccattcctacttgatttcccattaaaagaatattatggtagcagattgtgcccctcattaaaaggcttaatgccaacattttcatagaaatgactacaaacatcatatatagtaaatttaaaaacaatagcaaaaacaaaaacagtggtcttcagtaaaattttcaaaacttcttttagtaaatcaatgaagtcaaaatgtcaagtaatcacccaaagttgcatttaataacaaaaggcactacatactgtaccaagtttatcttcaatatttgtgccttacttactttgactataacaaattccaatgagtcagaaagtatttccttcatcaaggtccagttccgacagcattcctgggaaaaatttgaaaggagtttgtacggaatcttcatagatacctgagaagatgagctggagatgtttgcctttttcacactacaaatttttctgtaataaacttgggaattagaggtcaagtttgttgatggcatagcttcctttgcataaagagtatatttcttttcaaagtatatatttttgtaacctaccataaagtccgtaagtgaatacaacgaatgtaattgacataataattgaaaatcattgactatacctaaaatagttctttataattaaataactctacacccaatctggaaatttttccaaggttatttgaagtttacaaaaatgtgaagcataatcataagcttcaaagattcacagtttcattgtgctcaatgctcttgtgaaatgacagtcttaagctctgattctgtatcaaggaactaagtgaatcttctggaaatgaaaaggaacaacatatgtgtaagtgcagtagatgtaccaccagcgagaaaatagaggtcagagatctacaacgtgtggcatccattagaaatcacctttcctacattgaaaagaaaaaagagaaaaagcagaattttacactaatgttgcttgatgcaaagcacattaatgcttggaaggatacattcattttcgacttttcattcactcagaaaacttctagtaagtatctgcaacctgctaggcactgttccagaatctacacatttctactcacataaagagaatcctcataaagttaggattgttgttactaccttcaattgagcttaaaagacagcctcatcaagggaatgggataactgagccagtctaggacagtggtcaccttccacaggccacacactggaaagtgctaatgctactttaatagcaaacctctggatctaggagagagagcaattaattgcacaaaccaggagttaaaaccataaaaaaaacctatgcatctgtaatagtaaataacactcacgtactctggcaacatctagggtagtatcagaattatgtaaatggacatgacagggaaaaatcgtaggtttttttagtctaatccaacccaggaaatgtttattcctaccctacacctaattttaaaccttcttagcaacaaatatttcactattcgctcctactcctgggaagactaaatatataattgacttatttattaaatttaggagaaaaaaaaagttttccttgacattcagctctattggatttatttccatttaattgcatcatgtgttatgtcttggtaaacactccatttcctgtcttggtgggcatcctgtctgtgtacctgtgcagtacactttaatcatcaagacttcaaagtgcttttgagctatcaaatcttgggagagtcccatctagcatcttaataattatttttccaagttcgttataattaactcctttaacctcatctcattaaatcaattttgtattgtcattctgttgttctctggaaagcagccaattgttcagctcttgaatcagaattttcaaagactcacctctcttacctgggcttgcacatatttgtcctaagtaattctctatcccttaaacctctgagtccctctgttttattacttgccccactcctcctacttgaatatgtttgttttcccagttgaatgtgatttttatctactgttcatattatcttttatacccatgagtataatttcatagtcctttcaggttccacatcatcaaagagatgaccataatttcacttttttttgaaatgaagtcttgctctgttgcccaggctggagtgcagtggcacaatctcagctcactacaacctccgcctcccaggttcaagcgattctgccttagcctcccaagtagctggaattacaggtgcctgccaccatgtctggctaatttttgtgtttttagtagagatggggtttcaccatgttggccaggctggtcttgaactcgtgaccttaggtgatccacccacctcaacctcccaaagtgctaggattacaagagtgagccaccgcacctggccaattcacttttaaatactaaaaggcacacagcacacagacattttcggggcagttttctttgggagggtctttgataaattttgtaatcacctctcggaagaaagcccaaaatgacatgtgaaaataatattaaaccatttaccagatgtccagcaatataaaaatagacctcacatgctacccttcacatgctgattctcttgccttgctgtttaaggatccagtttcttatgttaaacattttccttaccttttgcaataatattattggccatatactaaattctcattcacttagctttctaagaattctttgaggttggaatcctgaaatcataaagctaccagatctgcacaacagcagtggtagtatctgagcccaaactctgagacgctctagagttttagtttacaaacatgagccagaccaaacctgacctggtgaaaatcaataggtaataaactgcttgtatatgatagcagttcaagggctttctgggttccatttcactgaggaaatgaaaatataactgattagccaagacagagtggcaataaggaataactgatcctcctccaagttgcagtgagcaagccctcaagcctacctcattcctgaagagttgaaggagaaaatgccgtgctaattttctgccctgctatttttaacctgaaatttagaattacatcaggtattcaaagaatgttccctatcaaaggaaaatctgtaaacgatgactgcaaaaagcaagtgaaatgatgcaaagagaaaatatttgcaaaacagaatctaaccagacatcatcatgaagataaaatggcatctcttctgtgtggcctgggtgtgcttggacaatcctgtcacacgtttctattaggacatgttgcccttttgaggattcactctatgttggccagatggtttaactgattaaacaattgaatcaatttattttgctttttgaattgaccagatatttaactaaatgtactgggtttggcattttagacacactgccttagattcttgtagtgcatgatgactttgaaaatgtttggccattttagttaaaatgcagggtaacatttgatgcagccatgataacaggaaaaatctgttctgttctaaaaatgtttctagcaatagaagtatttctggctaagagaatactcttgacttgtagggaggctccctcggaataaatgtatgcaacacaaataaggcattttattttttaaaagattgtctatataagatacacttattaaataaagaaattgttggtgaatgctctgaaaa

SEQ ID NO: 24663 - DNA, 6581 bp, Homo sapiens
  source 1..6581: mol_type = unassigned DNA
aagcatgaacagttgctaagtggaaaatggaggctgaattttacatggtgattcttacctgcttgatcttcaggaactcagaagggtttcagattgtccatgtccagaaacaacagtgtcttttcaaaaatgagaaagtggtcgtgggctcatgcaacaggaccatccagaaccagcagtggatgtggactgaggatgaaaagctccttcatgttaaatctgcactgtgcttggccatctccaactcttcccgcggcccctcccgctcagccatcttggaccgctgttcccaggcaccccgatggacctgctatgatcaggaaggcttccttgaggtggaaaatgcctctctctttctccagaaacaaggctccagagtagtggtcaagaaggccaggaaatacctccatagctggatgaaaatagatgtcaacaaggagggaaaactggtcaatgaaagcctctgtttacaaaaagctggcctgggagcagaagtttcggtgaggagcactagaaacacggctccaccccagattctcactacctttaatgcagttccagatggcctggtattccttattaggaataccacagaggccttcatcagaaatgctgcagaaaactacagccaaaacagcagcgagaggcagcatcccaatctgcacatgactggaattacagacacatcatgggttttgtcgactactcagcccttctccagcaccactgaagagactggactggcggagccagagagatgtaacttcaccctggcggagtccaaggcctccagccattctgtgtctatccagtggagaattttgggctcaccctgtaactttagcctcatctatagcagtgacaccctgggggccgcgttgtgccctacctttcggatagacaacaccacatacggatgtaaccttcaagatttacaagcaggaaccatctataacttcaggattatttctctggatgaagagagaacagtggtcttgcaaacagatcctttacctcctgctaggtttggagtcagtaaagagaagacgacttcaaccagcttgcatgtttggtggactccttcttccggaaaagtcacctcatatgaggtgcaattatttgatgaaaataaccaaaagatacagggggttcaaattcaagaaagtacttcatggaatgaatacacttttttcaatctcactgctggtagtaaatacaatattgccatcacagctgtttctggaggaaaacgttctttttcagtttataccaatggatcaacagtgccatctccagtgaaagatattggtatttccacaaaagccaattctctcctgatttcctggtcccatggttctgggaatgtggaacgataccggctgatgctaatggataaagggatcctagttcatggcggtgttgtggacaaacatgctacttcctatgcttttcacgggctgacccctggctacctctacaacctcactgttatgactgaggctgcagggctgcaaaactacaggtggaaactagtcaggacagcccccatggaagtctcaaatctgaaggtgacaaatgatggcagtttgacctctctaaaagtcaaatggcaaagacctcctggaaatgtggattcttacaatatcaccctgtctcacaaagggaccatcaaggaatccagagtattagcaccttggattactgaaactcactttaaagagttagtccccggtcgactttatcaagttactgtcagctgtgtctctggtgaactgtctgctcagaagatggcagtgggcagaacatttccagacaaagttgcaaacctggaggcaaacaataatggcaggatgaggtctcttgtagtgagctggtcgccccctgctggagactgggagcagtatcggatcctactcttcaatgattctgtggtgctgctcaacatcactgtgggaaaggaagaaacacagtatgtcatggatgacacggggctcgtaccgggaagacagtatgaggtggaagtcattgttgagagtggaaatttgaagaattctgagcgttgccaaggcaggacagtccccctggctgtcctccagcttcgtgtcaaacatgccaatgaaacctcactgagtatcatgtggcagacccctgtagcagaatgggagaaatacatcatttccctagctgacagagacctcttactgatccacaagtcactctccaaagatgccaaagaattcacttttactgacctggtgcctggacgaaaatacatggctacagtcaccagtattagtggagacttaaaaaattcctcttcagtaaaaggaagaacagtgcctgcccaagtgactgacttgcatgtggccaaccaaggaatgaccagtagtctgtttactaactggacccaggcacaaggagacgtagaattttaccaagtcttactgatccatgaaaatgtggtcattaaaaatgaaagcatctccagtgagaccagcagatacagcttccactctctcaagtccggcagcctgtactccgtggtggtaacaacagtgagtggagggatctcttcccgacaagtggttgtggagggaagaacagtgcctgacaaagtccagggagtcagtgttagcaactcagccaggagtgactatttaagggtatcctgggtgcatgccactggagactttgatcactatgaagtcaccattaaaaacaaaaacaacttcattcaaactaaagcattcccaagtcagaaaacgaatgtgtatttgttcagctagtccctggacggttgtacagtgtcactgttactacaaaaagtggacaatatgaagccaatgaacaagggaatgggagaacaattccagagcctgttaaggatctaacattgcgcaacaggagcactgaggacttgcatgtgacttggtcaggagctaatggggatgtcgaccaatatgagatccagctgctcttcaatgacatgaaagtatttcctccttttcaccttgtaaataccgcaaccgagtatcgatttacttccctaacaccaggccgccaatacaaaattcttgtcttgacgattagcggggatgtacagcagtcagccttcattgagggcttcacagttcctagtgctgtcaaaaatattcacatttctcccaatggagcaacagatagcctgacggtgaactggactcctggtgggggagacgttgattcctacacggtgtcggcattcaggcacagtcaaaaggttgactctcagactattcccaagcacgtctttgagcacacgttccacagactggaggccggggagcagtaccagatcatgattgcctcagtcagcgggtccctgaagaatcagataaatgtggttgggcggacagttccagcatctgtccaaggagtaattgcagacaatgcatacagcagttattccttaatagtaagttggcaaaaagctgctggtgtggcagaaagatatgatatcctgcttctaactgaaaatggaatccttctgcgcaacacatcagagccagccaccactaagcaacacaaatttgaagatctaacaccaggcaagaaatacaagatacagatcctaactgtcagtggaggcctctttagcaaggaagcccagactgaaggccgaacagtcccagcagctgtcaccgacctgaggatcacagagaactccaccaggcacctgtccttccgctggaccgcctcagagggggagctcagctggtacaacatctttttgtacaacccagatgggaatctccaggagagagctcaagttgacccactagtccagagcttctctttccagaacttgctacaaggcagaatgtacaagatggtgattgtaactcacagtggggagctgtctaatgagtctttcatatttggtagaacagtcccagcctctgtgagtcatctcagggggtccaatcggaacacgacagacagcctttggttcaactggagtccagcctctggggactttgacttttatgagctgattctctataatcccaatggcacaaagaaggaaaactggaaagacaaggacctgacggagtggcggtttcaaggccttgttcctggaaggaagtacgtgctgtgggtggtaactcacagtggagatctcagcaataaagtcacagcggagagcagaacagctccaagtcctcccagtcttatgtcatttgctgacattgcaaacacatccttggccatcacgtggaaagggcccccagactggacagactacaacgactttgagctgcagtggttgcccagagatgcacttactgtcttcaacccctacaacaacagaaaatcagaaggacgcattgtgtatggtcttcgtccagggagatcctatcaattcaacgtcaagactgtcagtggtgattcctggaaaacttacagcaaaccaatttttggatctgtgaggacaaagcctgacaagatacaaaacctgcattgccggcctcagaactccacggccattgcctgttcttggatccctcctgattctgactttgatggttatagtattgaatgccggaaaatggacacccaagaagttgagttttccagaaagctggagaaagaaaaatctctgctcaacatcatgatgctagtgccccataagaggtacctggtgtccatcaaagtgcagtcggccggcatgaccagcgaggtggttgaagacagcactatcacaatgatagaccgcccccctcctccacccccacacattcgtgtgaatgaaaaggatgtgctaattagcaagtcttccatcaactttactgtcaactgcagctggttcagcgacaccaatggagctgtgaaatacttcacagtggtggtgagagaggctgatggcagtgatgagctgaagccagaacagcagcaccctctcccttcctacctggagtacaggcacaatgcctccattcgggtgtatcagactaattattttgccagcaaatgtgccgaaaatcctaacagcaactccaagagttttaacattaagcttggagcagagatggagagcctaggtggaaaatgcgatcccactcagcaaaaattctgtgatggaccactgaagccacacactgcctacagaatcagcattcgagcttttacacagctctttgatgaggacctgaaggaattcacaaagccactctattcagacacatttttttctttacccatcactactgaatcagagcccttgtttggagctattgaaggtgtgagtgctggtctgtttttaattggcatgctagtggctgttgttgccttattgatctgcagacagaaagtgagccatggtcgagaaagaccctctgcccgtctgagcattcgtagggatcgaccattatctgtccacttaaacctgggccagaaaggtaaccggaaaacttcttgtccaataaaaataaatcagtttgaagggcatttcatgaagctacaggctgactccaactaccttctatccaaggaatacgaggagttaaaagacgtgggccgaaaccagtcatgtgacattgcactcttgccggagaatagagggaaaaatcgatacaacaatatattgccctatgatgccacgcgagtgaagctctccaatgtagatgatgatccttgctctgactacatcaatgccagctacatccctggcaacaacttcagaagagaatacattgtcactcagggaccgcttcctggcaccaaggatgacttctggaaaatggtgtgggaacaaaacgttcacaacatcgtcatggtgacccagtgtgttgagaagggccgagtaaagtgtgatcattactggccagcggaccaggattccctctactatggggacctcatcctgcagatgctctcagagtccgtcctgcctgagtggaccatccgggagtttaagatatgcggtgaggaacagcttgatgcacacagactcatccgccactttcactatacggtgtggccagaccatggagtcccagaaaccacccagtctctgatccagtttgtgagaactgtcagggactacatcaacagaagcccgggtgctgggcccactgtggtgcactgcagtgctggtgtgggtaggactggaacctttattgcattggaccgaatcctccagcagttagactccaaagactctgtggacatttatggagcagtgcacgacctaagacttcacagggttcacatggtccagactgagtgtcagtatgtctacctacatcagtgtgtaagagatgtcctcagagcaagaaagctacggagtgaacaagaaaaccccttgtttccaatctatgaaaatgtgaatccagagtatcacagagatccagtctattcaaggcattgagaatgtacctgaagagctcctggataaaaattattcactgtgtgatttgtttttaaaaacttgcttcatgccctacagaggtgccagctatttctgttgatactatgtataatttattaatctggagaatgtttaaaattttatataatttaaaggtaacagatattattgt

SEQ ID NO: 24664 - DNA, 5839 bp, Homo sapiens
  source 1..5839: mol_type = unassigned DNA
tctcctctggatcttaactactgagcgcaatgctgagccatggagccgggttggccttgtggatcacactgagcctgctgcagactggactggcggagccagagagatgtaacttcaccctggcggagtccaaggcctccagccattctgtgtctatccagtggagaattttgggctcaccctgtaactttagcctcatctatagcagtgacaccctgggggccgcgttgtgccctacctttcggatagacaacaccacatacggatgtaaccttcaagatttacaagcaggaaccatctataacttcaggattatttctctggatgaagagagaacagtggtcttgcaaacagatcctttacctcctgctaggtttggagtcagtaaagagaagacgacttcaaccagcttgcatgtttggtggactccttcttccggaaaagtcacctcatatgaggtgcaattatttgatgaaaataaccaaaagatacagggggttcaaattcaagaaagtacttcatggaatgaatacacttttttcaatctcactgctggtagtaaatacaatattgccatcacagctgtttctggaggaaaacgttctttttcagtttataccaatggatcaacagtgccatctccagtgaaagatattggtatttccacaaaagccaattctctcctgatttcctggtcccatggttctgggaatgtggaacgataccggctgatgctaatggataaagggatcctagttcatggcggtgttgtggacaaacatgctacttcctatgcttttcacgggctgacccctggctacctctacaacctcactgttatgactgaggctgcagggctgcaaaactacaggtggaaactagtcaggacagcccccatggaagtctcaaatctgaaggtgacaaatgatggcagtttgacctctctaaaagtcaaatggcaaagacctcctggaaatgtggattcttacaatatcaccctgtctcacaaagggaccatcaaggaatccagagtattagcaccttggattactgaaactcactttaaagagttagtccccggtcgactttatcaagttactgtcagctgtgtctctggtgaactgtctgctcagaagatggcagtgggcagaacattccccctggctgtcctccagcttcgtgtcaaacatgccaatgaaacctcactgagtatcatgtggcagacccctgtagcagaatgggagaaatacatcatttccctagctgacagagacctcttactgatccacaagtcactctccaaagatgccaaagaattcacttttactgacctggtgcctggacgaaaatacatggctacagtcaccagtattagtggagacttaaaaaattcctcttcagtaaaaggaagaacagtgcctgcccaagtgactgacttgcatgtggccaaccaaggaatgaccagtagtctgtttactaactggacccaggcacaaggagacgtagaattttaccaagtcttactgatccatgaaaatgtggtcattaaaaatgaaagcatctccagtgagaccagcagatacagcttccactctctcaagtccggcagcctgtactccgtggtggtaacaacagtgagtggagggatctcttcccgacaagtggttgtggagggaagaacagtcccttccagtgtgagtggagtaacggtgaacaattccggtcgtaatgactacctcagcgtttcctggctgctggcgcccggagatgtggataactatgaggtaacattgtctcatgacggcaaggtggttcagtcccttgtcattgccaagtctgtcagagaatgttccttcagctccctcaccccaggccgcctctacaccgtgaccataactacaaggagtggcaagtatgaaaatcactccttcagccaagagcggacagtgcctgacaaagtccagggagtcagtgttagcaactcagccaggagtgactatttaagggtatcctgggtgcatgccactggagactttgatcactatgaagtcaccattaaaaacaaaaacaacttcattcaaactaaaagcattcccaagtcagaaaacgaatgtgtatttgttcagctagtccctggacggttgtacagtgtcactgttactacaaaaagtggacaatatgaagccaatgaacaagggaatgggagaacaattccagagcctgttaaggatctaacattgcgcaacaggagcactgaggacttgcatgtgacttggtcaggagctaatggggatgtcgaccaatatgagatccagctgctcttcaatgacatgaaagtatttcctccttttcaccttgtaaataccgcaaccgagtatcgatttacttccctaacaccaggccgccaatacaaaattcttgtcttgacgattagcggggatgtacagcagtcagccttcattgagggcttcacagttcctagtgctgtcaaaaatattcacatttctcccaatggagcaacagatagcctgacggtgaactggactcctggtgggggagacgttgattcctacacggtgtcggcattcaggcacagtcaaaaggttgactctcagactattcccaagcacgtctttgagcacacgttccacagactggaggccggggagcagtaccagatcatgattgcctcagtcagcgggtccctgaagaatcagataaatgtggttgggcggacagttccagcatctgtccaaggagtaattgcagacaatgcatacagcagttattccttaatagtaagttggcaaaaagctgctggtgtggcagaaagatatgatatcctgcttctaactgaaaatggaatccttctgcgcaacacatcagagccagccaccactaagcaacacaaatttgaagatctaacaccaggcaagaaatacaagatacagatcctaactgtcagtggaggcctctttagcaaggaagcccagactgaaggccgaacagtcccagcagctgtcaccgacctgaggatcacagagaactccaccaggcacctgtccttccgctggaccgcctcagagggggagctcagctggtacaacatctttttgtacaacccagatgggaatctccaggagagagctcaagttgacccactagtccagagcttctctttccagaacttgctacaaggcagaatgtacaagatggtgattgtaactcacagtggggagctgtctaatgagtctttcatatttggtagaacagtcccagcctctgtgagtcatctcagggggtccaatcggaacacgacagacagcctttggttcaactggagtccagcctctggggactttgacttttatgagctgattctctataatcccaatggcacaaagaaggaaaactggaaagacaaggacctgacggagtggcggtttcaaggccttgttcctggaaggaagtacgtgctgtgggtggtaactcacagtggagatctcagcaataaagtcacagcggagagcagaacagctccaagtcctcccagtcttatgtcatttgctgacattgcaaacacatccttggccatcacgtggaaagggcccccagactggacagactacaacgactttgagctgcagtggttgcccagagatgcacttactgtcttcaacccctacaacaacagaaaatcagaaggacgcattgtgtatggtcttcgtccagggagatcctatcaattcaacgtcaagactgtcagtggtgattcctggaaaacttacagcaaaccaatttttggatctgtgaggacaaagcctgacaagatacaaaacctgcattgccggcctcagaactccacggccattgcctgttcttggatccctcctgattctgactttgatggttatagtattgaatgccggaaaatggacacccaagaagttgagttttccagaaagctggagaaagaaaaatctctgctcaacatcatgatgctagtgccccataagaggtacctggtgtccatcaaagtgcagtcggccggcatgaccagcgaggtggttgaagacagcactatcacaatgatagaccgcccccctcctccacccccacacattcgtgtgaatgaaaaggatgtgctaattagcaagtcttccatcaactttactgtcaactgcagctggttcagcgacaccaatggagctgtgaaatacttcacagtggtggtgagagaggctgatggcagtgatgagctgaagccagaacagcagcaccctctcccttcctacctggagtacaggcacaatgcctccattcgggtgtatcagactaattattttgccagcaaatgtgccgaaaatcctaacagcaactccaagagttttaacattaagcttggagcagagatggagagcctaggtggaaaatgcgatcccactcagcaaaaattctgtgatggaccactgaagccacacactgcctacagaatcagcattcgagcttttacacagctctttgatgaggacctgaaggaattcacaaagccactctattcagacacatttttttctttacccatcactactgaatcagagcccttgtttggagctattgaaggtgtgagtgctggtctgtttttaattggcatgctagtggctgttgttgccttattgatctgcagacagaaagtgagccatggtcgagaaagaccctctgcccgtctgagcattcgtagggatcgaccattatctgtccacttaaacctgggccagaaaggtaaccggaaaacttcttgtccaataaaaataaatcagtttgaagggcatttcatgaagctacaggctgactccaactaccttctatccaaggaatacgaggagttaaaagacgtgggccgaaaccagtcatgtgacattgcactcttgccggagaatagagggaaaaatcgatacaacaatatattgccctatgatgccacgcgagtgaagctctccaatgtagatgatgatccttgctctgactacatcaatgccagctacatccctggcaacaacttcagaagagaatacattgtcactcagggaccgcttcctggcaccaaggatgacttctggaaaatggtgtgggaacaaaacgttcacaacatcgtcatggtgacccagtgtgttgagaagggccgagtaaagtgtgatcattactggccagcggaccaggattccctctactatggggacctcatcctgcagatgctctcagagtccgtcctgcctgagtggaccatccgggagtttaagatatgcggtgaggaacagcttgatgcacacagactcatccgccactttcactatacggtgtggccagaccatggagtcccagaaaccacccagtctctgatccagtttgtgagaactgtcagggactacatcaacagaagcccgggtgctgggcccactgtggtgcactgcagtgctggtgtgggtaggactggaacctttattgcattggaccgaatcctccagcagttagactccaaagactctgtggacatttatggagcagtgcacgacctaagacttcacagggttcacatggtccagactgagtgtcagtatgtctacctacatcagtgtgtaagagatgtcctcagagcaagaaagctacggagtgaacaagaaaaccccttgtttccaatctatgaaaatgtgaatccagagtatcacagagatccagtctattcaaggcattgagaatgtacctgaagagctcctggataaaaattattcactgtgtgatttgtttttaaaaacttgcttcatgccctacagaggtgcca

SEQ ID NO: 24665 - DNA, 1292 bp, Homo sapiens
  source 1..1292: mol_type = unassigned DNA
aaattctctttctaaaagccaggctgacctgctgctgcaagggtggggctgagaagtctggaaacctggagacagaggatgtcacaggagtcacacatgtgcagaaggtctgggggcagtgagcagccccacaggcattgctcccctggattgtcaggcagggaaactgaggcagaagacctgagaacacatgcaaggctgcatccagcttcaagttggtgctgcttcttccttggaggacaggcccggcagcccagcctcctccagagagactggggagggtctggtgtggaccaggggtcctgcagcagggaggggcaggtggggtatgtgggcaggaagcggaagcctgggccacccttcactgcagacgagcactgagctcacttctcgctcgacacagccagagctggaggtgggtgcccggcacggaggggcctgcggaccaatggctctgccctgcaccttagggctcgggatgctgctggccctgccaggggccttgggctcgggtggcagcgcggaggacagcgtgggctccagctctgtcaccgttgtcctgctgctgctgctgctcctactgctggccactggcctagcactggcctggcgccgcctcagccgtgactcagggggctactaccacccggcccgcctaggtgccgcgctgtggggccgcacgcggcgcctgctctgggccagccccccaggtcgctggctgcaggcccgagctgagctggggtccacagacaatgaccttgagcgacaggaggatgagcaggacacagactatgaccacgtcgcggatggtggcctgcaggctgaccctggggaaggcgagcagcaatgtggagaggcgtccagcccagagcaggtccccgtgcgggctgaggaagccagagacagtgacacggagggcgacctggtcctcggctccccaggaccagcgagcgcagggggcagtgctgaggccctgctgagtgacctgcacgcctttgctggcagcgcagcctgggatgacagcgccagggcagctgggggccagggcctccatgtcaccgcactgtagaggccggtcttggtgtcccatccctgtcacagccgctcactccccgtgcctctgcttcccaagatgccatggctggactggacccccagcccacatgaccatgcctcagactgtcaccccctaccagttcccaagtccatgtgtaccccgctcaccacgggaacggccccccccaaccacaggcatcaggcaaccatttgaaataaaactccttcagcctgtg

SEQ ID NO: 24666 - DNA, 7882 bp, Homo sapiens
  source 1..7882: mol_type = unassigned DNA
gctctgaaagtgttccagctgaaatttcagatcggacagactcgctgcggctccggaggcagtgattccaagctgctcgcgcacgctgctgccaagctgcaggatggtgcacgtagccaggctgctgctgctgctcctcactttcttcctccgcacggatgctgagacacctccaaggtttacacgaacacccgttgatcagacaggggtctctggcggagttgcctctttcatctgccaagctacgggagacccaagacctaaaattgtctggaacaaaaaaggaaagaaagtcagcaatcagagatttgaggtaatagagtttgacgatgggtctggatcagttctcagaatacaacccttacggactccgagggatgaggccatttatgaatgtgtggcctcaaataatgtgggagaaataagtgtatccaccagactcacagttttgcgggaagatcaaattcccaggggcttccctaccattgacatgggcccacagttgaaggtggttgagcgtactcgcacggccaccatgctttgtgcagccagtggtaatccggatccagaaatcacttggtttaaagatttcttacctgtggacacaagcaacaacaatggtcgtattaagcagttacgatcagtttctgtctgtgcaacttaccatacaggagcccttcagattgagcagagtgaagagtctgaccaaggaaaatatgagtgtgttgccaccaacagcgcgggcactcgctattccgctcctgccaatttatatgtcagagtaaatagaaaagttcgccgtgtcccaccaagattctctatcccacccactaatcatgaaatcatgccaggcggaagcgttaatatcacctgtgtggccgtggggtcaccaatgccttatgtaaagtggatgttgggggcagaagatctgacacctgaagatgatatgccaataggaagaaatgtgctagaactgaatgatgtaagacagtcagcaaattacacctgtgttgctatgtcaacactgggtgtcattgaagcaatagcacagatcactgtcaaagccttacccaaacctccaggaactcctgtagtgaccgagagcacagctacaagcatcacactgacgtgggactctgggaaccctgagcctgtttcttattacataattcagcataaacctaaaaactctgaggaactttacaaagaaattgatggggtggcgaccacacgctacagtgtcgctggactaagtccctactcggattatgaattcagggttgttgctgtcaataacattgggcgggggcctcccagcgaacctgtgctaacacaaacctcagagcaagcaccatccagtgccccgagggatgtccaggcacgaatgttgagttcgaccaccattttggtacagtggaaggaacctgaagagccaaatggacagatccaaggatatagagtttattatacaatggatcccactcaacatgtcaacaactggatgaaacacaatgtagctgacagccaaatcactactattggcaacttagtgccccagaaaacatattctgtcaaagtcctggcttttacctcaattggagatggtcccctttcaagtgacatacaagtcatcactcagacaggagtaccagggcagccactaaacttcaaagcagaacctgagtctgaaacaagtattttgctctcttggacacctccacgttcagataccattgccaactatgaactggtctacaaagatggggagcatggagaggagcaacgaattaccattgagccagggacatcatataggctgcaaggactgaaaccaaacagcttatactatttccgtctggctgcacgctcccctcaaggcctgggtgcttctactgcagaaatatcagctagaaccatgcagtcaagtaaaggttactacataataattgtgcctttgaagaaatctcgcgggaaatttatcaagccatgggagagtccagatgaaatggaattagatgagctgcttaaggagatatctaggaagcgcagaagcatccgttatgggagagaagttgaattaaagccatatattgccgctcactttgatgtccttcccactgagttcaccctgggggatgacaagcattatggtggatttacaaacaagcaactccaaagtggtcaagaatatgtcttctttgtgttagcagtaatggaacatgcagagtctaagatgtatgcaaccagcccttactccgaccccgtggtgtcaatggatctggatccgcagccaatcacggatgaagaagaaggcttgatctgggttgtaggtcctgtccttgcagtggtctttatcatctgcattgtcattgctattcttctttataaaaggaagagggcagagtccgactctagaaaaagcagcataccgaacaataaggagatcccttcacaccacccaacagaccctgtagaactgaggcgccttaactttcaaacaccgggtatggctagccatcctccaatacccatcttggaacttgcagaccacattgaaagattgaaagcaaatgacaacttgaagttttcccaggaatatgagtcaattgaccctggccagcagttcacttgggaacattcaaacttggaagtaaacaaaccaaagaatagatacgcgaatgtaatcgcatatgatcattcccgggttctcctatcagctatagaagggatcccaggaagtgactatgtgaatgccaactacatagatgggtataggaagcaaaatgcctatattgcaacacagggatctctccccgaaacatttggggacttttggagaatgatatgggaacaacggagtgccacagttgtcatgatgacaaaactagaagaaagatcaagggtgaagtgtgaccagtattggcctagcagaggcacagaaacccacggactcgttcaagtaacgctgcttgatactgtggagctggccacatattgtgttcgaacatttgcactttacaagaatggttcaagtgagaagagagaagtgagacaattccagttcaccgcctggcctgatcatggtgttccagaacaccctacaccttttctagctttcttacgtagagtcaaaacctgtaaccctcccgatgctggtccgatggttgtgcactgcagtgcgggagttggccggactggttgcttcatcgtcatagatgccatgttagaaagaataaagcatgaaaaaactgtagatatttatggccatgtaactttaatgagagcccagaggaactatatggttcaaacagaagaccaatacatctttatccatgatgcactgttagaagcagtgacttgtggaaataccgaagtgccagctagaaacttgtatgcctacattcagaagctgacacaaatagaaacgggagagaatgtcacaggaatggagctcgaatttaagcgtctagccagctcaaaagctcacacctcaaggtttatcagtgccaatcttccatgtaataaattcaaaaatcgccttgttaatattatgccatatgaatccacaagggtatgcctgcagcctatccgtggagtagaaggatctgattacatcaatgccagttttattgatggatacagacaacagaaagcctacatcgctacccaggggcccttggcagagaccactgaagacttctggcggatgctctgggaacacaattccaccatagttgtgatgctcaccaagctgcgtgaaatgggcagagagaaatgtcaccaatactggccagcagaacggtctgcaagataccagtactttgttgtagatcccatggctgagtacaacatgccacagtatatcctaagggaattcaaggtcacagatgccagggacggccagtcccgaacagtaaggcagttccagttcactgactggccagagcaaggagtgccaaagtccggagaaggatttattgacttcatcggccaagtccataaaacaaaagaacagtttggccaagatggacccatttcagtccattgcagcgcgggcgttggaagaactggagtcttcataacgctaagcattgttttggaaagaatgagatatgaaggagttgtagatatcttccagactgtcaaaatgttaagaacacaacgaccagctatggtacagacagaggatcaatatcagttttcctatcgtgccgcactagagtacctgggcagctttgaccactatgcaacgtagaaacccctgacccattctggatttttactacaggcccttcaatatccatggagtctcttctgagccatacagggcacttgagaagtccttcttaacttctagctaacaactacttagtgggactattacacacaaaacaaattaaaaacaaattattccaggtggaccaagaattcacagtttaataatctaacctgaaaaataatgaagagaatcctgactgatgaggcatctgaaggattttatttacagatacctcaaggattcaaaatcaagggaagaagaaatcacagcaaagaaccaccatcttattcaggattgcttgaaaggtgcaaggagaaattgccagaatgctgcagttcagcacaagatatgtgctggtgtggcttctcacaatgaaacggactctgctttgacatcgccccttcccaccatactgctcataataacattttagggggaaaggggagggaatgtttaaaaagaaagtccttgatttagttttttagtattgtaaagatactgctgacctgtgcttcatttctaactgtgtaaacttttttttaacaaaatgtatcattcgataaagtgaattttaaaaaagttacataactcttcatttttttatttccaaatcgtaggtttttttaagctgtagaactgttatctgtaatatcttgctgtagaaatatcaaatcatttgaaaatttgcacatttttgtgcaaaactcaatctacagtatcagtctcgtcagatatattaattttacacttcagttttgattggtgagaaagtacccattctcttcaaataatcaaagataattattattttgttttgtttttggaatcaacagggaggcgcaaagtataaagttgctgctaacatatatacatatatatccatattttataagggtgtctatgtatatatagacagtgtgtccacacaaaaaatagatacagttatcagtcagtcagttcttccatgatttagtttttttaaacgtagaaaagctattgtaaacatctctttccatttattcttaattttttgacatattggtatttctttaaagggaaatgaggaatgcacatcagtgattgattgtcaaacctcaccccctgatttcctacctaatctacccccacctaaccaatcaatcacatccacaaattgttttgtttgtttgttagtcaggcttccaacaaagttcaatatttctaacactctagtgcaataaaaattattattaaatagctaagaggtgtgcatgtgggaaaggtcagtgcatatccctttaggaggggagaatgttgtaatatatcagctatcgagttgtttaaaaaaagtgtattcaatcgtatattgtctatagtatgtgctatgaaatttgcatttatgatatgtaacaggggcaaagccaaattcatgttactctgttcagtcagaaacattttgtggcatacagcattcctgggaagtgctgtactttgtttcgttttggttttagttttgcatttagagtgccttataattgatgcctattttaatagcatttctttttagcttttggttcgtatttccattcactgttcgtatctgttactttctattaaagcattatctgtttaccacatgtacaaaaactctttgaataatatgcattcctagttttcagccaagtcggggatgttagtgattgtaccagcccaaagcacttggataatcagggcccttcttccttttataatcaatcatcaacatcagaaaaagctacttgttttatttatattcccttccaaatccgctctggaacatgcagtaactgcaccaaacttattttagtaacaaatatcattggcaactttggaatatatttgatattccattaggatttttctaaaaggggaaataaactatatatatatatgtatcttacccccaattcttccaacagaatttctataggaagccatggatgatggcataagtttgccacatattacatgattttaaataatcctcaaaatacccaaggaactcttaaagagttttggtatgagtatactactttggtttaattttagcttcatggatgttctgcatggaaggatttttgttttccacattttcccattgctagcagagtgaaatccaagagaccaaacatttgcaagcattgtatttgagcacttttgtaaaaaacaaagaaaaagaaaaaaaagaaaatatatataatactaaaaaaaagtatctagaaggctacctcagaatgagactctctaacctacatcagaaccagagaagaatgtgcactatgtgggtctgttatcattattttcttttagtttgtatctttttggagatttatccaagtgccagattactcagtgctataattttcttttagttaaacaaagggggtcagacagacattgcatcatccagacatgccttgttggacatgtagaatccgatggagcactgcacaccagaatgattggccaatgagcagcttctctccctgaaacaataactgcccatttggcaaagggaaagatgacaataatcagaagaagaaaatgaatgggatgcataccatagacgaacgaggcggagactattgcgggaatcttactgttcaggagctgttcctagaactaactcccttactgtcattgatgtgcattccactctgtgcttttctgtacaaccattcaagttttaatttcccaggtgaaccatctttatctgccattaccacaagctttcaagtttccagttattttcatcatcataaccagtacggtgctattatttacctatgtacgtgtagttatgtataattttgtaattagttacaatggtaaaaaaaatcaaaatatataaaaagtgatttgtacagaactttattttagctcttttttaaaaatgatttgcatggttagaaaacggcgaggacagccaggggagggaagggcctctagggaactttgcactttctatacctttgtactatgcactgccctattgattctacacccaataatgatattacttgaacccatctgtaagaaactgcttcggaaattcatttgtgtgtatgtaaataacacaacatagaaacaggaagggaaaaaagtctgcagtaatgcacgtattttttttctttcctgtttattttcggttttgctttaagtccttttatttttaattccctttttgtttttctttttgggttttggttccttttgggtttatgggtgccctgatactccagcagagatcagaaggctacagatccattctatccatccgttatgtggctttgccatcccagcttggagtgtctttacaaagataataacagttgtgttctttgctctcgttttggatgcatagactgaaaaattaaaacaaataacttgtaaaatggcttgttaaaaaatacaattacctctaattagtagtacgcgtaaatgttttacagaatgaaaggcgtgctttttattttcttacttcgttacattggtggcgaaagaagtctgtatgaaaatcagttctttgctgacacaagttccatttgttacaaatgaattctaataaaaatgtcagtgttatgc

SEQ ID NO: 24667 - DNA, 8251 bp, Homo sapiens
  source 1..8251: mol_type = unassigned DNA
gctctgaaagtgttccagctgaaatttcagatcggacagactcgctgcggctccggaggcagtgattccaagctgctcgcgcacgctgctgccaagctgcaggatggtgcacgtagccaggctgctgctgctgctcctcactttcttcctccgcacggatgctgagacacctccaaggtttacacgaacacccgttgatcagacaggggtctctggcggagttgcctctttcatctgccaagctacgggagacccaagacctaaaattgtctggaacaaaaaaggaaagaaagtcagcaatcagagatttgaggtaatagagtttgacgatgggtctggatcagttctcagaatacaacccttacggactccgagggatgaggccatttatgaatgtgtggcctcaaataatgtgggagaaataagtgtatccaccagactcacagttttgcgggaagatcaaattcccaggggcttccctaccattgacatgggcccacagttgaaggtggttgagcgtactcgcacggccaccatgctttgtgcagccagtggtaatccggatccagaaatcacttggtttaaagatttcttacctgtggacacaagcaacaacaatggtcgtattaagcagttacgatcagaatctattggtggtacaccaataagaggagcccttcagattgagcagagtgaagagtctgaccaaggaaaatatgagtgtgttgccaccaacagcgcgggcactcgctattccgctcctgccaatttatatgtcagagagctgcgagaagttcgccgtgtcccaccaagattctctatcccacccactaatcatgaaatcatgccaggcggaagcgttaatatcacctgtgtggccgtggggtcaccaatgccttatgtaaagtggatgttgggggcagaagatctgacacctgaagatgatatgccaataggaagaaatgtgctagaactgaatgatgtaagacagtcagcaaattacacctgtgttgctatgtcaacactgggtgtcattgaagcaatagcacagatcactgtcaaagccttacccaaacctccaggaactcctgtagtgaccgagagcacagctacaagcatcacactgacgtgggactctgggaaccctgagcctgtttcttattacataattcagcataaacctaaaaactctgaggaactttacaaagaaattgatggggtggcgaccacacgctacagtgtcgctggactaagtccctactcggattatgaattcagggttgttgctgtcaataacattgggcgggggcctcccagcgaacctgtgctaacacaaacctcagagcaagcaccatccagtgccccgagggatgtccaggcacgaatgttgagttcgaccaccattttggtacagtggaaggaacctgaagagccaaatggacagatccaaggatatagagtttattatacaatggatcccactcaacatgtcaacaactggatgaaacacaatgtagctgacagccaaatcactactattggcaacttagtgccccagaaaacatattctgtcaaagtcctggcttttacctcaattggagatggtcccctttcaagtgacatacaagtcatcactcagacaggagtaccagggcagccactaaacttcaaagcagaacctgagtctgaaacaagtattttgctctcttggacacctccacgttcagataccattgccaactatgaactggtctacaaagatggggagcatggagaggagcaacgaattaccattgagccagggacatcatataggctgcaaggactgaaaccaaacagcttatactatttccgtctggctgcacgctcccctcaaggcctgggtgcttctactgcagaaatatcagctagaaccatgcagtcaatgtttgcaaaaaattttcatgtcaaagcagtaatgaagacttccgtgttgctgtcttgggagattccagagaattataactccgccatgcctttcaaaattctttatgatgatgggaaaatggtagaagaagtggatggccgagccacacagaagttaattgtcaacctgaagcctgagaaatcatattcatttgtgctgacaaatcgtggaaacagtgctggtgggctgcagcacagggtcacggcaaagactgcaccagatgtattacgtaccaagcctgccttcattgggaagaccaacttggatggcatgattactgtgcaactgcctgaagtacctgcaaatgagaatataaaaggttactacataataattgtgcctttgaagaaatctcgcgggaaatttatcaagccatgggagagtccagatgaaatggaattagatgagctgcttaaggagatatctaggaagcgcagaagcatccgttatgggagagaagttgaattaaagccatatattgccgctcactttgatgtccttcccactgagttcaccctgggggatgacaagcattatggtggatttacaaacaagcaactccaaagtggtcaagaatatgtcttctttgtgttagcagtaatggaacatgcagagtctaagatgtatgcaaccagcccttactccgaccccgtggtgtcaatggatctggatccgcagccaatcacggatgaagaagaaggcttgatctgggttgtaggtcctgtccttgcagtggtctttatcatctgcattgtcattgctattcttctttataaaagcagtaaacccgacaggaagagggcagagtccgactctagaaaaagcagcataccgaacaataaggagatcccttcacaccacccaacagaccctgtagaactgaggcgccttaactttcaaacaccgggtatggctagccatcctccaatacccatcttggaacttgcagaccacattgaaagattgaaagcaaatgacaacttgaagttttcccaggaatatgagtcaattgaccctggccagcagttcacttgggaacattcaaacttggaagtaaacaaaccaaagaatagatacgcgaatgtaatcgcatatgatcattcccgggttctcctatcagctatagaagggatcccaggaagtgactatgtgaatgccaactacatagatgggtataggaagcaaaatgcctatattgcaacacagggatctctccccgaaacatttggggacttttggagaatgatatgggaacaacggagtgccacagttgtcatgatgacaaaactagaagaaagatcaagggtgaagtgtgaccagtattggcctagcagaggcacagaaacccacggactcgttcaagtaacgctgcttgatactgtggagctggccacatattgtgttcgaacatttgcactttacaagaatggttcaagtgagaagagagaagtgagacaattccagttcaccgcctggcctgatcatggtgttccagaacaccctacaccttttctagctttcttacgtagagtcaaaacctgtaaccctcccgatgctggtccgatggttgtgcactgcagtgcgggagttggccggactggttgcttcatcgtcatagatgccatgttagaaagaataaagcatgaaaaaactgtagatatttatggccatgtaactttaatgagagcccagaggaactatatggttcaaacagaagaccaatacatctttatccatgatgcactgttagaagcagtgacttgtggaaataccgaagtgccagctagaaacttgtatgcctacattcagaagctgacacaaatagaaacgggagagaatgtcacaggaatggagctcgaatttaagcgtctagccagctcaaaagctcacacctcaaggtttatcagtgccaatcttccatgtaataaattcaaaaatcgccttgttaatattatgccatatgaatccacaagggtatgcctgcagcctatccgtggagtagaaggatctgattacatcaatgccagttttattgatggatacagacaacagaaagcctacatcgctacccaggggcccttggcagagaccactgaagacttctggcggatgctctgggaacacaattccaccatagttgtgatgctcaccaagctgcgtgaaatgggcagagagaaatgtcaccaatactggccagcagaacggtctgcaagataccagtactttgttgtagatcccatggctgagtacaacatgccacagtatatcctaagggaattcaaggtcacagatgccagggacggccagtcccgaacagtaaggcagttccagttcactgactggccagagcaaggagtgccaaagtccggagaaggatttattgacttcatcggccaagtccataaaacaaaagaacagtttggccaagatggacccatttcagtccattgcagcgcgggcgttggaagaactggagtcttcataacgctaagcattgttttggaaagaatgagatatgaaggagttgtagatatcttccagactgtcaaaatgttaagaacacaacgaccagctatggtacagacagaggatcaatatcagttttcctatcgtgccgcactagagtacctgggcagctttgaccactatgcaacgtagaaacccctgacccattctggatttttactacaggcccttcaatatccatggagtctcttctgagccatacagggcacttgagaagtccttcttaacttctagctaacaactacttagtgggactattacacacaaaacaaattaaaaacaaattattccaggtggaccaagaattcacagtttaataatctaacctgaaaaataatgaagagaatcctgactgatgaggcatctgaaggattttatttacagatacctcaaggattcaaaatcaagggaagaagaaatcacagcaaagaaccaccatcttattcaggattgcttgaaaggtgcaaggagaaattgccagaatgctgcagttcagcacaagatatgtgctggtgtggcttctcacaatgaaacggactctgctttgacatcgccccttcccaccatactgctcataataacattttagggggaaaggggagggaatgtttaaaaagaaagtccttgatttagttttttagtattgtaaagatactgctgacctgtgcttcatttctaactgtgtaaacttttttttaacaaaatgtatcattcgataaagtgaattttaaaaaagttacataactcttcatttttttatttccaaatcgtaggtttttttaagctgtagaactgttatctgtaatatcttgctgtagaaatatcaaatcatttgaaaatttgcacatttttgtgcaaaactcaatctacagtatcagtctcgtcagatatattaattttacacttcagttttgattggtgagaaagtacccattctcttcaaataatcaaagataattattattttgttttgtttttggaatcaacagggaggcgcaaagtataaagttgctgctaacatatatacatatatatccatattttataagggtgtctatgtatatatagacagtgtgtccacacaaaaaatagatacagttatcagtcagtcagttcttccatgatttagtttttttaaacgtagaaaagctattgtaaacatctctttccatttattcttaattttttgacatattggtatttctttaaagggaaatgaggaatgcacatcagtgattgattgtcaaacctcaccccctgatttcctacctaatctacccccacctaaccaatcaatcacatccacaaattgttttgtttgtttgttagtcaggcttccaacaaagttcaatatttctaacactctagtgcaataaaaattattattaaatagctaagaggtgtgcatgtgggaaaggtcagtgcatatccctttaggaggggagaatgttgtaatatatcagctatcgagttgtttaaaaaaagtgtattcaatcgtatattgtctatagtatgtgctatgaaatttgcatttatgatatgtaacaggggcaaagccaaattcatgttactctgttcagtcagaaacattttgtggcatacagcattcctgggaagtgctgtactttgtttcgttttggttttagttttgcatttagagtgccttataattgatgcctattttaatagcatttctttttagcttttggttcgtatttccattcactgttcgtatctgttactttctattaaagcattatctgtttaccacatgtacaaaaactctttgaataatatgcattcctagttttcagccaagtcggggatgttagtgattgtaccagcccaaagcacttggataatcagggcccttcttccttttataatcaatcatcaacatcagaaaaagctacttgttttatttatattcccttccaaatccgctctggaacatgcagtaactgcaccaaacttattttagtaacaaatatcattggcaactttggaatatatttgatattccattaggatttttctaaaaggggaaataaactatatatatatatgtatcttacccccaattcttccaacagaatttctataggaagccatggatgatggcataagtttgccacatattacatgattttaaataatcctcaaaatacccaaggaactcttaaagagttttggtatgagtatactactttggtttaattttagcttcatggatgttctgcatggaaggatttttgttttccacattttcccattgctagcagagtgaaatccaagagaccaaacatttgcaagcattgtatttgagcacttttgtaaaaaacaaagaaaaagaaaaaaaagaaaatatatataatactaaaaaaaagtatctagaaggctacctcagaatgagactctctaacctacatcagaaccagagaagaatgtgcactatgtgggtctgttatcattattttcttttagtttgtatctttttggagatttatccaagtgccagattactcagtgctataattttcttttagttaaacaaagggggtcagacagacattgcatcatccagacatgccttgttggacatgtagaatccgatggagcactgcacaccagaatgattggccaatgagcagcttctctccctgaaacaataactgcccatttggcaaagggaaagatgacaataatcagaagaagaaaatgaatgggatgcataccatagacgaacgaggcggagactattgcgggaatcttactgttcaggagctgttcctagaactaactcccttactgtcattgatgtgcattccactctgtgcttttctgtacaaccattcaagttttaatttcccaggtgaaccatctttatctgccattaccacaagctttcaagtttccagttattttcatcatcataaccagtacggtgctattatttacctatgtacgtgtagttatgtataattttgtaattagttacaatggtaaaaaaaatcaaaatatataaaaagtgatttgtacagaactttattttagctcttttttaaaaatgatttgcatggttagaaaacggcgaggacagccaggggagggaagggcctctagggaactttgcactttctatacctttgtactatgcactgccctattgattctacacccaataatgatattacttgaacccatctgtaagaaactgcttcggaaattcatttgtgtgtatgtaaataacacaacatagaaacaggaagggaaaaaagtctgcagtaatgcacgtattttttttctttcctgtttattttcggttttgctttaagtccttttatttttaattccctttttgtttttctttttgggttttggttccttttgggtttatgggtgccctgatactccagcagagatcagaaggctacagatccattctatccatccgttatgtggctttgccatcccagcttggagtgtctttacaaagataataacagttgtgttctttgctctcgttttggatgcatagactgaaaaattaaaacaaataacttgtaaaatggcttgttaaaaaatacaattacctctaattagtagtacgcgtaaatgttttacagaatgaaaggcgtgctttttattttcttacttcgttacattggtggcgaaagaagtctgtatgaaaatcagttctttgctgacacaagttccatttgttacaaatgaattctaataaaaatgtcagtgttatgc

SEQ ID NO: 24668 - DNA, 9472 bp, Homo sapiens
  source 1..9472: mol_type = unassigned DNA
caggctctgaaagtgttccagctgaaatttcagatcggacagactcgctgcggctccggaggcagtgattccaagctgctcgcgcacgctgctgccaagctgcaggatggtgcacgtagccaggctgctgctgctgctcctcactttcttcctccgcacggatgctgagacacctccaaggtttacacgaacacccgttgatcagacaggggtctctggcggagttgcctctttcatctgccaagctacgggagacccaagacctaaaattgtctggaacaaaaaaggaaagaaagtcagcaatcagagatttgaggtaatagagtttgacgatgggtctggatcagttctcagaatacaacccttacggactccgagggatgaggccatttatgaatgtgtggcctcaaataatgtgggagaaataagtgtatccaccagactcacagttttgcgggaagatcaaattcccaggggcttccctaccattgacatgggcccacagttgaaggtggttgagcgtactcgcacggccaccatgctttgtgcagccagtggtaatccggatccagaaatcacttggtttaaagatttcttacctgtggacacaagcaacaacaatggtcgtattaagcagttacgatcagaatctattggtggtacaccaataagaggagcccttcagattgagcagagtgaagagtctgaccaaggaaaatatgagtgtgttgccaccaacagcgcgggcactcgctattccgctcctgccaatttatatgtcagagagctgcgagaagttcgccgtgtcccaccaagattctctatcccacccactaatcatgaaatcatgccaggcggaagcgttaatatcacctgtgtggccgtggggtcaccaatgccttatgtaaagtggatgttgggggcagaagatctgacacctgaagatgatatgccaataggaagaaatgtgctagaactgaatgatgtaagacagtcagcaaattacacctgtgttgctatgtcaacactgggtgtcattgaagcaatagcacagatcactgtcaaagccttacccaaacctccaggaactcctgtagtgaccgagagcacagctacaagcatcacactgacgtgggactctgggaaccctgagcctgtttcttattacataattcagcataaacctaaaaactctgaggaactttacaaagaaattgatggggtggcgaccacacgctacagtgtcgctggactaagtccctactcggattatgaattcagggttgttgctgtcaataacattgggcgggggcctcccagcgaacctgtgctaacacaaacctcagagcaagcaccatccagtgccccgagggatgtccaggcacgaatgttgagttcgaccaccattttggtacagtggaaggaacctgaagagccaaatggacagatccaaggatatagagtttattatacaatggatcccactcaacatgtcaacaactggatgaaacacaatgtagctgacagccaaatcactactattggcaacttagtgccccagaaaacatattctgtcaaagtcctggcttttacctcaattggagatggtcccctttcaagtgacatacaagtcatcactcagacaggagtaccagggcagccactaaacttcaaagcagaacctgagtctgaaacaagtattttgctctcttggacacctccacgttcagataccattgccaactatgaactggtctacaaagatggggagcatggagaggagcaacgaattaccattgagccagggacatcatataggctgcaaggactgaaaccaaacagcttatactatttccgtctggctgcacgctcccctcaaggcctgggtgcttctactgcagaaatatcagctagaaccatgcagtcaaagccgtcagctcctcctcaagacattagttgcaccagcccaagttccactagtattttggtaagttggcaacctccaccagtggaaaaacagaatggcattatcactgaatactccatcaagtacactgcagtggatggggaagatgacaagcctcacgagattttgggaattccttcggacactaccaaataccttttggaacagctggaaaaatggactgaataccggatcactgtgacagcccatacagatgtcggccctggccctgagagcttgtccgtgttgattcgaaccaatgaagatgttcctagtggtcctcctcgcaaagtcgaggtagaggctgtcaactcaacatctgttaaagtctcatggcgctcacccgtgcccaataaacagcatggccagataagaggatatcaggtgcattatgtgaggatggaaaatggtgagcccaagggccagcccatgctgaaagatgtcatgctggctgatgcacagtgggaatttgatgatactactgaacatgacatgatcatttctgggctccagcctgaaacttcctactccctcaccgtcacagcctacacaaccaaaggagatggtgctcgcagcaagcccaaactggtgtccaccactggggcagttccagggaaacctcggcttgtgattaaccacactcagatgaatactgctcttattcagtggcaccctccggtggacacatttggacctcttcagggctaccgtctaaaatttggccgcaaggatatggagccacttactactcttgagttctctgaaaaagaagatcactttacagctacagacatccacaagggagcatcatacgtcttcaggctctcagccagaaacaaagtgggctttggggaggagatggtgaaggagatttccattccagaagaagtaccaactggattccctcaaaaccttcactcagaaggcaccacttcaacctccgtccagttatcttggcaaccacctgtcctggcagagagaaatggcattatcaccaagtatacccttctttatagggatatcaacatcccccttctcccgatggagcagcttattgttccagctgacaccactatgacactcactggcttaaaaccagataccacatacgatgtaaaagtacgtgctcatacgagcaaagggcccgggccatatagtcccagtgtccagttcaggacactgcctgtggatcaagtgtttgcaaaaaattttcatgtcaaagcagtaatgaagacttccgtgttgctgtcttgggagattccagagaattataactccgccatgcctttcaaaattctttatgatgatgggaaaatggtagaagaagtggatggccgagccacacagaagttaattgtcaacctgaagcctgagaaatcatattcatttgtgctgacaaatcgtggaaacagtgctggtgggctgcagcacagggtcacggcaaagactgcaccagatgtattacgtaccaagcctgccttcattgggaagaccaacttggatggcatgattactgtgcaactgcctgaagtacctgcaaatgagaatataaaaggttactacataataattgtgcctttgaagaaatctcgcgggaaatttatcaagccatgggagagtccagatgaaatggaattagatgagctgcttaaggagatatctaggaagcgcagaagcatccgttatgggagagaagttgaattaaagccatatattgccgctcactttgatgtccttcccactgagttcaccctgggggatgacaagcattatggtggatttacaaacaagcaactccaaagtggtcaagaatatgtcttctttgtgttagcagtaatggaacatgcagagtctaagatgtatgcaaccagcccttactccgaccccgtggtgtcaatggatctggatccgcagccaatcacggatgaagaagaaggcttgatctgggttgtaggtcctgtccttgcagtggtctttatcatctgcattgtcattgctattcttctttataaaaggaagagggcagagtccgactctagaaaaagcagcataccgaacaataaggagatcccttcacaccacccaacagaccctgtagaactgaggcgccttaactttcaaacaccgggtatggctagccatcctccaatacccatcttggaacttgcagaccacattgaaagattgaaagcaaatgacaacttgaagttttcccaggaatatgagtcaattgaccctggccagcagttcacttgggaacattcaaacttggaagtaaacaaaccaaagaatagatacgcgaatgtaatcgcatatgatcattcccgggttctcctatcagctatagaagggatcccaggaagtgactatgtgaatgccaactacatagatgggtataggaagcaaaatgcctatattgcaacacagggatctctccccgaaacatttggggacttttggagaatgatatgggaacaacggagtgccacagttgtcatgatgacaaaactagaagaaagatcaagggtgaagtgtgaccagtattggcctagcagaggcacagaaacccacggactcgttcaagtaacgctgcttgatactgtggagctggccacatattgtgttcgaacatttgcactttacaagaatggttcaagtgagaagagagaagtgagacaattccagttcaccgcctggcctgatcatggtgttccagaacaccctacaccttttctagctttcttacgtagagtcaaaacctgtaaccctcccgatgctggtccgatggttgtgcactgcagtgcgggagttggccggactggttgcttcatcgtcatagatgccatgttagaaagaataaagcatgaaaaaactgtagatatttatggccatgtaactttaatgagagcccagaggaactatatggttcaaacagaagaccaatacatctttatccatgatgcactgttagaagcagtgacttgtggaaataccgaagtgccagctagaaacttgtatgcctacattcagaagctgacacaaatagaaacgggagagaatgtcacaggaatggagctcgaatttaagcgtctagccagctcaaaagctcacacctcaaggtttatcagtgccaatcttccatgtaataaattcaaaaatcgccttgttaatattatgccatatgaatccacaagggtatgcctgcagcctatccgtggagtagaaggatctgattacatcaatgccagttttattgatggatacagacaacagaaagcctacatcgctacccaggggcccttggcagagaccactgaagacttctggcggatgctctgggaacacaattccaccatagttgtgatgctcaccaagctgcgtgaaatgggcagagagaaatgtcaccaatactggccagcagaacggtctgcaagataccagtactttgttgtagatcccatggctgagtacaacatgccacagtatatcctaagggaattcaaggtcacagatgccagggacggccagtcccgaacagtaaggcagttccagttcactgactggccagagcaaggagtgccaaagtccggagaaggatttattgacttcatcggccaagtccataaaacaaaagaacagtttggccaagatggacccatttcagtccattgcagcgcgggcgttggaagaactggagtcttcataacgctaagcattgttttggaaagaatgagatatgaaggagttgtagatatcttccagactgtcaaaatgttaagaacacaacgaccagctatggtacagacagaggatcaatatcagttttcctatcgtgccgcactagagtacctgggcagctttgaccactatgcaacgtagaaacccctgacccattctggatttttactacaggcccttcaatatccatggagtctcttctgagccatacagggcacttgagaagtccttcttaacttctagctaacaactacttagtgggactattacacacaaaacaaattaaaaacaaattattccaggtggaccaagaattcacagtttaataatctaacctgaaaaataatgaagagaatcctgactgatgaggcatctgaaggattttatttacagatacctcaaggattcaaaatcaagggaagaagaaatcacagcaaagaaccaccatcttattcaggattgcttgaaaggtgcaaggagaaattgccagaatgctgcagttcagcacaagatatgtgctggtgtggcttctcacaatgaaacggactctgctttgacatcgccccttcccaccatactgctcataataacattttagggggaaaggggagggaatgtttaaaaagaaagtccttgatttagttttttagtattgtaaagatactgctgacctgtgcttcatttctaactgtgtaaacttttttttaacaaaatgtatcattcgataaagtgaattttaaaaaagttacataactcttcatttttttatttccaaatcgtaggtttttttaagctgtagaactgttatctgtaatatcttgctgtagaaatatcaaatcatttgaaaatttgcacatttttgtgcaaaactcaatctacagtatcagtctcgtcagatatattaattttacacttcagttttgattggtgagaaagtacccattctcttcaaataatcaaagataattattattttgttttgtttttggaatcaacagggaggcgcaaagtataaagttgctgctaacatatatacatatatatccatattttataagggtgtctatgtatatatagacagtgtgtccacacaaaaaatagatacagttatcagtcagtcagttcttccatgatttagtttttttaaacgtagaaaagctattgtaaacatctctttccatttattcttaattttttgacatattggtatttctttaaagggaaatgaggaatgcacatcagtgattgattgtcaaacctcaccccctgatttcctacctaatctacccccacctaaccaatcaatcacatccacaaattgttttgtttgtttgttagtcaggcttccaacaaagttcaatatttctaacactctagtgcaataaaaattattattaaatagctaagaggtgtgcatgtgggaaaggtcagtgcatatccctttaggaggggagaatgttgtaatatatcagctatcgagttgtttaaaaaaagtgtattcaatcgtatattgtctatagtatgtgctatgaaatttgcatttatgatatgtaacaggggcaaagccaaattcatgttactctgttcagtcagaaacattttgtggcatacagcattcctgggaagtgctgtactttgtttcgttttggttttagttttgcatttagagtgccttataattgatgcctattttaatagcatttctttttagcttttggttcgtatttccattcactgttcgtatctgttactttctattaaagcattatctgtttaccacatgtacaaaaactctttgaataatatgcattcctagttttcagccaagtcggggatgttagtgattgtaccagcccaaagcacttggataatcagggcccttcttccttttataatcaatcatcaacatcagaaaaagctacttgttttatttatattcccttccaaatccgctctggaacatgcagtaactgcaccaaacttattttagtaacaaatatcattggcaactttggaatatatttgatattccattaggatttttctaaaaggggaaataaactatatatatatatgtatcttacccccaattcttccaacagaatttctataggaagccatggatgatggcataagtttgccacatattacatgattttaaataatcctcaaaatacccaaggaactcttaaagagttttggtatgagtatactactttggtttaattttagcttcatggatgttctgcatggaaggatttttgttttccacattttcccattgctagcagagtgaaatccaagagaccaaacatttgcaagcattgtatttgagcacttttgtaaaaaacaaagaaaaagaaaaaaaagaaaatatatataatactaaaaaaaagtatctagaaggctacctcagaatgagactctctaacctacatcagaaccagagaagaatgtgcactatgtgggtctgttatcattattttcttttagtttgtatctttttggagatttatccaagtgccagattactcagtgctataattttcttttagttaaacaaagggggtcagacagacattgcatcatccagacatgccttgttggacatgtagaatccgatggagcactgcacaccagaatgattggccaatgagcagcttctctccctgaaacaataactgcccatttggcaaagggaaagatgacaataatcagaagaagaaaatgaatgggatgcataccatagacgaacgaggcggagactattgcgggaatcttactgttcaggagctgttcctagaactaactcccttactgtcattgatgtgcattccactctgtgcttttctgtacaaccattcaagttttaatttcccaggtgaaccatctttatctgccattaccacaagctttcaagtttccagttattttcatcatcataaccagtacggtgctattatttacctatgtacgtgtagttatgtataattttgtaattagttacaatggtaaaaaaaatcaaaatatataaaaagtgatttgtacagaactttattttagctcttttttaaaaatgatttgcatggttagaaaacggcgaggacagccaggggagggaagggcctctagggaactttgcactttctatacctttgtactatgcactgccctattgattctacacccaataatgatattacttgaacccatctgtaagaaactgcttcggaaattcatttgtgtgtatgtaaataacacaacatagaaacaggaagggaaaaaagtctgcagtaatgcacgtattttttttctttcctgtttattttcggttttgctttaagtccttttatttttaattccctttttgtttttctttttgggttttggttccttttgggtttatgggtgccctgatactccagcagagatcagaaggctacagatccattctatccatccgttatgtggctttgccatcccagcttggagtgtctttacaaagataataacagttgtgttctttgctctcgttttggatgcatagactgaaaaattaaaacaaataacttgtaaaatggcttgttaaaaaatacaattacctctaattagtagtacgcgtaaatgttttacagaatgaaaggcgtgctttttattttcttacttcgttacattggtggcgaaagaagtctgtatgaaaatcagttctttgctgacacaagttccatttgttacaaatgaattctaataaaaatgtcagtgttatgc

SEQ ID NO: 24669 - DNA, 9403 bp, Homo sapiens
  source 1..9403: mol_type = unassigned DNA
gctctgaaagtgttccagctgaaatttcagatcggacagactcgctgcggctccggaggcagtgattccaagctgctcgcgcacgctgctgccaagctgcaggatggtgcacgtagccaggctgctgctgctgctcctcactttcttcctccgcacggatgctgagacacctccaaggtttacacgaacacccgttgatcagacaggggtctctggcggagttgcctctttcatctgccaagctacgggagacccaagacctaaaattgtctggaacaaaaaaggaaagaaagtcagcaatcagagatttgaggtaatagagtttgacgatgggtctggatcagttctcagaatacaacccttacggactccgagggatgaggccatttatgaatgtgtggcctcaaataatgtgggagaaataagtgtatccaccagactcacagttttgcgggaagatcaaattcccaggggcttccctaccattgacatgggcccacagttgaaggtggttgagcgtactcgcacggccaccatgctttgtgcagccagtggtaatccggatccagaaatcacttggtttaaagatttcttacctgtggacacaagcaacaacaatggtcgtattaagcagttacgatcaggagcccttcagattgagcagagtgaagagtctgaccaaggaaaatatgagtgtgttgccaccaacagcgcgggcactcgctattccgctcctgccaatttatatgtcagagttcgccgtgtcccaccaagattctctatcccacccactaatcatgaaatcatgccaggcggaagcgttaatatcacctgtgtggccgtggggtcaccaatgccttatgtaaagtggatgttgggggcagaagatctgacacctgaagatgatatgccaataggaagaaatgtgctagaactgaatgatgtaagacagtcagcaaattacacctgtgttgctatgtcaacactgggtgtcattgaagcaatagcacagatcactgtcaaagccttacccaaacctccaggaactcctgtagtgaccgagagcacagctacaagcatcacactgacgtgggactctgggaaccctgagcctgtttcttattacataattcagcataaacctaaaaactctgaggaactttacaaagaaattgatggggtggcgaccacacgctacagtgtcgctggactaagtccctactcggattatgaattcagggttgttgctgtcaataacattgggcgggggcctcccagcgaacctgtgctaacacaaacctcagagcaagcaccatccagtgccccgagggatgtccaggcacgaatgttgagttcgaccaccattttggtacagtggaaggaacctgaagagccaaatggacagatccaaggatatagagtttattatacaatggatcccactcaacatgtcaacaactggatgaaacacaatgtagctgacagccaaatcactactattggcaacttagtgccccagaaaacatattctgtcaaagtcctggcttttacctcaattggagatggtcccctttcaagtgacatacaagtcatcactcagacaggagtaccagggcagccactaaacttcaaagcagaacctgagtctgaaacaagtattttgctctcttggacacctccacgttcagataccattgccaactatgaactggtctacaaagatggggagcatggagaggagcaacgaattaccattgagccagggacatcatataggctgcaaggactgaaaccaaacagcttatactatttccgtctggctgcacgctcccctcaaggcctgggtgcttctactgcagaaatatcagctagaaccatgcagtcaaagccgtcagctcctcctcaagacattagttgcaccagcccaagttccactagtattttggtaagttggcaacctccaccagtggaaaaacagaatggcattatcactgaatactccatcaagtacactgcagtggatggggaagatgacaagcctcacgagattttgggaattccttcggacactaccaaataccttttggaacagctggaaaaatggactgaataccggatcactgtgacagcccatacagatgtcggccctggccctgagagcttgtccgtgttgattcgaaccaatgaagatgttcctagtggtcctcctcgcaaagtcgaggtagaggctgtcaactcaacatctgttaaagtctcatggcgctcacccgtgcccaataaacagcatggccagataagaggatatcaggtgcattatgtgaggatggaaaatggtgagcccaagggccagcccatgctgaaagatgtcatgctggctgatgcacaggacatgatcatttctgggctccagcctgaaacttcctactccctcaccgtcacagcctacacaaccaaaggagatggtgctcgcagcaagcccaaactggtgtccaccactggggcagttccagggaaacctcggcttgtgattaaccacactcagatgaatactgctcttattcagtggcaccctccggtggacacatttggacctcttcagggctaccgtctaaaatttggccgcaaggatatggagccacttactactcttgagttctctgaaaaagaagatcactttacagctacagacatccacaagggagcatcatacgtcttcaggctctcagccagaaacaaagtgggctttggggaggagatggtgaaggagatttccattccagaagaagtaccaactggattccctcaaaaccttcactcagaaggcaccacttcaacctccgtccagttatcttggcaaccacctgtcctggcagagagaaatggcattatcaccaagtatacccttctttatagggatatcaacatcccccttctcccgatggagcagcttattgttccagctgacaccactatgacactcactggcttaaaaccagataccacatacgatgtaaaagtacgtgctcatacgagcaaagggcccgggccatatagtcccagtgtccagttcaggacactgcctgtggatcaagtgtttgcaaaaaattttcatgtcaaagcagtaatgaagacttccgtgttgctgtcttgggagattccagagaattataactccgccatgcctttcaaaattctttatgatgatgggaaaatggtagaagaagtggatggccgagccacacagaagttaattgtcaacctgaagcctgagaaatcatattcatttgtgctgacaaatcgtggaaacagtgctggtgggctgcagcacagggtcacggcaaagactgcaccagatgtattacgtaccaagcctgccttcattgggaagaccaacttggatggcatgattactgtgcaactgcctgaagtacctgcaaatgagaatataaaaggttactacataataattgtgcctttgaagaaatctcgcgggaaatttatcaagccatgggagagtccagatgaaatggaattagatgagctgcttaaggagatatctaggaagcgcagaagcatccgttatgggagagaagttgaattaaagccatatattgccgctcactttgatgtccttcccactgagttcaccctgggggatgacaagcattatggtggatttacaaacaagcaactccaaagtggtcaagaatatgtcttctttgtgttagcagtaatggaacatgcagagtctaagatgtatgcaaccagcccttactccgaccccgtggtgtcaatggatctggatccgcagccaatcacggatgaagaagaaggcttgatctgggttgtaggtcctgtccttgcagtggtctttatcatctgcattgtcattgctattcttctttataaaaggaagagggcagagtccgactctagaaaaagcagcataccgaacaataaggagatcccttcacaccacccaacagaccctgtagaactgaggcgccttaactttcaaacaccgggtatggctagccatcctccaatacccatcttggaacttgcagaccacattgaaagattgaaagcaaatgacaacttgaagttttcccaggaatatgagtcaattgaccctggccagcagttcacttgggaacattcaaacttggaagtaaacaaaccaaagaatagatacgcgaatgtaatcgcatatgatcattcccgggttctcctatcagctatagaagggatcccaggaagtgactatgtgaatgccaactacatagatgggtataggaagcaaaatgcctatattgcaacacagggatctctccccgaaacatttggggacttttggagaatgatatgggaacaacggagtgccacagttgtcatgatgacaaaactagaagaaagatcaagggtgaagtgtgaccagtattggcctagcagaggcacagaaacccacggactcgttcaagtaacgctgcttgatactgtggagctggccacatattgtgttcgaacatttgcactttacaagaatggttcaagtgagaagagagaagtgagacaattccagttcaccgcctggcctgatcatggtgttccagaacaccctacaccttttctagctttcttacgtagagtcaaaacctgtaaccctcccgatgctggtccgatggttgtgcactgcagtgcgggagttggccggactggttgcttcatcgtcatagatgccatgttagaaagaataaagcatgaaaaaactgtagatatttatggccatgtaactttaatgagagcccagaggaactatatggttcaaacagaagaccaatacatctttatccatgatgcactgttagaagcagtgacttgtggaaataccgaagtgccagctagaaacttgtatgcctacattcagaagctgacacaaatagaaacgggagagaatgtcacaggaatggagctcgaatttaagcgtctagccagctcaaaagctcacacctcaaggtttatcagtgccaatcttccatgtaataaattcaaaaatcgccttgttaatattatgccatatgaatccacaagggtatgcctgcagcctatccgtggagtagaaggatctgattacatcaatgccagttttattgatggatacagacaacagaaagcctacatcgctacccaggggcccttggcagagaccactgaagacttctggcggatgctctgggaacacaattccaccatagttgtgatgctcaccaagctgcgtgaaatgggcagagagaaatgtcaccaatactggccagcagaacggtctgcaagataccagtactttgttgtagatcccatggctgagtacaacatgccacagtatatcctaagggaattcaaggtcacagatgccagggacggccagtcccgaacagtaaggcagttccagttcactgactggccagagcaaggagtgccaaagtccggagaaggatttattgacttcatcggccaagtccataaaacaaaagaacagtttggccaagatggacccatttcagtccattgcagcgcgggcgttggaagaactggagtcttcataacgctaagcattgttttggaaagaatgagatatgaaggagttgtagatatcttccagactgtcaaaatgttaagaacacaacgaccagctatggtacagacagaggatcaatatcagttttcctatcgtgccgcactagagtacctgggcagctttgaccactatgcaacgtagaaacccctgacccattctggatttttactacaggcccttcaatatccatggagtctcttctgagccatacagggcacttgagaagtccttcttaacttctagctaacaactacttagtgggactattacacacaaaacaaattaaaaacaaattattccaggtggaccaagaattcacagtttaataatctaacctgaaaaataatgaagagaatcctgactgatgaggcatctgaaggattttatttacagatacctcaaggattcaaaatcaagggaagaagaaatcacagcaaagaaccaccatcttattcaggattgcttgaaaggtgcaaggagaaattgccagaatgctgcagttcagcacaagatatgtgctggtgtggcttctcacaatgaaacggactctgctttgacatcgccccttcccaccatactgctcataataacattttagggggaaaggggagggaatgtttaaaaagaaagtccttgatttagttttttagtattgtaaagatactgctgacctgtgcttcatttctaactgtgtaaacttttttttaacaaaatgtatcattcgataaagtgaattttaaaaaagttacataactcttcatttttttatttccaaatcgtaggtttttttaagctgtagaactgttatctgtaatatcttgctgtagaaatatcaaatcatttgaaaatttgcacatttttgtgcaaaactcaatctacagtatcagtctcgtcagatatattaattttacacttcagttttgattggtgagaaagtacccattctcttcaaataatcaaagataattattattttgttttgtttttggaatcaacagggaggcgcaaagtataaagttgctgctaacatatatacatatatatccatattttataagggtgtctatgtatatatagacagtgtgtccacacaaaaaatagatacagttatcagtcagtcagttcttccatgatttagtttttttaaacgtagaaaagctattgtaaacatctctttccatttattcttaattttttgacatattggtatttctttaaagggaaatgaggaatgcacatcagtgattgattgtcaaacctcaccccctgatttcctacctaatctacccccacctaaccaatcaatcacatccacaaattgttttgtttgtttgttagtcaggcttccaacaaagttcaatatttctaacactctagtgcaataaaaattattattaaatagctaagaggtgtgcatgtgggaaaggtcagtgcatatccctttaggaggggagaatgttgtaatatatcagctatcgagttgtttaaaaaaagtgtattcaatcgtatattgtctatagtatgtgctatgaaatttgcatttatgatatgtaacaggggcaaagccaaattcatgttactctgttcagtcagaaacattttgtggcatacagcattcctgggaagtgctgtactttgtttcgttttggttttagttttgcatttagagtgccttataattgatgcctattttaatagcatttctttttagcttttggttcgtatttccattcactgttcgtatctgttactttctattaaagcattatctgtttaccacatgtacaaaaactctttgaataatatgcattcctagttttcagccaagtcggggatgttagtgattgtaccagcccaaagcacttggataatcagggcccttcttccttttataatcaatcatcaacatcagaaaaagctacttgttttatttatattcccttccaaatccgctctggaacatgcagtaactgcaccaaacttattttagtaacaaatatcattggcaactttggaatatatttgatattccattaggatttttctaaaaggggaaataaactatatatatatatgtatcttacccccaattcttccaacagaatttctataggaagccatggatgatggcataagtttgccacatattacatgattttaaataatcctcaaaatacccaaggaactcttaaagagttttggtatgagtatactactttggtttaattttagcttcatggatgttctgcatggaaggatttttgttttccacattttcccattgctagcagagtgaaatccaagagaccaaacatttgcaagcattgtatttgagcacttttgtaaaaaacaaagaaaaagaaaaaaaagaaaatatatataatactaaaaaaaagtatctagaaggctacctcagaatgagactctctaacctacatcagaaccagagaagaatgtgcactatgtgggtctgttatcattattttcttttagtttgtatctttttggagatttatccaagtgccagattactcagtgctataattttcttttagttaaacaaagggggtcagacagacattgcatcatccagacatgccttgttggacatgtagaatccgatggagcactgcacaccagaatgattggccaatgagcagcttctctccctgaaacaataactgcccatttggcaaagggaaagatgacaataatcagaagaagaaaatgaatgggatgcataccatagacgaacgaggcggagactattgcgggaatcttactgttcaggagctgttcctagaactaactcccttactgtcattgatgtgcattccactctgtgcttttctgtacaaccattcaagttttaatttcccaggtgaaccatctttatctgccattaccacaagctttcaagtttccagttattttcatcatcataaccagtacggtgctattatttacctatgtacgtgtagttatgtataattttgtaattagttacaatggtaaaaaaaatcaaaatatataaaaagtgatttgtacagaactttattttagctcttttttaaaaatgatttgcatggttagaaaacggcgaggacagccaggggagggaagggcctctagggaactttgcactttctatacctttgtactatgcactgccctattgattctacacccaataatgatattacttgaacccatctgtaagaaactgcttcggaaattcatttgtgtgtatgtaaataacacaacatagaaacaggaagggaaaaaagtctgcagtaatgcacgtattttttttctttcctgtttattttcggttttgctttaagtccttttatttttaattccctttttgtttttctttttgggttttggttccttttgggtttatgggtgccctgatactccagcagagatcagaaggctacagatccattctatccatccgttatgtggctttgccatcccagcttggagtgtctttacaaagataataacagttgtgttctttgctctcgttttggatgcatagactgaaaaattaaaacaaataacttgtaaaatggcttgttaaaaaatacaattacctctaattagtagtacgcgtaaatgttttacagaatgaaaggcgtgctttttattttcttacttcgttacattggtggcgaaagaagtctgtatgaaaatcagttctttgctgacacaagttccatttgttacaaatgaattctaataaaaatgtcagtgttatgc

SEQ ID NO: 24670 - DNA, 9430 bp, Homo sapiens
  source 1..9430: mol_type = unassigned DNA
gctctgaaagtgttccagctgaaatttcagatcggacagactcgctgcggctccggaggcagtgattccaagctgctcgcgcacgctgctgccaagctgcaggatggtgcacgtagccaggctgctgctgctgctcctcactttcttcctccgcacggatgctgagacacctccaaggtttacacgaacacccgttgatcagacaggggtctctggcggagttgcctctttcatctgccaagctacgggagacccaagacctaaaattgtctggaacaaaaaaggaaagaaagtcagcaatcagagatttgaggtaatagagtttgacgatgggtctggatcagttctcagaatacaacccttacggactccgagggatgaggccatttatgaatgtgtggcctcaaataatgtgggagaaataagtgtatccaccagactcacagttttgcgggaagatcaaattcccaggggcttccctaccattgacatgggcccacagttgaaggtggttgagcgtactcgcacggccaccatgctttgtgcagccagtggtaatccggatccagaaatcacttggtttaaagatttcttacctgtggacacaagcaacaacaatggtcgtattaagcagttacgatcaggagcccttcagattgagcagagtgaagagtctgaccaaggaaaatatgagtgtgttgccaccaacagcgcgggcactcgctattccgctcctgccaatttatatgtcagagttcgccgtgtcccaccaagattctctatcccacccactaatcatgaaatcatgccaggcggaagcgttaatatcacctgtgtggccgtggggtcaccaatgccttatgtaaagtggatgttgggggcagaagatctgacacctgaagatgatatgccaataggaagaaatgtgctagaactgaatgatgtaagacagtcagcaaattacacctgtgttgctatgtcaacactgggtgtcattgaagcaatagcacagatcactgtcaaagccttacccaaacctccaggaactcctgtagtgaccgagagcacagctacaagcatcacactgacgtgggactctgggaaccctgagcctgtttcttattacataattcagcataaacctaaaaactctgaggaactttacaaagaaattgatggggtggcgaccacacgctacagtgtcgctggactaagtccctactcggattatgaattcagggttgttgctgtcaataacattgggcgggggcctcccagcgaacctgtgctaacacaaacctcagagcaagcaccatccagtgccccgagggatgtccaggcacgaatgttgagttcgaccaccattttggtacagtggaaggaacctgaagagccaaatggacagatccaaggatatagagtttattatacaatggatcccactcaacatgtcaacaactggatgaaacacaatgtagctgacagccaaatcactactattggcaacttagtgccccagaaaacatattctgtcaaagtcctggcttttacctcaattggagatggtcccctttcaagtgacatacaagtcatcactcagacaggagtaccagggcagccactaaacttcaaagcagaacctgagtctgaaacaagtattttgctctcttggacacctccacgttcagataccattgccaactatgaactggtctacaaagatggggagcatggagaggagcaacgaattaccattgagccagggacatcatataggctgcaaggactgaaaccaaacagcttatactatttccgtctggctgcacgctcccctcaaggcctgggtgcttctactgcagaaatatcagctagaaccatgcagtcaaagccgtcagctcctcctcaagacattagttgcaccagcccaagttccactagtattttggtaagttggcaacctccaccagtggaaaaacagaatggcattatcactgaatactccatcaagtacactgcagtggatggggaagatgacaagcctcacgagattttgggaattccttcggacactaccaaataccttttggaacagctggaaaaatggactgaataccggatcactgtgacagcccatacagatgtcggccctggccctgagagcttgtccgtgttgattcgaaccaatgaagatgttcctagtggtcctcctcgcaaagtcgaggtagaggctgtcaactcaacatctgttaaagtctcatggcgctcacccgtgcccaataaacagcatggccagataagaggatatcaggtgcattatgtgaggatggaaaatggtgagcccaagggccagcccatgctgaaagatgtcatgctggctgatgcacagtgggaatttgatgatactactgaacatgacatgatcatttctgggctccagcctgaaacttcctactccctcaccgtcacagcctacacaaccaaaggagatggtgctcgcagcaagcccaaactggtgtccaccactggggcagttccagggaaacctcggcttgtgattaaccacactcagatgaatactgctcttattcagtggcaccctccggtggacacatttggacctcttcagggctaccgtctaaaatttggccgcaaggatatggagccacttactactcttgagttctctgaaaaagaagatcactttacagctacagacatccacaagggagcatcatacgtcttcaggctctcagccagaaacaaagtgggctttggggaggagatggtgaaggagatttccattccagaagaagtaccaactggattccctcaaaaccttcactcagaaggcaccacttcaacctccgtccagttatcttggcaaccacctgtcctggcagagagaaatggcattatcaccaagtatacccttctttatagggatatcaacatcccccttctcccgatggagcagcttattgttccagctgacaccactatgacactcactggcttaaaaccagataccacatacgatgtaaaagtacgtgctcatacgagcaaagggcccgggccatatagtcccagtgtccagttcaggacactgcctgtggatcaagtgtttgcaaaaaattttcatgtcaaagcagtaatgaagacttccgtgttgctgtcttgggagattccagagaattataactccgccatgcctttcaaaattctttatgatgatgggaaaatggtagaagaagtggatggccgagccacacagaagttaattgtcaacctgaagcctgagaaatcatattcatttgtgctgacaaatcgtggaaacagtgctggtgggctgcagcacagggtcacggcaaagactgcaccagatgtattacgtaccaagcctgccttcattgggaagaccaacttggatggcatgattactgtgcaactgcctgaagtacctgcaaatgagaatataaaaggttactacataataattgtgcctttgaagaaatctcgcgggaaatttatcaagccatgggagagtccagatgaaatggaattagatgagctgcttaaggagatatctaggaagcgcagaagcatccgttatgggagagaagttgaattaaagccatatattgccgctcactttgatgtccttcccactgagttcaccctgggggatgacaagcattatggtggatttacaaacaagcaactccaaagtggtcaagaatatgtcttctttgtgttagcagtaatggaacatgcagagtctaagatgtatgcaaccagcccttactccgaccccgtggtgtcaatggatctggatccgcagccaatcacggatgaagaagaaggcttgatctgggttgtaggtcctgtccttgcagtggtctttatcatctgcattgtcattgctattcttctttataaaaggaagagggcagagtccgactctagaaaaagcagcataccgaacaataaggagatcccttcacaccacccaacagaccctgtagaactgaggcgccttaactttcaaacaccgggtatggctagccatcctccaatacccatcttggaacttgcagaccacattgaaagattgaaagcaaatgacaacttgaagttttcccaggaatatgagtcaattgaccctggccagcagttcacttgggaacattcaaacttggaagtaaacaaaccaaagaatagatacgcgaatgtaatcgcatatgatcattcccgggttctcctatcagctatagaagggatcccaggaagtgactatgtgaatgccaactacatagatgggtataggaagcaaaatgcctatattgcaacacagggatctctccccgaaacatttggggacttttggagaatgatatgggaacaacggagtgccacagttgtcatgatgacaaaactagaagaaagatcaagggtgaagtgtgaccagtattggcctagcagaggcacagaaacccacggactcgttcaagtaacgctgcttgatactgtggagctggccacatattgtgttcgaacatttgcactttacaagaatggttcaagtgagaagagagaagtgagacaattccagttcaccgcctggcctgatcatggtgttccagaacaccctacaccttttctagctttcttacgtagagtcaaaacctgtaaccctcccgatgctggtccgatggttgtgcactgcagtgcgggagttggccggactggttgcttcatcgtcatagatgccatgttagaaagaataaagcatgaaaaaactgtagatatttatggccatgtaactttaatgagagcccagaggaactatatggttcaaacagaagaccaatacatctttatccatgatgcactgttagaagcagtgacttgtggaaataccgaagtgccagctagaaacttgtatgcctacattcagaagctgacacaaatagaaacgggagagaatgtcacaggaatggagctcgaatttaagcgtctagccagctcaaaagctcacacctcaaggtttatcagtgccaatcttccatgtaataaattcaaaaatcgccttgttaatattatgccatatgaatccacaagggtatgcctgcagcctatccgtggagtagaaggatctgattacatcaatgccagttttattgatggatacagacaacagaaagcctacatcgctacccaggggcccttggcagagaccactgaagacttctggcggatgctctgggaacacaattccaccatagttgtgatgctcaccaagctgcgtgaaatgggcagagagaaatgtcaccaatactggccagcagaacggtctgcaagataccagtactttgttgtagatcccatggctgagtacaacatgccacagtatatcctaagggaattcaaggtcacagatgccagggacggccagtcccgaacagtaaggcagttccagttcactgactggccagagcaaggagtgccaaagtccggagaaggatttattgacttcatcggccaagtccataaaacaaaagaacagtttggccaagatggacccatttcagtccattgcagcgcgggcgttggaagaactggagtcttcataacgctaagcattgttttggaaagaatgagatatgaaggagttgtagatatcttccagactgtcaaaatgttaagaacacaacgaccagctatggtacagacagaggatcaatatcagttttcctatcgtgccgcactagagtacctgggcagctttgaccactatgcaacgtagaaacccctgacccattctggatttttactacaggcccttcaatatccatggagtctcttctgagccatacagggcacttgagaagtccttcttaacttctagctaacaactacttagtgggactattacacacaaaacaaattaaaaacaaattattccaggtggaccaagaattcacagtttaataatctaacctgaaaaataatgaagagaatcctgactgatgaggcatctgaaggattttatttacagatacctcaaggattcaaaatcaagggaagaagaaatcacagcaaagaaccaccatcttattcaggattgcttgaaaggtgcaaggagaaattgccagaatgctgcagttcagcacaagatatgtgctggtgtggcttctcacaatgaaacggactctgctttgacatcgccccttcccaccatactgctcataataacattttagggggaaaggggagggaatgtttaaaaagaaagtccttgatttagttttttagtattgtaaagatactgctgacctgtgcttcatttctaactgtgtaaacttttttttaacaaaatgtatcattcgataaagtgaattttaaaaaagttacataactcttcatttttttatttccaaatcgtaggtttttttaagctgtagaactgttatctgtaatatcttgctgtagaaatatcaaatcatttgaaaatttgcacatttttgtgcaaaactcaatctacagtatcagtctcgtcagatatattaattttacacttcagttttgattggtgagaaagtacccattctcttcaaataatcaaagataattattattttgttttgtttttggaatcaacagggaggcgcaaagtataaagttgctgctaacatatatacatatatatccatattttataagggtgtctatgtatatatagacagtgtgtccacacaaaaaatagatacagttatcagtcagtcagttcttccatgatttagtttttttaaacgtagaaaagctattgtaaacatctctttccatttattcttaattttttgacatattggtatttctttaaagggaaatgaggaatgcacatcagtgattgattgtcaaacctcaccccctgatttcctacctaatctacccccacctaaccaatcaatcacatccacaaattgttttgtttgtttgttagtcaggcttccaacaaagttcaatatttctaacactctagtgcaataaaaattattattaaatagctaagaggtgtgcatgtgggaaaggtcagtgcatatccctttaggaggggagaatgttgtaatatatcagctatcgagttgtttaaaaaaagtgtattcaatcgtatattgtctatagtatgtgctatgaaatttgcatttatgatatgtaacaggggcaaagccaaattcatgttactctgttcagtcagaaacattttgtggcatacagcattcctgggaagtgctgtactttgtttcgttttggttttagttttgcatttagagtgccttataattgatgcctattttaatagcatttctttttagcttttggttcgtatttccattcactgttcgtatctgttactttctattaaagcattatctgtttaccacatgtacaaaaactctttgaataatatgcattcctagttttcagccaagtcggggatgttagtgattgtaccagcccaaagcacttggataatcagggcccttcttccttttataatcaatcatcaacatcagaaaaagctacttgttttatttatattcccttccaaatccgctctggaacatgcagtaactgcaccaaacttattttagtaacaaatatcattggcaactttggaatatatttgatattccattaggatttttctaaaaggggaaataaactatatatatatatgtatcttacccccaattcttccaacagaatttctataggaagccatggatgatggcataagtttgccacatattacatgattttaaataatcctcaaaatacccaaggaactcttaaagagttttggtatgagtatactactttggtttaattttagcttcatggatgttctgcatggaaggatttttgttttccacattttcccattgctagcagagtgaaatccaagagaccaaacatttgcaagcattgtatttgagcacttttgtaaaaaacaaagaaaaagaaaaaaaagaaaatatatataatactaaaaaaaagtatctagaaggctacctcagaatgagactctctaacctacatcagaaccagagaagaatgtgcactatgtgggtctgttatcattattttcttttagtttgtatctttttggagatttatccaagtgccagattactcagtgctataattttcttttagttaaacaaagggggtcagacagacattgcatcatccagacatgccttgttggacatgtagaatccgatggagcactgcacaccagaatgattggccaatgagcagcttctctccctgaaacaataactgcccatttggcaaagggaaagatgacaataatcagaagaagaaaatgaatgggatgcataccatagacgaacgaggcggagactattgcgggaatcttactgttcaggagctgttcctagaactaactcccttactgtcattgatgtgcattccactctgtgcttttctgtacaaccattcaagttttaatttcccaggtgaaccatctttatctgccattaccacaagctttcaagtttccagttattttcatcatcataaccagtacggtgctattatttacctatgtacgtgtagttatgtataattttgtaattagttacaatggtaaaaaaaatcaaaatatataaaaagtgatttgtacagaactttattttagctcttttttaaaaatgatttgcatggttagaaaacggcgaggacagccaggggagggaagggcctctagggaactttgcactttctatacctttgtactatgcactgccctattgattctacacccaataatgatattacttgaacccatctgtaagaaactgcttcggaaattcatttgtgtgtatgtaaataacacaacatagaaacaggaagggaaaaaagtctgcagtaatgcacgtattttttttctttcctgtttattttcggttttgctttaagtccttttatttttaattccctttttgtttttctttttgggttttggttccttttgggtttatgggtgccctgatactccagcagagatcagaaggctacagatccattctatccatccgttatgtggctttgccatcccagcttggagtgtctttacaaagataataacagttgtgttctttgctctcgttttggatgcatagactgaaaaattaaaacaaataacttgtaaaatggcttgttaaaaaatacaattacctctaattagtagtacgcgtaaatgttttacagaatgaaaggcgtgctttttattttcttacttcgttacattggtggcgaaagaagtctgtatgaaaatcagttctttgctgacacaagttccatttgttacaaatgaattctaataaaaatgtcagtgttatgc

SEQ ID NO: 24671 - DNA, 10123 bp, Homo sapiens
  source 1..10123: mol_type = unassigned DNA
gcagtttattctgggcctgtgtggaatagaaagacaattctttatttgactggtaggaaagaaaagagaagactcctcagggtttccaaggaggactggagcggctgctttattaatgtaaaataatggatctagcccaatgtcctcatttttgcaggtgaagaagtgaagaatcaaggaagtaaaggacctgtctcaaagtcacacaactaggaaatcttgaggagtctgatacttttcatcctccagctataaaatcatcttgtagggggaagctgtacattggtggaaaataaaaggcaagcagttcctggcccgtgatattccagttagaggtgtctgactgacagcatgttggcaccgagggaagcgatgggcttcggctccaggtttctgtcctgagaccacagcagaatgtgccttggacaaaggcttggactccttgatcttctggtaacttcaaaaatctggtctcagggtggtgaactttttcttcgaattcctaacctgtgagcttacgatgatggtgcctgtccattaactgaacaactgtggttttgaacttcttgaggccagggactgtgtctgaaaacaccgacggtggctaactcaagggagacgtctggtgaacacccgtgggatctaaagaacaagctctgaaagtgttccagctgaaatttcagatcggacagactcgctgcggctccggaggcagtgattccaagctgctcgcgcacgctgctgccaagctgcaggatggtgcacgtagccaggctgctgctgctgctcctcactttcttcctccgcacggatgctgagacacctccaaggtttacacgaacacccgttgatcagacaggggtctctggcggagttgcctctttcatctgccaagctacgggagacccaagacctaaaattgtctggaacaaaaaaggaaagaaagtcagcaatcagagatttgaggtaatagagtttgacgatgggtctggatcagttctcagaatacaacccttacggactccgagggatgaggccatttatgaatgtgtggcctcaaataatgtgggagaaataagtgtatccaccagactcacagttttgcgggaagatcaaattcccaggggcttccctaccattgacatgggcccacagttgaaggtggttgagcgtactcgcacggccaccatgctttgtgcagccagtggtaatccggatccagaaatcacttggtttaaagatttcttacctgtggacacaagcaacaacaatggtcgtattaagcagttacgatcagaatctattggtggtacaccaataagaggagcccttcagattgagcagagtgaagagtctgaccaaggaaaatatgagtgtgttgccaccaacagcgcgggcactcgctattccgctcctgccaatttatatgtcagagagctgcgagaagttcgccgtgtcccaccaagattctctatcccacccactaatcatgaaatcatgccaggcggaagcgttaatatcacctgtgtggccgtggggtcaccaatgccttatgtaaagtggatgttgggggcagaagatctgacacctgaagatgatatgccaataggaagaaatgtgctagaactgaatgatgtaagacagtcagcaaattacacctgtgttgctatgtcaacactgggtgtcattgaagcaatagcacagatcactgtcaaagccttacccaaacctccaggaactcctgtagtgaccgagagcacagctacaagcatcacactgacgtgggactctgggaaccctgagcctgtttcttattacataattcagcataaacctaaaaactctgaggaactttacaaagaaattgatggggtggcgaccacacgctacagtgtcgctggactaagtccctactcggattatgaattcagggttgttgctgtcaataacattgggcgggggcctcccagcgaacctgtgctaacacaaacctcagagcaagcaccatccagtgccccgagggatgtccaggcacgaatgttgagttcgaccaccattttggtacagtggaaggaacctgaagagccaaatggacagatccaaggatatagagtttattatacaatggatcccactcaacatgtcaacaactggatgaaacacaatgtagctgacagccaaatcactactattggcaacttagtgccccagaaaacatattctgtcaaagtcctggcttttacctcaattggagatggtcccctttcaagtgacatacaagtcatcactcagacaggagtaccagggcagccactaaacttcaaagcagaacctgagtctgaaacaagtattttgctctcttggacacctccacgttcagataccattgccaactatgaactggtctacaaagatggggagcatggagaggagcaacgaattaccattgagccagggacatcatataggctgcaaggactgaaaccaaacagcttatactatttccgtctggctgcacgctcccctcaaggcctgggtgcttctactgcagaaatatcagctagaaccatgcagtcaaagccgtcagctcctcctcaagacattagttgcaccagcccaagttccactagtattttggtaagttggcaacctccaccagtggaaaaacagaatggcattatcactgaatactccatcaagtacactgcagtggatggggaagatgacaagcctcacgagattttgggaattccttcggacactaccaaataccttttggaacagctggaaaaatggactgaataccggatcactgtgacagcccatacagatgtcggccctggccctgagagcttgtccgtgttgattcgaaccaatgaagatgttcctagtggtcctcctcgcaaagtcgaggtagaggctgtcaactcaacatctgttaaagtctcatggcgctcacccgtgcccaataaacagcatggccagataagaggatatcaggtgcattatgtgaggatggaaaatggtgagcccaagggccagcccatgctgaaagatgtcatgctggctgatgcacagtgggaatttgatgatactactgaacatgacatgatcatttctgggctccagcctgaaacttcctactccctcaccgtcacagcctacacaaccaaaggagatggtgctcgcagcaagcccaaactggtgtccaccactggggcagttccagggaaacctcggcttgtgattaaccacactcagatgaatactgctcttattcagtggcaccctccggtggacacatttggacctcttcagggctaccgtctaaaatttggccgcaaggatatggagccacttactactcttgagttctctgaaaaagaagatcactttacagctacagacatccacaagggagcatcatacgtcttcaggctctcagccagaaacaaagtgggctttggggaggagatggtgaaggagatttccattccagaagaagtaccaactggattccctcaaaaccttcactcagaaggcaccacttcaacctccgtccagttatcttggcaaccacctgtcctggcagagagaaatggcattatcaccaagtatacccttctttatagggatatcaacatcccccttctcccgatggagcagcttattgttccagctgacaccactatgacactcactggcttaaaaccagataccacatacgatgtaaaagtacgtgctcatacgagcaaagggcccgggccatatagtcccagtgtccagttcaggacactgcctgtggatcaagtgtttgcaaaaaattttcatgtcaaagcagtaatgaagacttccgtgttgctgtcttgggagattccagagaattataactccgccatgcctttcaaaattctttatgatgatgggaaaatggtagaagaagtggatggccgagccacacagaagttaattgtcaacctgaagcctgagaaatcatattcatttgtgctgacaaatcgtggaaacagtgctggtgggctgcagcacagggtcacggcaaagactgcaccagatgtattacgtaccaagcctgccttcattgggaagaccaacttggatggcatgattactgtgcaactgcctgaagtacctgcaaatgagaatataaaaggttactacataataattgtgcctttgaagaaatctcgcgggaaatttatcaagccatgggagagtccagatgaaatggaattagatgagctgcttaaggagatatctaggaagcgcagaagcatccgttatgggagagaagttgaattaaagccatatattgccgctcactttgatgtccttcccactgagttcaccctgggggatgacaagcattatggtggatttacaaacaagcaactccaaagtggtcaagaatatgtcttctttgtgttagcagtaatggaacatgcagagtctaagatgtatgcaaccagcccttactccgaccccgtggtgtcaatggatctggatccgcagccaatcacggatgaagaagaaggcttgatctgggttgtaggtcctgtccttgcagtggtctttatcatctgcattgtcattgctattcttctttataaaaggaagagggcagagtccgactctagaaaaagcagcataccgaacaataaggagatcccttcacaccacccaacagaccctgtagaactgaggcgccttaactttcaaacaccgggtatggctagccatcctccaatacccatcttggaacttgcagaccacattgaaagattgaaagcaaatgacaacttgaagttttcccaggaatatgagtcaattgaccctggccagcagttcacttgggaacattcaaacttggaagtaaacaaaccaaagaatagatacgcgaatgtaatcgcatatgatcattcccgggttctcctatcagctatagaagggatcccaggaagtgactatgtgaatgccaactacatagatgggtataggaagcaaaatgcctatattgcaacacagggatctctccccgaaacatttggggacttttggagaatgatatgggaacaacggagtgccacagttgtcatgatgacaaaactagaagaaagatcaagggtgaagtgtgaccagtattggcctagcagaggcacagaaacccacggactcgttcaagtaacgctgcttgatactgtggagctggccacatattgtgttcgaacatttgcactttacaagaatggttcaagtgagaagagagaagtgagacaattccagttcaccgcctggcctgatcatggtgttccagaacaccctacaccttttctagctttcttacgtagagtcaaaacctgtaaccctcccgatgctggtccgatggttgtgcactgcagtgcgggagttggccggactggttgcttcatcgtcatagatgccatgttagaaagaataaagcatgaaaaaactgtagatatttatggccatgtaactttaatgagagcccagaggaactatatggttcaaacagaagaccaatacatctttatccatgatgcactgttagaagcagtgacttgtggaaataccgaagtgccagctagaaacttgtatgcctacattcagaagctgacacaaatagaaacgggagagaatgtcacaggaatggagctcgaatttaagcgtctagccagctcaaaagctcacacctcaaggtttatcagtgccaatcttccatgtaataaattcaaaaatcgccttgttaatattatgccatatgaatccacaagggtatgcctgcagcctatccgtggagtagaaggatctgattacatcaatgccagttttattgatggatacagacaacagaaagcctacatcgctacccaggggcccttggcagagaccactgaagacttctggcggatgctctgggaacacaattccaccatagttgtgatgctcaccaagctgcgtgaaatgggcagagagaaatgtcaccaatactggccagcagaacggtctgcaagataccagtactttgttgtagatcccatggctgagtacaacatgccacagtatatcctaagggaattcaaggtcacagatgccagggacggccagtcccgaacagtaaggcagttccagttcactgactggccagagcaaggagtgccaaagtccggagaaggatttattgacttcatcggccaagtccataaaacaaaagaacagtttggccaagatggacccatttcagtccattgcagcgcgggcgttggaagaactggagtcttcataacgctaagcattgttttggaaagaatgagatatgaaggagttgtagatatcttccagactgtcaaaatgttaagaacacaacgaccagctatggtacagacagaggatcaatatcagttttcctatcgtgccgcactagagtacctgggcagctttgaccactatgcaacgtagaaacccctgacccattctggatttttactacaggcccttcaatatccatggagtctcttctgagccatacagggcacttgagaagtccttcttaacttctagctaacaactacttagtgggactattacacacaaaacaaattaaaaacaaattattccaggtggaccaagaattcacagtttaataatctaacctgaaaaataatgaagagaatcctgactgatgaggcatctgaaggattttatttacagatacctcaaggattcaaaatcaagggaagaagaaatcacagcaaagaaccaccatcttattcaggattgcttgaaaggtgcaaggagaaattgccagaatgctgcagttcagcacaagatatgtgctggtgtggcttctcacaatgaaacggactctgctttgacatcgccccttcccaccatactgctcataataacattttagggggaaaggggagggaatgtttaaaaagaaagtccttgatttagttttttagtattgtaaagatactgctgacctgtgcttcatttctaactgtgtaaacttttttttaacaaaatgtatcattcgataaagtgaattttaaaaaagttacataactcttcatttttttatttccaaatcgtaggtttttttaagctgtagaactgttatctgtaatatcttgctgtagaaatatcaaatcatttgaaaatttgcacatttttgtgcaaaactcaatctacagtatcagtctcgtcagatatattaattttacacttcagttttgattggtgagaaagtacccattctcttcaaataatcaaagataattattattttgttttgtttttggaatcaacagggaggcgcaaagtataaagttgctgctaacatatatacatatatatccatattttataagggtgtctatgtatatatagacagtgtgtccacacaaaaaatagatacagttatcagtcagtcagttcttccatgatttagtttttttaaacgtagaaaagctattgtaaacatctctttccatttattcttaattttttgacatattggtatttctttaaagggaaatgaggaatgcacatcagtgattgattgtcaaacctcaccccctgatttcctacctaatctacccccacctaaccaatcaatcacatccacaaattgttttgtttgtttgttagtcaggcttccaacaaagttcaatatttctaacactctagtgcaataaaaattattattaaatagctaagaggtgtgcatgtgggaaaggtcagtgcatatccctttaggaggggagaatgttgtaatatatcagctatcgagttgtttaaaaaaagtgtattcaatcgtatattgtctatagtatgtgctatgaaatttgcatttatgatatgtaacaggggcaaagccaaattcatgttactctgttcagtcagaaacattttgtggcatacagcattcctgggaagtgctgtactttgtttcgttttggttttagttttgcatttagagtgccttataattgatgcctattttaatagcatttctttttagcttttggttcgtatttccattcactgttcgtatctgttactttctattaaagcattatctgtttaccacatgtacaaaaactctttgaataatatgcattcctagttttcagccaagtcggggatgttagtgattgtaccagcccaaagcacttggataatcagggcccttcttccttttataatcaatcatcaacatcagaaaaagctacttgttttatttatattcccttccaaatccgctctggaacatgcagtaactgcaccaaacttattttagtaacaaatatcattggcaactttggaatatatttgatattccattaggatttttctaaaaggggaaataaactatatatatatatgtatcttacccccaattcttccaacagaatttctataggaagccatggatgatggcataagtttgccacatattacatgattttaaataatcctcaaaatacccaaggaactcttaaagagttttggtatgagtatactactttggtttaattttagcttcatggatgttctgcatggaaggatttttgttttccacattttcccattgctagcagagtgaaatccaagagaccaaacatttgcaagcattgtatttgagcacttttgtaaaaaacaaagaaaaagaaaaaaaagaaaatatatataatactaaaaaaaagtatctagaaggctacctcagaatgagactctctaacctacatcagaaccagagaagaatgtgcactatgtgggtctgttatcattattttcttttagtttgtatctttttggagatttatccaagtgccagattactcagtgctataattttcttttagttaaacaaagggggtcagacagacattgcatcatccagacatgccttgttggacatgtagaatccgatggagcactgcacaccagaatgattggccaatgagcagcttctctccctgaaacaataactgcccatttggcaaagggaaagatgacaataatcagaagaagaaaatgaatgggatgcataccatagacgaacgaggcggagactattgcgggaatcttactgttcaggagctgttcctagaactaactcccttactgtcattgatgtgcattccactctgtgcttttctgtacaaccattcaagttttaatttcccaggtgaaccatctttatctgccattaccacaagctttcaagtttccagttattttcatcatcataaccagtacggtgctattatttacctatgtacgtgtagttatgtataattttgtaattagttacaatggtaaaaaaaatcaaaatatataaaaagtgatttgtacagaactttattttagctcttttttaaaaatgatttgcatggttagaaaacggcgaggacagccaggggagggaagggcctctagggaactttgcactttctatacctttgtactatgcactgccctattgattctacacccaataatgatattacttgaacccatctgtaagaaactgcttcggaaattcatttgtgtgtatgtaaataacacaacatagaaacaggaagggaaaaaagtctgcagtaatgcacgtattttttttctttcctgtttattttcggttttgctttaagtccttttatttttaattccctttttgtttttctttttgggttttggttccttttgggtttatgggtgccctgatactccagcagagatcagaaggctacagatccattctatccatccgttatgtggctttgccatcccagcttggagtgtctttacaaagataataacagttgtgttctttgctctcgttttggatgcatagactgaaaaattaaaacaaataacttgtaaaatggcttgttaaaaaatacaattacctctaattagtagtacgcgtaaatgttttacagaatgaaaggcgtgctttttattttcttacttcgttacattggtggcgaaagaagtctgtatgaaaatcagttctttgctgacacaagttccatttgttacaaatgaattctaataaaaatgtcagtgttatgca

SEQ ID NO: 24672 - DNA, 8239 bp, Homo sapiens
  source 1..8239: mol_type = unassigned DNA
gctctgaaagtgttccagctgaaatttcagatcggacagactcgctgcggctccggaggcagtgattccaagctgctcgcgcacgctgctgccaagctgcaggatggtgcacgtagccaggctgctgctgctgctcctcactttcttcctccgcacggatgctgagacacctccaaggtttacacgaacacccgttgatcagacaggggtctctggcggagttgcctctttcatctgccaagctacgggagacccaagacctaaaattgtctggaacaaaaaaggaaagaaagtcagcaatcagagatttgaggtaatagagtttgacgatgggtctggatcagttctcagaatacaacccttacggactccgagggatgaggccatttatgaatgtgtggcctcaaataatgtgggagaaataagtgtatccaccagactcacagttttgcgggaagatcaaattcccaggggcttccctaccattgacatgggcccacagttgaaggtggttgagcgtactcgcacggccaccatgctttgtgcagccagtggtaatccggatccagaaatcacttggtttaaagatttcttacctgtggacacaagcaacaacaatggtcgtattaagcagttacgatcaggtggtacaccaataagaggagcccttcagattgagcagagtgaagagtctgaccaaggaaaatatgagtgtgttgccaccaacagcgcgggcactcgctattccgctcctgccaatttatatgtcagagagctgcgagaagttcgccgtgtcccaccaagattctctatcccacccactaatcatgaaatcatgccaggcggaagcgttaatatcacctgtgtggccgtggggtcaccaatgccttatgtaaagtggatgttgggggcagaagatctgacacctgaagatgatatgccaataggaagaaatgtgctagaactgaatgatgtaagacagtcagcaaattacacctgtgttgctatgtcaacactgggtgtcattgaagcaatagcacagatcactgtcaaagccttacccaaacctccaggaactcctgtagtgaccgagagcacagctacaagcatcacactgacgtgggactctgggaaccctgagcctgtttcttattacataattcagcataaacctaaaaactctgaggaactttacaaagaaattgatggggtggcgaccacacgctacagtgtcgctggactaagtccctactcggattatgaattcagggttgttgctgtcaataacattgggcgggggcctcccagcgaacctgtgctaacacaaacctcagagcaagcaccatccagtgccccgagggatgtccaggcacgaatgttgagttcgaccaccattttggtacagtggaaggaacctgaagagccaaatggacagatccaaggatatagagtttattatacaatggatcccactcaacatgtcaacaactggatgaaacacaatgtagctgacagccaaatcactactattggcaacttagtgccccagaaaacatattctgtcaaagtcctggcttttacctcaattggagatggtcccctttcaagtgacatacaagtcatcactcagacaggagtaccagggcagccactaaacttcaaagcagaacctgagtctgaaacaagtattttgctctcttggacacctccacgttcagataccattgccaactatgaactggtctacaaagatggggagcatggagaggagcaacgaattaccattgagccagggacatcatataggctgcaaggactgaaaccaaacagcttatactatttccgtctggctgcacgctcccctcaaggcctgggtgcttctactgcagaaatatcagctagaaccatgcagtcaatgtttgcaaaaaattttcatgtcaaagcagtaatgaagacttccgtgttgctgtcttgggagattccagagaattataactccgccatgcctttcaaaattctttatgatgatgggaaaatggtagaagaagtggatggccgagccacacagaagttaattgtcaacctgaagcctgagaaatcatattcatttgtgctgacaaatcgtggaaacagtgctggtgggctgcagcacagggtcacggcaaagactgcaccagatgtattacgtaccaagcctgccttcattgggaagaccaacttggatggcatgattactgtgcaactgcctgaagtacctgcaaatgagaatataaaaggttactacataataattgtgcctttgaagaaatctcgcgggaaatttatcaagccatgggagagtccagatgaaatggaattagatgagctgcttaaggagatatctaggaagcgcagaagcatccgttatgggagagaagttgaattaaagccatatattgccgctcactttgatgtccttcccactgagttcaccctgggggatgacaagcattatggtggatttacaaacaagcaactccaaagtggtcaagaatatgtcttctttgtgttagcagtaatggaacatgcagagtctaagatgtatgcaaccagcccttactccgaccccgtggtgtcaatggatctggatccgcagccaatcacggatgaagaagaaggcttgatctgggttgtaggtcctgtccttgcagtggtctttatcatctgcattgtcattgctattcttctttataaaagtaaacccgacaggaagagggcagagtccgactctagaaaaagcagcataccgaacaataaggagatcccttcacaccacccaacagaccctgtagaactgaggcgccttaactttcaaacaccgggtatggctagccatcctccaatacccatcttggaacttgcagaccacattgaaagattgaaagcaaatgacaacttgaagttttcccaggaatatgagtcaattgaccctggccagcagttcacttgggaacattcaaacttggaagtaaacaaaccaaagaatagatacgcgaatgtaatcgcatatgatcattcccgggttctcctatcagctatagaagggatcccaggaagtgactatgtgaatgccaactacatagatgggtataggaagcaaaatgcctatattgcaacacagggatctctccccgaaacatttggggacttttggagaatgatatgggaacaacggagtgccacagttgtcatgatgacaaaactagaagaaagatcaagggtgaagtgtgaccagtattggcctagcagaggcacagaaacccacggactcgttcaagtaacgctgcttgatactgtggagctggccacatattgtgttcgaacatttgcactttacaagaatggttcaagtgagaagagagaagtgagacaattccagttcaccgcctggcctgatcatggtgttccagaacaccctacaccttttctagctttcttacgtagagtcaaaacctgtaaccctcccgatgctggtccgatggttgtgcactgcagtgcgggagttggccggactggttgcttcatcgtcatagatgccatgttagaaagaataaagcatgaaaaaactgtagatatttatggccatgtaactttaatgagagcccagaggaactatatggttcaaacagaagaccaatacatctttatccatgatgcactgttagaagcagtgacttgtggaaataccgaagtgccagctagaaacttgtatgcctacattcagaagctgacacaaatagaaacgggagagaatgtcacaggaatggagctcgaatttaagcgtctagccagctcaaaagctcacacctcaaggtttatcagtgccaatcttccatgtaataaattcaaaaatcgccttgttaatattatgccatatgaatccacaagggtatgcctgcagcctatccgtggagtagaaggatctgattacatcaatgccagttttattgatggatacagacaacagaaagcctacatcgctacccaggggcccttggcagagaccactgaagacttctggcggatgctctgggaacacaattccaccatagttgtgatgctcaccaagctgcgtgaaatgggcagagagaaatgtcaccaatactggccagcagaacggtctgcaagataccagtactttgttgtagatcccatggctgagtacaacatgccacagtatatcctaagggaattcaaggtcacagatgccagggacggccagtcccgaacagtaaggcagttccagttcactgactggccagagcaaggagtgccaaagtccggagaaggatttattgacttcatcggccaagtccataaaacaaaagaacagtttggccaagatggacccatttcagtccattgcagcgcgggcgttggaagaactggagtcttcataacgctaagcattgttttggaaagaatgagatatgaaggagttgtagatatcttccagactgtcaaaatgttaagaacacaacgaccagctatggtacagacagaggatcaatatcagttttcctatcgtgccgcactagagtacctgggcagctttgaccactatgcaacgtagaaacccctgacccattctggatttttactacaggcccttcaatatccatggagtctcttctgagccatacagggcacttgagaagtccttcttaacttctagctaacaactacttagtgggactattacacacaaaacaaattaaaaacaaattattccaggtggaccaagaattcacagtttaataatctaacctgaaaaataatgaagagaatcctgactgatgaggcatctgaaggattttatttacagatacctcaaggattcaaaatcaagggaagaagaaatcacagcaaagaaccaccatcttattcaggattgcttgaaaggtgcaaggagaaattgccagaatgctgcagttcagcacaagatatgtgctggtgtggcttctcacaatgaaacggactctgctttgacatcgccccttcccaccatactgctcataataacattttagggggaaaggggagggaatgtttaaaaagaaagtccttgatttagttttttagtattgtaaagatactgctgacctgtgcttcatttctaactgtgtaaacttttttttaacaaaatgtatcattcgataaagtgaattttaaaaaagttacataactcttcatttttttatttccaaatcgtaggtttttttaagctgtagaactgttatctgtaatatcttgctgtagaaatatcaaatcatttgaaaatttgcacatttttgtgcaaaactcaatctacagtatcagtctcgtcagatatattaattttacacttcagttttgattggtgagaaagtacccattctcttcaaataatcaaagataattattattttgttttgtttttggaatcaacagggaggcgcaaagtataaagttgctgctaacatatatacatatatatccatattttataagggtgtctatgtatatatagacagtgtgtccacacaaaaaatagatacagttatcagtcagtcagttcttccatgatttagtttttttaaacgtagaaaagctattgtaaacatctctttccatttattcttaattttttgacatattggtatttctttaaagggaaatgaggaatgcacatcagtgattgattgtcaaacctcaccccctgatttcctacctaatctacccccacctaaccaatcaatcacatccacaaattgttttgtttgtttgttagtcaggcttccaacaaagttcaatatttctaacactctagtgcaataaaaattattattaaatagctaagaggtgtgcatgtgggaaaggtcagtgcatatccctttaggaggggagaatgttgtaatatatcagctatcgagttgtttaaaaaaagtgtattcaatcgtatattgtctatagtatgtgctatgaaatttgcatttatgatatgtaacaggggcaaagccaaattcatgttactctgttcagtcagaaacattttgtggcatacagcattcctgggaagtgctgtactttgtttcgttttggttttagttttgcatttagagtgccttataattgatgcctattttaatagcatttctttttagcttttggttcgtatttccattcactgttcgtatctgttactttctattaaagcattatctgtttaccacatgtacaaaaactctttgaataatatgcattcctagttttcagccaagtcggggatgttagtgattgtaccagcccaaagcacttggataatcagggcccttcttccttttataatcaatcatcaacatcagaaaaagctacttgttttatttatattcccttccaaatccgctctggaacatgcagtaactgcaccaaacttattttagtaacaaatatcattggcaactttggaatatatttgatattccattaggatttttctaaaaggggaaataaactatatatatatatgtatcttacccccaattcttccaacagaatttctataggaagccatggatgatggcataagtttgccacatattacatgattttaaataatcctcaaaatacccaaggaactcttaaagagttttggtatgagtatactactttggtttaattttagcttcatggatgttctgcatggaaggatttttgttttccacattttcccattgctagcagagtgaaatccaagagaccaaacatttgcaagcattgtatttgagcacttttgtaaaaaacaaagaaaaagaaaaaaaagaaaatatatataatactaaaaaaaagtatctagaaggctacctcagaatgagactctctaacctacatcagaaccagagaagaatgtgcactatgtgggtctgttatcattattttcttttagtttgtatctttttggagatttatccaagtgccagattactcagtgctataattttcttttagttaaacaaagggggtcagacagacattgcatcatccagacatgccttgttggacatgtagaatccgatggagcactgcacaccagaatgattggccaatgagcagcttctctccctgaaacaataactgcccatttggcaaagggaaagatgacaataatcagaagaagaaaatgaatgggatgcataccatagacgaacgaggcggagactattgcgggaatcttactgttcaggagctgttcctagaactaactcccttactgtcattgatgtgcattccactctgtgcttttctgtacaaccattcaagttttaatttcccaggtgaaccatctttatctgccattaccacaagctttcaagtttccagttattttcatcatcataaccagtacggtgctattatttacctatgtacgtgtagttatgtataattttgtaattagttacaatggtaaaaaaaatcaaaatatataaaaagtgatttgtacagaactttattttagctcttttttaaaaatgatttgcatggttagaaaacggcgaggacagccaggggagggaagggcctctagggaactttgcactttctatacctttgtactatgcactgccctattgattctacacccaataatgatattacttgaacccatctgtaagaaactgcttcggaaattcatttgtgtgtatgtaaataacacaacatagaaacaggaagggaaaaaagtctgcagtaatgcacgtattttttttctttcctgtttattttcggttttgctttaagtccttttatttttaattccctttttgtttttctttttgggttttggttccttttgggtttatgggtgccctgatactccagcagagatcagaaggctacagatccattctatccatccgttatgtggctttgccatcccagcttggagtgtctttacaaagataataacagttgtgttctttgctctcgttttggatgcatagactgaaaaattaaaacaaataacttgtaaaatggcttgttaaaaaatacaattacctctaattagtagtacgcgtaaatgttttacagaatgaaaggcgtgctttttattttcttacttcgttacattggtggcgaaagaagtctgtatgaaaatcagttctttgctgacacaagttccatttgttacaaatgaattctaataaaaatgtcagtgttatgc

SEQ ID NO: 24673 - DNA, 8248 bp, Homo sapiens
  source 1..8248: mol_type = unassigned DNA
gctctgaaagtgttccagctgaaatttcagatcggacagactcgctgcggctccggaggcagtgattccaagctgctcgcgcacgctgctgccaagctgcaggatggtgcacgtagccaggctgctgctgctgctcctcactttcttcctccgcacggatgctgagacacctccaaggtttacacgaacacccgttgatcagacaggggtctctggcggagttgcctctttcatctgccaagctacgggagacccaagacctaaaattgtctggaacaaaaaaggaaagaaagtcagcaatcagagatttgaggtaatagagtttgacgatgggtctggatcagttctcagaatacaacccttacggactccgagggatgaggccatttatgaatgtgtggcctcaaataatgtgggagaaataagtgtatccaccagactcacagttttgcgggaagatcaaattcccaggggcttccctaccattgacatgggcccacagttgaaggtggttgagcgtactcgcacggccaccatgctttgtgcagccagtggtaatccggatccagaaatcacttggtttaaagatttcttacctgtggacacaagcaacaacaatggtcgtattaagcagttacgatcagtatccataggagcccttcagattgagcagagtgaagagtctgaccaaggaaaatatgagtgtgttgccaccaacagcgcgggcactcgctattccgctcctgccaatttatatgtcagagttcgccgtgtcccaccaagattctctatcccacccactaatcatgaaatcatgccaggcggaagcgttaatatcacctgtgtggccgtggggtcaccaatgccttatgtaaagtggatgttgggggcagaagatctgacacctgaagatgatatgccaataggaagaaatgtgctagaactgaatgatgtaagacagtcagcaaattacacctgtgttgctatgtcaacactgggtgtcattgaagcaatagcacagatcactgtcaaagccttacccaaacctccaggaactcctgtagtgaccgagagcacagctacaagcatcacactgacgtgggactctgggaaccctgagcctgtttcttattacataattcagcataaacctaaaaactctgaggaactttacaaagaaattgatggggtggcgaccacacgctacagtgtcgctggactaagtccctactcggattatgaattcagggttgttgctgtcaataacattgggcgggggcctcccagcgaacctgtgctaacacaaacctcagagcaagcaccatccagtgccccgagggatgtccaggcacgaatgttgagttcgaccaccattttggtacagtggaaggaacctgaagagccaaatggacagatccaaggatatagagtttattatacaatggatcccactcaacatgtcaacaactggatgaaacacaatgtagctgacagccaaatcactactattggcaacttagtgccccagaaaacatattctgtcaaagtcctggcttttacctcaattggagatggtcccctttcaagtgacatacaagtcatcactcagacaggagtaccagggcagccactaaacttcaaagcagaacctgagtctgaaacaagtattttgctctcttggacacctccacgttcagataccattgccaactatgaactggtctacaaagatggggagcatggagaggagcaacgaattaccattgagccagggacatcatataggctgcaaggactgaaaccaaacagcttatactatttccgtctggctgcacgctcccctcaaggcctgggtgcttctactgcagaaatatcagctagaaccatgcagtcaatgtttgcaaaaaattttcatgtcaaagcagtaatgaagacttccgtgttgctgtcttgggagattccagagaattataactccgccatgcctttcaaaattctttatgatgatgggaaaatggtagaagaagtggatggccgagccacacagaagttaattgtcaacctgaagcctgagaaatcatattcatttgtgctgacaaatcgtggaaacagtgctggtgggctgcagcacagggtcacggcaaagactgcaccagatgtattacgtaccaagcctgccttcattgggaagaccaacttggatggcatgattactgtgcaactgcctgaagtacctgcaaatgagaatataaaaggttactacataataattgtgcctttgaagaaatctcgcgggaaatttatcaagccatgggagagtccagatgaaatggaattagatgagctgcttaaggagatatctaggaagcgcagaagcatccgttatgggagagaagttgaattaaagccatatattgccgctcactttgatgtccttcccactgagttcaccctgggggatgacaagcattatggtggatttacaaacaagcaactccaaagtggtcaagaatatgtcttctttgtgttagcagtaatggaacatgcagagtctaagatgtatgcaaccagcccttactccgaccccgtggtgtcaatggatctggatccgcagccaatcacggatgaagaagaaggcttgatctgggttgtaggtcctgtccttgcagtggtctttatcatctgcattgtcattgctattcttctttataaaaggaagagggcagagtccgactctagaaaaagcagcataccgaacaataaggagatcccttcacaccacccaacagaccctgtagaactgaggcgccttaactttcaaacaccgggttcagatgattccggttaccctggtaaccttcattcttcaagtatggctagccatcctccaatacccatcttggaacttgcagaccacattgaaagattgaaagcaaatgacaacttgaagttttcccaggaatatgagtcaattgaccctggccagcagttcacttgggaacattcaaacttggaagtaaacaaaccaaagaatagatacgcgaatgtaatcgcatatgatcattcccgggttctcctatcagctatagaagggatcccaggaagtgactatgtgaatgccaactacatagatgggtataggaagcaaaatgcctatattgcaacacagggatctctccccgaaacatttggggacttttggagaatgatatgggaacaacggagtgccacagttgtcatgatgacaaaactagaagaaagatcaagggtgaagtgtgaccagtattggcctagcagaggcacagaaacccacggactcgttcaagtaacgctgcttgatactgtggagctggccacatattgtgttcgaacatttgcactttacaagaatggttcaagtgagaagagagaagtgagacaattccagttcaccgcctggcctgatcatggtgttccagaacaccctacaccttttctagctttcttacgtagagtcaaaacctgtaaccctcccgatgctggtccgatggttgtgcactgcagtgcgggagttggccggactggttgcttcatcgtcatagatgccatgttagaaagaataaagcatgaaaaaactgtagatatttatggccatgtaactttaatgagagcccagaggaactatatggttcaaacagaagaccaatacatctttatccatgatgcactgttagaagcagtgacttgtggaaataccgaagtgccagctagaaacttgtatgcctacattcagaagctgacacaaatagaaacgggagagaatgtcacaggaatggagctcgaatttaagcgtctagccagctcaaaagctcacacctcaaggtttatcagtgccaatcttccatgtaataaattcaaaaatcgccttgttaatattatgccatatgaatccacaagggtatgcctgcagcctatccgtggagtagaaggatctgattacatcaatgccagttttattgatggatacagacaacagaaagcctacatcgctacccaggggcccttggcagagaccactgaagacttctggcggatgctctgggaacacaattccaccatagttgtgatgctcaccaagctgcgtgaaatgggcagagagaaatgtcaccaatactggccagcagaacggtctgcaagataccagtactttgttgtagatcccatggctgagtacaacatgccacagtatatcctaagggaattcaaggtcacagatgccagggacggccagtcccgaacagtaaggcagttccagttcactgactggccagagcaaggagtgccaaagtccggagaaggatttattgacttcatcggccaagtccataaaacaaaagaacagtttggccaagatggacccatttcagtccattgcagcgcgggcgttggaagaactggagtcttcataacgctaagcattgttttggaaagaatgagatatgaaggagttgtagatatcttccagactgtcaaaatgttaagaacacaacgaccagctatggtacagacagaggatcaatatcagttttcctatcgtgccgcactagagtacctgggcagctttgaccactatgcaacgtagaaacccctgacccattctggatttttactacaggcccttcaatatccatggagtctcttctgagccatacagggcacttgagaagtccttcttaacttctagctaacaactacttagtgggactattacacacaaaacaaattaaaaacaaattattccaggtggaccaagaattcacagtttaataatctaacctgaaaaataatgaagagaatcctgactgatgaggcatctgaaggattttatttacagatacctcaaggattcaaaatcaagggaagaagaaatcacagcaaagaaccaccatcttattcaggattgcttgaaaggtgcaaggagaaattgccagaatgctgcagttcagcacaagatatgtgctggtgtggcttctcacaatgaaacggactctgctttgacatcgccccttcccaccatactgctcataataacattttagggggaaaggggagggaatgtttaaaaagaaagtccttgatttagttttttagtattgtaaagatactgctgacctgtgcttcatttctaactgtgtaaacttttttttaacaaaatgtatcattcgataaagtgaattttaaaaaagttacataactcttcatttttttatttccaaatcgtaggtttttttaagctgtagaactgttatctgtaatatcttgctgtagaaatatcaaatcatttgaaaatttgcacatttttgtgcaaaactcaatctacagtatcagtctcgtcagatatattaattttacacttcagttttgattggtgagaaagtacccattctcttcaaataatcaaagataattattattttgttttgtttttggaatcaacagggaggcgcaaagtataaagttgctgctaacatatatacatatatatccatattttataagggtgtctatgtatatatagacagtgtgtccacacaaaaaatagatacagttatcagtcagtcagttcttccatgatttagtttttttaaacgtagaaaagctattgtaaacatctctttccatttattcttaattttttgacatattggtatttctttaaagggaaatgaggaatgcacatcagtgattgattgtcaaacctcaccccctgatttcctacctaatctacccccacctaaccaatcaatcacatccacaaattgttttgtttgtttgttagtcaggcttccaacaaagttcaatatttctaacactctagtgcaataaaaattattattaaatagctaagaggtgtgcatgtgggaaaggtcagtgcatatccctttaggaggggagaatgttgtaatatatcagctatcgagttgtttaaaaaaagtgtattcaatcgtatattgtctatagtatgtgctatgaaatttgcatttatgatatgtaacaggggcaaagccaaattcatgttactctgttcagtcagaaacattttgtggcatacagcattcctgggaagtgctgtactttgtttcgttttggttttagttttgcatttagagtgccttataattgatgcctattttaatagcatttctttttagcttttggttcgtatttccattcactgttcgtatctgttactttctattaaagcattatctgtttaccacatgtacaaaaactctttgaataatatgcattcctagttttcagccaagtcggggatgttagtgattgtaccagcccaaagcacttggataatcagggcccttcttccttttataatcaatcatcaacatcagaaaaagctacttgttttatttatattcccttccaaatccgctctggaacatgcagtaactgcaccaaacttattttagtaacaaatatcattggcaactttggaatatatttgatattccattaggatttttctaaaaggggaaataaactatatatatatatgtatcttacccccaattcttccaacagaatttctataggaagccatggatgatggcataagtttgccacatattacatgattttaaataatcctcaaaatacccaaggaactcttaaagagttttggtatgagtatactactttggtttaattttagcttcatggatgttctgcatggaaggatttttgttttccacattttcccattgctagcagagtgaaatccaagagaccaaacatttgcaagcattgtatttgagcacttttgtaaaaaacaaagaaaaagaaaaaaaagaaaatatatataatactaaaaaaaagtatctagaaggctacctcagaatgagactctctaacctacatcagaaccagagaagaatgtgcactatgtgggtctgttatcattattttcttttagtttgtatctttttggagatttatccaagtgccagattactcagtgctataattttcttttagttaaacaaagggggtcagacagacattgcatcatccagacatgccttgttggacatgtagaatccgatggagcactgcacaccagaatgattggccaatgagcagcttctctccctgaaacaataactgcccatttggcaaagggaaagatgacaataatcagaagaagaaaatgaatgggatgcataccatagacgaacgaggcggagactattgcgggaatcttactgttcaggagctgttcctagaactaactcccttactgtcattgatgtgcattccactctgtgcttttctgtacaaccattcaagttttaatttcccaggtgaaccatctttatctgccattaccacaagctttcaagtttccagttattttcatcatcataaccagtacggtgctattatttacctatgtacgtgtagttatgtataattttgtaattagttacaatggtaaaaaaaatcaaaatatataaaaagtgatttgtacagaactttattttagctcttttttaaaaatgatttgcatggttagaaaacggcgaggacagccaggggagggaagggcctctagggaactttgcactttctatacctttgtactatgcactgccctattgattctacacccaataatgatattacttgaacccatctgtaagaaactgcttcggaaattcatttgtgtgtatgtaaataacacaacatagaaacaggaagggaaaaaagtctgcagtaatgcacgtattttttttctttcctgtttattttcggttttgctttaagtccttttatttttaattccctttttgtttttctttttgggttttggttccttttgggtttatgggtgccctgatactccagcagagatcagaaggctacagatccattctatccatccgttatgtggctttgccatcccagcttggagtgtctttacaaagataataacagttgtgttctttgctctcgttttggatgcatagactgaaaaattaaaacaaataacttgtaaaatggcttgttaaaaaatacaattacctctaattagtagtacgcgtaaatgttttacagaatgaaaggcgtgctttttattttcttacttcgttacattggtggcgaaagaagtctgtatgaaaatcagttctttgctgacacaagttccatttgttacaaatgaattctaataaaaatgtcagtgttatgc

SEQ ID NO: 24674 - DNA, 521 bp, Homo sapiens
  source 1..521: mol_type = unassigned DNA
gcggccgctgctccgcgggattaaattggccgcccggaggcggcggcgcggccgtggcggggcgcgaaggcgctggaggaaagtgttggcggcggcgcgggaggcggtggcggcggctgcccggggccaacatgaccaggctctgaaagtgttccagctgaaatttcagatcggacagactcgctgcggctccggaggcagtgattccaagctgctcgcgcacgctgctgccaagctgcaggatggtgcacgtagccaggctgctgctgctgctcctcactttcttcctccgcacggatgctgagacacctccaaggtttacacgaacacccgttgatcagacaggggtctctggcggagttgcctctttcatctgccaagctacgggagacccaagacctaaaattgtctggaacaaaaaaggaaagaaagtcagcaatcagagatttgaggtaatagagtttgacgatgggtctggatcagttctcagaatacaacccttacggactccgagggatgag

SEQ ID NO: 24675 - DNA, 5039 bp, Homo sapiens
  source 1..5039: mol_type = unassigned DNA
ccggaggcagtgattccaagctgctcgcgcacgctgctgccaagctgcaggatggtgcacgtagccaggctgctgctgctgctcctcactttcttcctccgcacggatgctgagacacctccaaggtttacacgaacacccgttgatcagacaggggtctctggcggagttgcctctttcatctgccaagctacgggagacccaagacctaaaattgtctggaacaaaaaaggaaagaaagtcagcaatcagagatttgaggtaatagagtttgacgatgggtctggatcagttctcagaatacaacccttacggactccgagggatgaggccatttatgaatgtgtggcctcaaataatgtgggagaaataagtgtatccaccagactcacagttttgcgggaagatcaaattcccaggggcttccctaccattgacatgggcccacagttgaaggtggttgagcgtactcgcacggccaccatgctttgtgcagccagtggtaatccggatccagaaatcacttggtttaaagatttcttacctgtggacacaagcaacaacaatggtcgtattaagcagttacgatcagaatctattggtggtacaccaataagaggagcccttcagattgagcagagtgaagagtctgaccaaggaaaatatgagtgtgttgccaccaacagcgcgggcactcgctattccgctcctgccaatttatatgtcagagagctgcgagaagttcgccgtgtcccaccaagattctctatcccacccactaatcatgaaatcatgccaggcggaagcgttaatatcacctgtgtggccgtggggtcaccaatgccttatgtaaagtggatgttgggggcagaagatctgacacctgaagatgatatgccaataggaagaaatgtgctagaactgaatgatgtaagacagtcagcaaattacacctgtgttgctatgtcaacactgggtgtcattgaagcaatagcacagatcactgtcaaagccttacccaaacctccaggaactcctgtagtgaccgagagcacagctacaagcatcacactgacgtgggactctgggaaccctgagcctgtttcttattacataattcagcataaacctaaaaactctgaggaactttacaaagaaattgatggggtggcgaccacacgctacagtgtcgctggactaagtccctactcggattatgaattcagggttgttgctgtcaataacattgggcgggggcctcccagcgaacctgtgctaacacaaacctcagagcaagcaccatccagtgccccgagggatgtccaggcacgaatgttgagttcgaccaccattttggtacagtggaaggaacctgaagagccaaatggacagatccaaggatatagagtttattatacaatggatcccactcaacatgtcaacaactggatgaaacacaatgtagctgacagccaaatcactactattggcaacttagtgccccagaaaacatattctgtcaaagtcctggcttttacctcaattggagatggtcccctttcaagtgacatacaagtcatcactcagacaggagtaccagggcagccactaaacttcaaagcagaacctgagtctgaaacaagtattttgctctcttggacacctccacgttcagataccattgccaactatgaactggtctacaaagatggggagcatggagaggagcaacgaattaccattgagccagggacatcatataggctgcaaggactgaaaccaaacagcttatactatttccgtctggctgcacgctcccctcaaggcctgggtgcttctactgcagaaatatcagctagaaccatgcagtcaatgtttgcaaaaaattttcatgtcaaagcagtaatgaagacttccgtgttgctgtcttgggagattccagagaattataactccgccatgcctttcaaaattctttatgatgatgggaaaatggtagaagaagtggatggccgagccacacagaagttaattgtcaacctgaagcctgagaaatcatattcatttgtgctgacaaatcgtggaaacagtgctggtgggctgcagcacagggtcacggcaaagactgcaccagatgtattacgtaccaagcctgccttcattgggaagaccaacttggatggcatgattactgtgcaactgcctgaagtacctgcaaatgagaatataaaaggttactacataataattgtgcctttgaagaaatctcgcgggaaatttatcaagccatgggagagtccagatgaaatggaattagatgagctgcttaaggagatatctaggaagcgcagaagcatccgttatgggagagaagttgaattaaagccatatattgccgctcactttgatgtccttcccactgagttcaccctgggggatgacaagcattatggtggatttacaaacaagcaactccaaagtggtcaagaatatgtcttctttgtgttagcagtaatggaacatgcagagtctaagatgtatgcaaccagcccttactccgaccccgtggtgtcaatggatctggatccgcagccaatcacggatgaagaagaaggcttgatctgggttgtaggtcctgtccttgcagtggtctttatcatctgcattgtcattgctattcttctttataaaagtaaacccgacaggaagagggcagagtccgactctagaaaaagcagcataccgaacaataaggagatcccttcacaccacccaacagaccctgtagaactgaggcgccttaactttcaaacaccgggtatggctagccatcctccaatacccatcttggaacttgcagaccacattgaaagattgaaagcaaatgacaacttgaagttttcccaggaatatgagtcaattgaccctggccagcagttcacttgggaacattcaaacttggaagtaaacaaaccaaagaatagatacgcgaatgtaatcgcatatgatcattcccgggttctcctatcagctatagaagggatcccaggaagtgactatgtgaatgccaactacatagatgggtataggaagcaaaatgcctatattgcaacacagggatctctccccgaaacatttggggacttttggagaatgatatgggaacaacggagtgccacagttgtcatgatgacaaaactagaagaaagatcaagggtgaagtgtgaccagtattggcctagcagaggcacagaaacccacggactcgttcaagtaacgctgcttgatactgtggagctggccacatattgtgttcgaacatttgcactttacaagaatggttcaagtgagaagagagaagtgagacaattccagttcaccgcctggcctgatcatggtgttccagaacaccctacaccttttctagctttcttacgtagagtcaaaacctgtaaccctcccgatgctggtccgatggttgtgcactgcagtgcgggagttggccggactggttgcttcatcgtcatagatgccatgttagaaagaataaagcatgaaaaaactgtagatatttatggccatgtaactttaatgagagcccagaggaactatatggttcaaacagaagaccaatacatctttatccatgatgcactgttagaagcagtgacttgtggaaataccgaagtgccagctagaaacttgtatgcctacattcagaagctgacacaaatagaaacgggagagaatgtcacaggaatggagctcgaatttaagcgtctagccagctcaaaagctcacacctcaaggtttatcagtgccaatcttccatgtaataaattcaaaaatcgccttgttaatattatgccatatgaatccacaagggtatgcctgcagcctatccgtggagtagaaggatctgattacatcaatgccagttttattgatggatacagacaacagaaagcctacatcgctacccaggggcccttggcagagaccactgaagacttctggcggatgctctgggaacacaattccaccatagttgtgatgctcaccaagctgcgtgaaatgggcagagagaaatgtcaccaatactggccagcagaacggtctgcaagataccagtactttgttgtagatcccatggctgagtacaacatgccacagtatatcctaagggaattcaaggtcacagatgccagggacggccagtcccgaacagtaaggcagttccagttcactgactggccagagcaaggagtgccaaagtccggagaaggatttattgacttcatcggccaagtccataaaacaaaagaacagtttggccaagatggacccatttcagtccattgcagcgcgggcgttggaagaactggagtcttcataacgctaagcattgttttggaaagaatgagatatgaaggagttgtagatatcttccagactgtcaaaatgttaagaacacaacgaccagctatggtacagacagaggatcaatatcagttttcctatcgtgccgcactagagtacctgggcagctttgaccactatgcaacgtagaaacccctgacccattctggatttttactacaggcccttcaatatccatggagtctcttctgagccatacagggcacttgagaagtccttcttaacttctagctaacaactacttagtgggactattacacacaaaacaaattaaaaacaaattattccaggtggaccaagaattcacagtttaataatctaacctgaaaaataatgaagagaatcctgactgatgaggcatctgaaggattttatttacagatacctcaaggattcaaaatcaagggaagaagaaatcacagcaaagaaccaccatcttattcaggattgcttgaaaggtgcaaggagaaattgccagaatgctgcagttcagcacaagatatgtgctggtgtggcttctcacaatgaaacggactctgctttgacatcgccccttcccaccatactgctcataataacattttagggggaaaggggag

SEQ ID NO: 24676 - DNA, 8239 bp, Homo sapiens
  source 1..8239: mol_type = unassigned DNA
gctctgaaagtgttccagctgaaatttcagatcggacagactcgctgcggctccggaggcagtgattccaagctgctcgcgcacgctgctgccaagctgcaggatggtgcacgtagccaggctgctgctgctgctcctcactttcttcctccgcacggatgctgagacacctccaaggtttacacgaacacccgttgatcagacaggggtctctggcggagttgcctctttcatctgccaagctacgggagacccaagacctaaaattgtctggaacaaaaaaggaaagaaagtcagcaatcagagatttgaggtaatagagtttgacgatgggtctggatcagttctcagaatacaacccttacggactccgagggatgaggccatttatgaatgtgtggcctcaaataatgtgggagaaataagtgtatccaccagactcacagttttgcgggaagatcaaattcccaggggcttccctaccattgacatgggcccacagttgaaggtggttgagcgtactcgcacggccaccatgctttgtgcagccagtggtaatccggatccagaaatcacttggtttaaagatttcttacctgtggacacaagcaacaacaatggtcgtattaagcagttacgatcaggtagggtcttccatacaggagcccttcagattgagcagagtgaagagtctgaccaaggaaaatatgagtgtgttgccaccaacagcgcgggcactcgctattccgctcctgccaatttatatgtcagagtaaatagaaaagttcgccgtgtcccaccaagattctctatcccacccactaatcatgaaatcatgccaggcggaagcgttaatatcacctgtgtggccgtggggtcaccaatgccttatgtaaagtggatgttgggggcagaagatctgacacctgaagatgatatgccaataggaagaaatgtgctagaactgaatgatgtaagacagtcagcaaattacacctgtgttgctatgtcaacactgggtgtcattgaagcaatagcacagatcactgtcaaagccttacccaaacctccaggaactcctgtagtgaccgagagcacagctacaagcatcacactgacgtgggactctgggaaccctgagcctgtttcttattacataattcagcataaacctaaaaactctgaggaactttacaaagaaattgatggggtggcgaccacacgctacagtgtcgctggactaagtccctactcggattatgaattcagggttgttgctgtcaataacattgggcgggggcctcccagcgaacctgtgctaacacaaacctcagagcaagcaccatccagtgccccgagggatgtccaggcacgaatgttgagttcgaccaccattttggtacagtggaaggaacctgaagagccaaatggacagatccaaggatatagagtttattatacaatggatcccactcaacatgtcaacaactggatgaaacacaatgtagctgacagccaaatcactactattggcaacttagtgccccagaaaacatattctgtcaaagtcctggcttttacctcaattggagatggtcccctttcaagtgacatacaagtcatcactcagacaggagtaccagggcagccactaaacttcaaagcagaacctgagtctgaaacaagtattttgctctcttggacacctccacgttcagataccattgccaactatgaactggtctacaaagatggggagcatggagaggagcaacgaattaccattgagccagggacatcatataggctgcaaggactgaaaccaaacagcttatactatttccgtctggctgcacgctcccctcaaggcctgggtgcttctactgcagaaatatcagctagaaccatgcagtcaatgtttgcaaaaaattttcatgtcaaagcagtaatgaagacttccgtgttgctgtcttgggagattccagagaattataactccgccatgcctttcaaaattctttatgatgatgggaaaatggtagaagaagtggatggccgagccacacagaagttaattgtcaacctgaagcctgagaaatcatattcatttgtgctgacaaatcgtggaaacagtgctggtgggctgcagcacagggtcacggcaaagactgcaccagatgtattacgtaccaagcctgccttcattgggaagaccaacttggatggcatgattactgtgcaactgcctgaagtacctgcaaatgagaatataaaaggttactacataataattgtgcctttgaagaaatctcgcgggaaatttatcaagccatgggagagtccagatgaaatggaattagatgagctgcttaaggagatatctaggaagcgcagaagcatccgttatgggagagaagttgaattaaagccatatattgccgctcactttgatgtccttcccactgagttcaccctgggggatgacaagcattatggtggatttacaaacaagcaactccaaagtggtcaagaatatgtcttctttgtgttagcagtaatggaacatgcagagtctaagatgtatgcaaccagcccttactccgaccccgtggtgtcaatggatctggatccgcagccaatcacggatgaagaagaaggcttgatctgggttgtaggtcctgtccttgcagtggtctttatcatctgcattgtcattgctattcttctttataaaagaaaaccctataggaagagggcagagtccgactctagaaaaagcagcataccgaacaataaggagatcccttcacaccacccaacagaccctgtagaactgaggcgccttaactttcaaacaccgggtatggctagccatcctccaatacccatcttggaacttgcagaccacattgaaagattgaaagcaaatgacaacttgaagttttcccaggaatatgagtcaattgaccctggccagcagttcacttgggaacattcaaacttggaagtaaacaaaccaaagaatagatacgcgaatgtaatcgcatatgatcattcccgggttctcctatcagctatagaagggatcccaggaagtgactatgtgaatgccaactacatagatgggtataggaagcaaaatgcctatattgcaacacagggatctctccccgaaacatttggggacttttggagaatgatatgggaacaacggagtgccacagttgtcatgatgacaaaactagaagaaagatcaagggtgaagtgtgaccagtattggcctagcagaggcacagaaacccacggactcgttcaagtaacgctgcttgatactgtggagctggccacatattgtgttcgaacatttgcactttacaagaatggttcaagtgagaagagagaagtgagacaattccagttcaccgcctggcctgatcatggtgttccagaacaccctacaccttttctagctttcttacgtagagtcaaaacctgtaaccctcccgatgctggtccgatggttgtgcactgcagtgcgggagttggccggactggttgcttcatcgtcatagatgccatgttagaaagaataaagcatgaaaaaactgtagatatttatggccatgtaactttaatgagagcccagaggaactatatggttcaaacagaagaccaatacatctttatccatgatgcactgttagaagcagtgacttgtggaaataccgaagtgccagctagaaacttgtatgcctacattcagaagctgacacaaatagaaacgggagagaatgtcacaggaatggagctcgaatttaagcgtctagccagctcaaaagctcacacctcaaggtttatcagtgccaatcttccatgtaataaattcaaaaatcgccttgttaatattatgccatatgaatccacaagggtatgcctgcagcctatccgtggagtagaaggatctgattacatcaatgccagttttattgatggatacagacaacagaaagcctacatcgctacccaggggcccttggcagagaccactgaagacttctggcggatgctctgggaacacaattccaccatagttgtgatgctcaccaagctgcgtgaaatgggcagagagaaatgtcaccaatactggccagcagaacggtctgcaagataccagtactttgttgtagatcccatggctgagtacaacatgccacagtatatcctaagggaattcaaggtcacagatgccagggacggccagtcccgaacagtaaggcagttccagttcactgactggccagagcaaggagtgccaaagtccggagaaggatttattgacttcatcggccaagtccataaaacaaaagaacagtttggccaagatggacccatttcagtccattgcagcgcgggcgttggaagaactggagtcttcataacgctaagcattgttttggaaagaatgagatatgaaggagttgtagatatcttccagactgtcaaaatgttaagaacacaacgaccagctatggtacagacagaggatcaatatcagttttcctatcgtgccgcactagagtacctgggcagctttgaccactatgcaacgtagaaacccctgacccattctggatttttactacaggcccttcaatatccatggagtctcttctgagccatacagggcacttgagaagtccttcttaacttctagctaacaactacttagtgggactattacacacaaaacaaattaaaaacaaattattccaggtggaccaagaattcacagtttaataatctaacctgaaaaataatgaagagaatcctgactgatgaggcatctgaaggattttatttacagatacctcaaggattcaaaatcaagggaagaagaaatcacagcaaagaaccaccatcttattcaggattgcttgaaaggtgcaaggagaaattgccagaatgctgcagttcagcacaagatatgtgctggtgtggcttctcacaatgaaacggactctgctttgacatcgccccttcccaccatactgctcataataacattttagggggaaaggggagggaatgtttaaaaagaaagtccttgatttagttttttagtattgtaaagatactgctgacctgtgcttcatttctaactgtgtaaacttttttttaacaaaatgtatcattcgataaagtgaattttaaaaaagttacataactcttcatttttttatttccaaatcgtaggtttttttaagctgtagaactgttatctgtaatatcttgctgtagaaatatcaaatcatttgaaaatttgcacatttttgtgcaaaactcaatctacagtatcagtctcgtcagatatattaattttacacttcagttttgattggtgagaaagtacccattctcttcaaataatcaaagataattattattttgttttgtttttggaatcaacagggaggcgcaaagtataaagttgctgctaacatatatacatatatatccatattttataagggtgtctatgtatatatagacagtgtgtccacacaaaaaatagatacagttatcagtcagtcagttcttccatgatttagtttttttaaacgtagaaaagctattgtaaacatctctttccatttattcttaattttttgacatattggtatttctttaaagggaaatgaggaatgcacatcagtgattgattgtcaaacctcaccccctgatttcctacctaatctacccccacctaaccaatcaatcacatccacaaattgttttgtttgtttgttagtcaggcttccaacaaagttcaatatttctaacactctagtgcaataaaaattattattaaatagctaagaggtgtgcatgtgggaaaggtcagtgcatatccctttaggaggggagaatgttgtaatatatcagctatcgagttgtttaaaaaaagtgtattcaatcgtatattgtctatagtatgtgctatgaaatttgcatttatgatatgtaacaggggcaaagccaaattcatgttactctgttcagtcagaaacattttgtggcatacagcattcctgggaagtgctgtactttgtttcgttttggttttagttttgcatttagagtgccttataattgatgcctattttaatagcatttctttttagcttttggttcgtatttccattcactgttcgtatctgttactttctattaaagcattatctgtttaccacatgtacaaaaactctttgaataatatgcattcctagttttcagccaagtcggggatgttagtgattgtaccagcccaaagcacttggataatcagggcccttcttccttttataatcaatcatcaacatcagaaaaagctacttgttttatttatattcccttccaaatccgctctggaacatgcagtaactgcaccaaacttattttagtaacaaatatcattggcaactttggaatatatttgatattccattaggatttttctaaaaggggaaataaactatatatatatatgtatcttacccccaattcttccaacagaatttctataggaagccatggatgatggcataagtttgccacatattacatgattttaaataatcctcaaaatacccaaggaactcttaaagagttttggtatgagtatactactttggtttaattttagcttcatggatgttctgcatggaaggatttttgttttccacattttcccattgctagcagagtgaaatccaagagaccaaacatttgcaagcattgtatttgagcacttttgtaaaaaacaaagaaaaagaaaaaaaagaaaatatatataatactaaaaaaaagtatctagaaggctacctcagaatgagactctctaacctacatcagaaccagagaagaatgtgcactatgtgggtctgttatcattattttcttttagtttgtatctttttggagatttatccaagtgccagattactcagtgctataattttcttttagttaaacaaagggggtcagacagacattgcatcatccagacatgccttgttggacatgtagaatccgatggagcactgcacaccagaatgattggccaatgagcagcttctctccctgaaacaataactgcccatttggcaaagggaaagatgacaataatcagaagaagaaaatgaatgggatgcataccatagacgaacgaggcggagactattgcgggaatcttactgttcaggagctgttcctagaactaactcccttactgtcattgatgtgcattccactctgtgcttttctgtacaaccattcaagttttaatttcccaggtgaaccatctttatctgccattaccacaagctttcaagtttccagttattttcatcatcataaccagtacggtgctattatttacctatgtacgtgtagttatgtataattttgtaattagttacaatggtaaaaaaaatcaaaatatataaaaagtgatttgtacagaactttattttagctcttttttaaaaatgatttgcatggttagaaaacggcgaggacagccaggggagggaagggcctctagggaactttgcactttctatacctttgtactatgcactgccctattgattctacacccaataatgatattacttgaacccatctgtaagaaactgcttcggaaattcatttgtgtgtatgtaaataacacaacatagaaacaggaagggaaaaaagtctgcagtaatgcacgtattttttttctttcctgtttattttcggttttgctttaagtccttttatttttaattccctttttgtttttctttttgggttttggttccttttgggtttatgggtgccctgatactccagcagagatcagaaggctacagatccattctatccatccgttatgtggctttgccatcccagcttggagtgtctttacaaagataataacagttgtgttctttgctctcgttttggatgcatagactgaaaaattaaaacaaataacttgtaaaatggcttgttaaaaaatacaattacctctaattagtagtacgcgtaaatgttttacagaatgaaaggcgtgctttttattttcttacttcgttacattggtggcgaaagaagtctgtatgaaaatcagttctttgctgacacaagttccatttgttacaaatgaattctaataaaaatgtcagtgttatgc

SEQ ID NO: 24677 - DNA, 6210 bp, Homo sapiens
  source 1..6210: mol_type = unassigned DNA
caggctctgaaagtgttccagctgaaatttcagatcggacagactcgctgcggctccggaggcagtgattccaagctgctcgcgcacgctgctgccaagctgcaggatggtgcacgtagccaggctgctgctgctgctcctcactttcttcctccgcacggatgctgagacacctccaaggtttacacgaacacccgttgatcagacaggggtctctggcggagttgcctctttcatctgccaagctacgggagacccaagacctaaaattgtctggaacaaaaaaggaaagaaagtcagcaatcagagatttgaggtaatagagtttgacgatgggtctggatcagttctcagaatacaacccttacggactccgagggatgaggccatttatgaatgtgtggcctcaaataatgtgggagaaataagtgtatccaccagactcacagttttgcgggaagatcaaattcccaggggcttccctaccattgacatgggcccacagttgaaggtggttgagcgtactcgcacggccaccatgctttgtgcagccagtggtaatccggatccagaaatcacttggtttaaagatttcttacctgtggacacaagcaacaacaatggtcgtattaagcagttacgatcagaatctattggtggtacaccaataagaggagcccttcagattgagcagagtgaagagtctgaccaaggaaaatatgagtgtgttgccaccaacagcgcgggcactcgctattccgctcctgccaatttatatgtcagagagctgcgagaagttcgccgtgtcccaccaagattctctatcccacccactaatcatgaaatcatgccaggcggaagcgttaatatcacctgtgtggccgtggggtcaccaatgccttatgtaaagtggatgttgggggcagaagatctgacacctgaagatgatatgccaataggaagaaatgtgctagaactgaatgatgtaagacagtcagcaaattacacctgtgttgctatgtcaacactgggtgtcattgaagcaatagcacagatcactgtcaaagccttacccaaacctccaggaactcctgtagtgaccgagagcacagctacaagcatcacactgacgtgggactctgggaaccctgagcctgtttcttattacataattcagcataaacctaaaaactctgaggaactttacaaagaaattgatggggtggcgaccacacgctacagtgtcgctggactaagtccctactcggattatgaattcagggttgttgctgtcaataacattgggcgggggcctcccagcgaacctgtgctaacacaaacctcagagcaagcaccatccagtgccccgagggatgtccaggcacgaatgttgagttcgaccaccattttggtacagtggaaggaacctgaagagccaaatggacagatccaaggatatagagtttattatacaatggatcccactcaacatgtcaacaactggatgaaacacaatgtagctgacagccaaatcactactattggcaacttagtgccccagaaaacatattctgtcaaagtcctggcttttacctcaattggagatggtcccctttcaagtgacatacaagtcatcactcagacaggagtaccagggcagccactaaacttcaaagcagaacctgagtctgaaacaagtattttgctctcttggacacctccacgttcagataccattgccaactatgaactggtctacaaagatggggagcatggagaggagcaacgaattaccattgagccagggacatcatataggctgcaaggactgaaaccaaacagcttatactatttccgtctggctgcacgctcccctcaaggcctgggtgcttctactgcagaaatatcagctagaaccatgcagtcaaagccgtcagctcctcctcaagacattagttgcaccagcccaagttccactagtattttggtaagttggcaacctccaccagtggaaaaacagaatggcattatcactgaatactccatcaagtacactgcagtggatggggaagatgacaagcctcacgagattttgggaattccttcggacactaccaaataccttttggaacagctggaaaaatggactgaataccggatcactgtgacagcccatacagatgtcggccctggccctgagagcttgtccgtgttgattcgaaccaatgaagatgttcctagtggtcctcctcgcaaagtcgaggtagaggctgtcaactcaacatctgttaaagtctcatggcgctcacccgtgcccaataaacagcatggccagataagaggatatcaggtgcattatgtgaggatggaaaatggtgagcccaagggccagcccatgctgaaagatgtcatgctggctgatgcacagtgggaatttgatgatactactgaacatgacatgatcatttctgggctccagcctgaaacttcctactccctcaccgtcacagcctacacaaccaaaggagatggtgctcgcagcaagcccaaactggtgtccaccactggggcagttccagggaaacctcggcttgtgattaaccacactcagatgaatactgctcttattcagtggcaccctccggtggacacatttggacctcttcagggctaccgtctaaaatttggccgcaaggatatggagccacttactactcttgagttctctgaaaaagaagatcactttacagctacagacatccacaagggagcatcatacgtcttcaggctctcagccagaaacaaagtgggctttggggaggagatggtgaaggagatttccattccagaagaagtaccaactggattccctcaaaaccttcactcagaaggcaccacttcaacctccgtccagttatcttggcaaccacctgtcctggcagagagaaatggcattatcaccaagtatacccttctttatagggatatcaacatcccccttctcccgatggagcagcttattgttccagctgacaccactatgacactcactggcttaaaaccagataccacatacgatgtaaaagtacgtgctcatacgagcaaagggcccgggccatatagtcccagtgtccagttcaggacactgcctgtggatcaagtgtttgcaaaaaattttcatgtcaaagcagtaatgaagacttccgtgttgctgtcttgggagattccagagaattataactccgccatgcctttcaaaattctttatgatgatgggaaaatggtagaagaagtggatggccgagccacacagaagttaattgtcaacctgaagcctgagaaatcatattcatttgtgctgacaaatcgtggaaacagtgctggtgggctgcagcacagggtcacggcaaagactgcaccagatgtattacgtaccaagcctgccttcattgggaagaccaacttggatggcatgattactgtgcaactgcctgaagtacctgcaaatgagaatataaaaggttactacataataattgtgcctttgaagaaatctcgcgggaaatttatcaagccatgggagagtccagatgaaatggaattagatgagctgcttaaggagatatctaggaagcgcagaagcatccgttatgggagagaagttgaattaaagccatatattgccgctcactttgatgtccttcccactgagttcaccctgggggatgacaagcattatggtggatttacaaacaagcaactccaaagtggtcaagaatatgtcttctttgtgttagcagtaatggaacatgcagagtctaagatgtatgcaaccagcccttactccgaccccgtggtgtcaatggatctggatccgcagccaatcacggatgaagaagaaggcttgatctgggttgtaggtcctgtccttgcagtggtctttatcatctgcattgtcattgctattcttctttataaaaggaagagggcagagtccgactctagaaaaagcagcataccgaacaataaggagatcccttcacaccacccaacagaccctgtagaactgaggcgccttaactttcaaacaccgggtatggctagccatcctccaatacccatcttggaacttgcagaccacattgaaagattgaaagcaaatgacaacttgaagttttcccaggaatatgagtcaattgaccctggccagcagttcacttgggaacattcaaacttggaagtaaacaaaccaaagaatagatacgcgaatgtaatcgcatatgatcattcccgggttctcctatcagctatagaagggatcccaggaagtgactatgtgaatgccaactacatagatgggtataggaagcaaaatgcctatattgcaacacagggatctctccccgaaacatttggggacttttggagaatgatatgggaacaacggagtgccacagttgtcatgatgacaaaactagaagaaagatcaagggtgaagtgtgaccagtattggcctagcagaggcacagaaacccacggactcgttcaagtaacgctgcttgatactgtggagctggccacatattgtgttcgaacatttgcactttacaagaatggttcaagtgagaagagagaagtgagacaattccagttcaccgcctggcctgatcatggtgttccagaacaccctacaccttttctagctttcttacgtagagtcaaaacctgtaaccctcccgatgctggtccgatggttgtgcactgcagtgcgggagttggccggactggttgcttcatcgtcatagatgccatgttagaaagaataaagcatgaaaaaactgtagatatttatggccatgtaactttaatgagagcccagaggaactatatggttcaaacagaagaccaatacatctttatccatgatgcactgttagaagcagtgacttgtggaaataccgaagtgccagctagaaacttgtatgcctacattcagaagctgacacaaatagaaacgggagagaatgtcacaggaatggagctcgaatttaagcgtctagccagctcaaaagctcacacctcaaggtttatcagtgccaatcttccatgtaataaattcaaaaatcgccttgttaatattatgccatatgaatccacaagggtatgcctgcagcctatccgtggagtagaaggatctgattacatcaatgccagttttattgatggatacagacaacagaaagcctacatcgctacccaggggcccttggcagagaccactgaagacttctggcggatgctctgggaacacaattccaccatagttgtgatgctcaccaagctgcgtgaaatgggcagagagaaatgtcaccaatactggccagcagaacggtctgcaagataccagtactttgttgtagatcccatggctgagtacaacatgccacagtatatcctaagggaattcaaggtcacagatgccagggacggccagtcccgaacagtaaggcagttccagttcactgactggccagagcaaggagtgccaaagtccggagaaggatttattgacttcatcggccaagtccataaaacaaaagaacagtttggccaagatggacccatttcagtccattgcagcgcgggcgttggaagaactggagtcttcataacgctaagcattgttttggaaagaatgagatatgaaggagttgtagatatcttccagactgtcaaaatgttaagaacacaacgaccagctatggtacagacagaggatcaatatcagttttcctatcgtgccgcactagagtacctgggcagctttgaccactatgcaacgtagaaacccctgacccattctggatttttactacaggcccttcaatatccatggagtctcttctgagccatacagggcacttgagaagtccttcttaacttctagctaacaactacttagtgggactattacacacaaaacaaattaaaaacaaattattccaggtggaccaaggactctgctttgacatcgccccttcccaccatactgctcataataacattttagggggaaaggggagggaatgtttaaaaagaaagtccttgatttagttttttagtattgtaaagatactgctgacctgtgcttcatttctaactgtgtaaacttttttttaacaaaatgtatcattcgataaagtgaatttt

SEQ ID NO: 24678 - DNA, 5331 bp, Homo sapiens
  source 1..5331: mol_type = unassigned DNA
agccggagctggagccgaggcggcggcgggacgcggccggccggacaaatttcctgctaggctgcggacagcgggcggcaggagccggcgcgagcggcttcaggaacccacggcctctgcgcgtccccgcgacccttcttcgcgcccggcgaagacagccgggcgccccggagggcggcgggcaggcgcccgggagatgcggagcctccgctgcagcgcgatctgcgcgaccagaccggcccccccgagactatagccttcactttccctcggtccaccatggagcccttgtgtccactcctgctggtgggttttagcttgccgctcgccagggctctcaggggcaacgagaccactgccgacagcaacgagacaaccacgacctcaggccctccggacccgggcgcctcccagccgctgctggcctggctgctactgccgctgctgctcctcctcctcgtgctccttctcgccgcctacttcttcaggttcaggaagcagaggaaagctgtggtcagcaccagcgacaagaagatgcccaacggaatcttggaggagcaagagcagcaaagggtgatgctgctcagcaggtcaccctcagggcccaagaagtattttcccatccccgtggagcacctggaggaggagatccgtatcagatccgccgacgactgcaagcagtttcgggaggagttcaactcattgccatctggacacatacaaggaacttttgaactggcaaataaagaagaaaacagagaaaaaaacagatatcccaacatccttcccaatgaccattctagggtgattctgagccaactggatggaattccctgttcagactacatcaatgcttcctacatagatggttacaaagagaagaataaattcatagcagctcaaggtcccaaacaggaaacggttaacgacttctggagaatggtctgggagcaaaagtctgcgaccatcgtcatgttaacaaacttgaaagaaaggaaagaggaaaagtgccatcagtactggcccgaccaaggctgctggacctatggaaacatccgggtgtgcgtggaggactgcgtggttttggtcgactacaccatccggaagttctgcatacagccacagctccccgacggctgcaaagcccccaggctggtctcacagctgcacttcaccagctggcccgacttcggagtgccttttacccccattgggatgctgaagttcctcaagaaagtaaagacgctcaaccccgtgcacgctgggcccatcgtggtccactgtagcgcgggcgtgggccggacgggcaccttcattgtgatcgatgccatgatggccatgatgcacgcggagcagaaggtggatgtgtttgaatttgtgtctcgaatccgtaatcagcgccctcagatggttcaaacggatatgcagtacacgttcatctaccaagccttactcgagtactacctctacggggacacagagctggacgtgtcctccctggagaagcacctgcagaccatgcacggcaccaccacccacttcgacaagatcgggctggaggaggagttcaggaaattgacaaatgtccggatcatgaaggagaacatgaggacgggcaacttgccggcaaacatgaagaaggccagggtcatccagatcatcccgtatgacttcaaccgagtgatcctttccatgaaaaggggtcaagaatacacagactacatcaacgcatccttcatagacggctaccgacagaaggactatttcatcgccacccaggggccactggcacacacggttgaggacttctggaggatgatctgggaatggaaatcccacactatcgtgatgctgacggaggtgcaggagagagagcaggataaatgctaccagtattggccaaccgagggctcagttactcatggagaaataacgattgagataaagaatgataccctttcagaagccatcagtatacgagactttctggtcactctcaatcagccccaggcccgccaggaggagcaggtccgagtagtgcgccagtttcacttccacggctggcctgagatcgggattcccgccgagggcaaaggcatgattgacctcatcgcagccgtgcagaagcagcagcagcagacaggcaaccaccccatcaccgtgcactgcagtgccggagctgggcgaacaggtacattcatagccctcagcaacattttggagcgagtaaaagccgagggacttttagatgtatttcaagctgtgaagagtttacgacttcagagaccacatatggtgcaaaccctggaacagtatgaattctgctacaaagtggtacaagattttattgatatattttctgattatgctaatttcaaatgaagattcctgccttaaaatattttttaatttaatggtcagtatattttgtaaaaatcatgttaatttatttcatagttgacattaatatcttccctaatttctttgtatatattttgttatgccttaaaggccacctgctatacagttgttaaatcttaaatatgctttttaaaaattggaataatgtattaaggtcaaataatatcccataaaatatatatttctgctaatattagtaaatatcttaatttttcattagattcatatcatttaatttcacatattcaacacctttaaatgttgtaatcttaatatgcgaagtgtgcctctgcaagatactaacacaaagctcatgttaagaaaacagttgaggactcagaagtcagttcgaaaatgcactttcctaacagtgaattcacaaccctgaacagcagcatttttggaaggcaaactgttcgtgatggtacaatgtaaatggggacttctgtaaagttctcagtttcggtccatgtggtttatctttacattttaaagatcaaagaagtctttacaacctgaatccaggtctaaaacacactagagtagctggtgactataaataatattttaaaatgctgtgtctacaccatcaagactgtgtctacactatcttggctgaacgagaagagatgtaaatgctgggtggtcccgttgacccacggcgttgggtacaacaaaaccagccatcggagttacaccccaaagcaccatttgctgtccagctgcctgtcgtttggcccagaccaccctcagaaaaaaaccagctgcctctcccattctcccctcccgttctgccacagcggcctgggctggtccagtgctatgcctggaggctcaacacaaaacttcccatccaaacattcagatgaactgagcgtcttacacacgcagtacagaggagcacacattaggatagaaacagtagaataaccacgggcaattaaactttaaattttctgagcagcattttggtatttaaacatttcttgtaaaaagctgagacagtttgtaagaaaagaatccttaaaatctagatttataccattttttaaagtcccacctttcaatgtttaataaaacaaaaagagaaatccttaatctaaaagctaaattatttttgaatggaaatactactgagaccattgacactggataacagtaatgatcccattaccagataagattgactgacggggaaaaaaaaaaaaaaagaatggggtgtgaatgtaccaacactgaatcttacagcagttatctttctatggccattaggtacctagcagatgtgcacaatataaacaaaaagatatctggcctaccttactactaaaagcatttaacacgtgcatttttggtacttttttttttgttttctaaaagctacataaaggccttatttgacattttcactgataactgatcgcaccctcatgttgcagtgttcgtcccctattcattaacagtgtgtgcaaatgcaaccccaggacacattattgttctgatagatgctcacagggaatcaagcttctcgcccactccacggctctgagccccatccaagggcaagacttggtgcccagctggaaggacgaaagcacactttgtgaccgccatcctcaccagctgcatgcctgggctgcacactgctgaacgtgctcctctctccttctctgtacaatgattcagcatctcggcggaagaggaaaatggagctttttgaggctcgccaggtcccttttgttttcaccattaaaattccaaacccaaagcctttgtttgactgaaggagaagagagggaagtaagcttctgttcagcacctgaaccctagaaaaagagccagtttgctacgatgaaggtgacatttctctggtcatttatttgagagttcgaagtcaaagtcgaggggcaccggctttggttcatgtctaggagccctctgtcagaatccttgaagccctttaatggtctaactggcatctcttgtatcaagaagtacctttaaggtagaccttttcagggtgccctcaggaaagggccctgctcatgtttttttcctgtccccttagaccaaccccaggtgtccactgcaggggttctgcctgttcccaaactttttccattccaggaacaaaggagaagccactttccccaggacgcaagactctcccctccactgtccgggacagcgttcgccctttagcggggaggtcattacagcctcatggcctctaccaaggccccagatcacaggatctcctgggccttggagcacctcacgctgggggaatcaatccctgagggactcagaatcttctccgtgcaacctggaaagttcatctcttgtttccttcagtcaaagaaagtccattgtacataacaaaacagcccccaaacagcccagtgccgacaccattgttcctttcacactttcctttgttgcatgcagttgggttcaaatgccaaatagtgattagaagacgaccattctgatctgtgtgtgatctggtcactatgtgactgcctttacggtttctctccatgtgctatatgaatgaagaatgcataccagtgttttaaaaggtatttttatgtgtttttaaacacttttttaaatgagcctgacacctgtgtttcagcatttggagacatccccatgttattcttttaagtgtataattactgatacttttttgtttgtttgtttaactaagttgtgtttaacttatgtgcagtctttataatgtatgtatgttattacagtttcaactatcatattttctttgattacatttataatttgatcttgctctgattataatgccagtgaatgttgctgaactctttgtatatgcaaattgcaagatttaaaccattctgatgcaaggataaacctttactttgactacca

SEQ ID NO: 24679 - DNA, 4957 bp, Homo sapiens
  source 1..4957: mol_type = unassigned DNA
gtgcagcagagggcagctgagaggctgggtggctgggcctgggagacacacagaggccaggccttagcgcggctcagccatgagcaacaggagtagcttttcccggctcacctggttcaggaagcagaggaaagctgtggtcagcaccagcgacaagaagatgcccaacggaatcttggaggagcaagagcagcaaagggtgatgctgctcagcaggtcaccctcagggcccaagaagtattttcccatccccgtggagcacctggaggaggagatccgtatcagatccgccgacgactgcaagcagtttcgggaggagttcaactcattgccatctggacacatacaaggaacttttgaactggcaaataaagaagaaaacagagaaaaaaacagatatcccaacatccttcccaatgaccattctagggtgattctgagccaactggatggaattccctgttcagactacatcaatgcttcctacatagatggttacaaagagaagaataaattcatagcagctcaaggtcccaaacaggaaacggttaacgacttctggagaatggtctgggagcaaaagtctgcgaccatcgtcatgttaacaaacttgaaagaaaggaaagaggaaaagtgccatcagtactggcccgaccaaggctgctggacctatggaaacatccgggtgtgcgtggaggactgcgtggttttggtcgactacaccatccggaagttctgcatacagccacagctccccgacggctgcaaagcccccaggctggtctcacagctgcacttcaccagctggcccgacttcggagtgccttttacccccattgggatgctgaagttcctcaagaaagtaaagacgctcaaccccgtgcacgctgggcccatcgtggtccactgtagcgcgggcgtgggccggacgggcaccttcattgtgatcgatgccatgatggccatgatgcacgcggagcagaaggtggatgtgtttgaatttgtgtctcgaatccgtaatcagcgccctcagatggttcaaacggatatgcagtacacgttcatctaccaagccttactcgagtactacctctacggggacacagagctggacgtgtcctccctggagaagcacctgcagaccatgcacggcaccaccacccacttcgacaagatcgggctggaggaggagttcaggaaattgacaaatgtccggatcatgaaggagaacatgaggacgggcaacttgccggcaaacatgaagaaggccagggtcatccagatcatcccgtatgacttcaaccgagtgatcctttccatgaaaaggggtcaagaatacacagactacatcaacgcatccttcatagacggctaccgacagaaggactatttcatcgccacccaggggccactggcacacacggttgaggacttctggaggatgatctgggaatggaaatcccacactatcgtgatgctgacggaggtgcaggagagagagcaggataaatgctaccagtattggccaaccgagggctcagttactcatggagaaataacgattgagataaagaatgataccctttcagaagccatcagtatacgagactttctggtcactctcaatcagccccaggcccgccaggaggagcaggtccgagtagtgcgccagtttcacttccacggctggcctgagatcgggattcccgccgagggcaaaggcatgattgacctcatcgcagccgtgcagaagcagcagcagcagacaggcaaccaccccatcaccgtgcactgcagtgccggagctgggcgaacaggtacattcatagccctcagcaacattttggagcgagtaaaagccgagggacttttagatgtatttcaagctgtgaagagtttacgacttcagagaccacatatggtgcaaaccctggaacagtatgaattctgctacaaagtggtacaagattttattgatatattttctgattatgctaatttcaaatgaagattcctgccttaaaatattttttaatttaatggtcagtatattttgtaaaaatcatgttaatttatttcatagttgacattaatatcttccctaatttctttgtatatattttgttatgccttaaaggccacctgctatacagttgttaaatcttaaatatgctttttaaaaattggaataatgtattaaggtcaaataatatcccataaaatatatatttctgctaatattagtaaatatcttaatttttcattagattcatatcatttaatttcacatattcaacacctttaaatgttgtaatcttaatatgcgaagtgtgcctctgcaagatactaacacaaagctcatgttaagaaaacagttgaggactcagaagtcagttcgaaaatgcactttcctaacagtgaattcacaaccctgaacagcagcatttttggaaggcaaactgttcgtgatggtacaatgtaaatggggacttctgtaaagttctcagtttcggtccatgtggtttatctttacattttaaagatcaaagaagtctttacaacctgaatccaggtctaaaacacactagagtagctggtgactataaataatattttaaaatgctgtgtctacaccatcaagactgtgtctacactatcttggctgaacgagaagagatgtaaatgctgggtggtcccgttgacccacggcgttgggtacaacaaaaccagccatcggagttacaccccaaagcaccatttgctgtccagctgcctgtcgtttggcccagaccaccctcagaaaaaaaccagctgcctctcccattctcccctcccgttctgccacagcggcctgggctggtccagtgctatgcctggaggctcaacacaaaacttcccatccaaacattcagatgaactgagcgtcttacacacgcagtacagaggagcacacattaggatagaaacagtagaataaccacgggcaattaaactttaaattttctgagcagcattttggtatttaaacatttcttgtaaaaagctgagacagtttgtaagaaaagaatccttaaaatctagatttataccattttttaaagtcccacctttcaatgtttaataaaacaaaaagagaaatccttaatctaaaagctaaattatttttgaatggaaatactactgagaccattgacactggataacagtaatgatcccattaccagataagattgactgacggggaaaaaaaaaaaaaaagaatggggtgtgaatgtaccaacactgaatcttacagcagttatctttctatggccattaggtacctagcagatgtgcacaatataaacaaaaagatatctggcctaccttactactaaaagcatttaacacgtgcatttttggtacttttttttttgttttctaaaagctacataaaggccttatttgacattttcactgataactgatcgcaccctcatgttgcagtgttcgtcccctattcattaacagtgtgtgcaaatgcaaccccaggacacattattgttctgatagatgctcacagggaatcaagcttctcgcccactccacggctctgagccccatccaagggcaagacttggtgcccagctggaaggacgaaagcacactttgtgaccgccatcctcaccagctgcatgcctgggctgcacactgctgaacgtgctcctctctccttctctgtacaatgattcagcatctcggcggaagaggaaaatggagctttttgaggctcgccaggtcccttttgttttcaccattaaaattccaaacccaaagcctttgtttgactgaaggagaagagagggaagtaagcttctgttcagcacctgaaccctagaaaaagagccagtttgctacgatgaaggtgacatttctctggtcatttatttgagagttcgaagtcaaagtcgaggggcaccggctttggttcatgtctaggagccctctgtcagaatccttgaagccctttaatggtctaactggcatctcttgtatcaagaagtacctttaaggtagaccttttcagggtgccctcaggaaagggccctgctcatgtttttttcctgtccccttagaccaaccccaggtgtccactgcaggggttctgcctgttcccaaactttttccattccaggaacaaaggagaagccactttccccaggacgcaagactctcccctccactgtccgggacagcgttcgccctttagcggggaggtcattacagcctcatggcctctaccaaggccccagatcacaggatctcctgggccttggagcacctcacgctgggggaatcaatccctgagggactcagaatcttctccgtgcaacctggaaagttcatctcttgtttccttcagtcaaagaaagtccattgtacataacaaaacagcccccaaacagcccagtgccgacaccattgttcctttcacactttcctttgttgcatgcagttgggttcaaatgccaaatagtgattagaagacgaccattctgatctgtgtgtgatctggtcactatgtgactgcctttacggtttctctccatgtgctatatgaatgaagaatgcataccagtgttttaaaaggtatttttatgtgtttttaaacacttttttaaatgagcctgacacctgtgtttcagcatttggagacatccccatgttattcttttaagtgtataattactgatacttttttgtttgtttgtttaactaagttgtgtttaacttatgtgcagtctttataatgtatgtatgttattacagtttcaactatcatattttctttgattacatttataatttgatcttgctctgattataatgccagtgaatgttgctgaactctttgtatatgcaaattgcaagatttaaaccattctgatgcaaggataaacctttactttgactacca

SEQ ID NO: 24680 - DNA, 2293 bp, Homo sapiens
  source 1..2293: mol_type = unassigned DNA
acagcagacccagttcaaagttggaattcttctagaaatcctttctcagctgtcagggaaacatggattctccaaggccaggatggtttcccagcgtcttcccaggaagacaagaggtccaccatggagcccttgtgtccactcctgctggtgggttttagcttgccgctcgccagggctctcaggggcaacgagaccactgccgacagcaacgagacaaccacgacctcaggccctccggacccgggcgcctcccagccgctgctggcctggctgctactgccgctgctgctcctcctcctcgtgctccttctcgccgcctacttcttcaggttcaggaagcagaggaaagctgtggtcagcaccagcgacaagaagatgcccaacggaatcttggaggagcaagagcagcaaagggtgatgctgctcagcaggtcaccctcagggcccaagaagtattttcccatccccgtggagcacctggaggaggagatccgtatcagatccgccgacgactgcaagcagtttcgggaggagttcaactcattgccatctggacacatacaaggaacttttgaactggcaaataaagaagaaaacagagaaaaaaacagatatcccaacatccttcccaatgaccattctagggtgattctgagccaactggatggaattccctgttcagactacatcaatgcttcctacatagatggttacaaagagaagaataaattcatagcagctcaaggtcccaaacaggaaacggttaacgacttctggagaatggtctgggagcaaaagtctgcgaccatcgtcatgttaacaaacttgaaagaaaggaaagaggaaaagtgccatcagtactggcccgaccaaggctgctggacctatggaaacatccgggtgtgcgtggaggactgcgtggttttggtcgactacaccatccggaagttctgcatacagccacagctccccgacggctgcaaagcccccaggctggtctcacagctgcacttcaccagctggcccgacttcggagtgccttttacccccattgggatgctgaagttcctcaagaaagtaaagacgctcaaccccgtgcacgctgggcccatcgtggtccactgtagcgcgggcgtgggccggacgggcaccttcattgtgatcgatgccatgatggccatgatgcacgcggagcagaaggtggatgtgtttgaatttgtgtctcgaatccgtaatcagcgccctcagatggttcaaacggatatgcagtacacgttcatctaccaagccttactcgagtactacctctacggggacacagagctggacgtgtcctccctggagaagcacctgcagaccatgcacggcaccaccacccacttcgacaagatcgggctggaggaggagttcaggaaattgacaaatgtccggatcatgaaggagaacatgaggacgggcaacttgccggcaaacatgaagaaggccagggtcatccagatcatcccgtatgacttcaaccgagtgatcctttccatgaaaaggggtcaagaatacacagactacatcaacgcatccttcatagacggctaccgacagaaggactatttcatcgccacccaggggccactggcacacacggttgaggacttctggaggatgatctgggaatggaaatcccacactatcgtgatgctgacggaggtgcaggagagagagcaggataaatgctaccagtattggccaaccgagggctcagttactcatggagaaataacgattgagataaagaatgataccctttcagaagccatcagtatacgagactttctggtcactctcaatcagccccaggcccgccaggaggagcaggtccgagtagtgcgccagtttcacttccacggctggcctgagatcgggattcccgccgagggcaaaggcatgattgacctcatcgcagccgtgcagaagcagcagcagcagacaggcaaccaccccatcaccgtgcactgcagtgccggagctgggcgaacaggtacattcatagccctcagcaacattttggagcgagtaaaagccgagggacttttagatgtatttcaagctgtgaagagtttacgacttcagagaccacatatggtgcaaaccctggaacagtatgaattctgctacaaagtggtacaagattttattgatatattttctgattatgctaatttcaaatgaagattcctgccttaaaatattttttaatttaatggaacaaaggagaagccactttccccaggacgca

SEQ ID NO: 24681 - DNA, 928 bp, Homo sapiens
  source 1..928: mol_type = unassigned DNA
agaaatcctttctcagctgtcagggaaacatggattctccaaggccaggatggtttcccagcgtcttcccaggaagacaagaggtccaccatggagcccttgtgtccactcctgctggtgggttttagcttgccgctcgccagggctctcaggggcaacgagaccactgccgacagcaacgagacaaccacgacctcaggccctccggacccgggcgcctcccagccgctgctggcctggctgctactgccgctgctgctcctcctcctcgtgctccttctcgccgcctacttcttcaggttcaggaagcagaggaaagctgtggtcagcaccagcgacaagaagatgcccaacggaatcttggaggagcaagagcagcaaagggtgatgctgctcagcaggtcaccctcagggcccaagaagtattttcccatccccgtggagcacctggaggaggagatccgtatcagatccgccgacgactgcaagcagtttcgggaggagttcaacatgaccattctagggtgattctgagccaactggatggaattccctgttcagactacatcaatgcttcctacatagatggttacaaagagaagaataaattcatagcagctcaaggtcccaaacaggaaacggttaacgacttctggagaatggtctgggagcaaaagtctgcgaccatcgtcatgttaacaaacttgaaagaaaggaaagaggaaaagtgccatcagtactggcccgaccaaggctgctggacctatggaaacatccgggtgtgcgtggaggactgcgtggttttggtcgactacaccatccggaagttctgcatacagccacagctccccgacggctgcaaagcccccaggctggtctcacagctgcacttcaccagctggcccgacttcggagtgccttttacccc

SEQ ID NO: 24682 - DNA, 2189 bp, Homo sapiens
  source 1..2189: mol_type = unassigned DNA
acagcagacccagttcaaagttggaattcttctagaaatcctttctcagctgtcagggaaacatggattctccaaggccaggatggtttcccagcgtcttcccaggaagacaagaggtccaccatggagcccttgtgtccactcctgctggtgggttttagcttgccgctcgccagggctctcaggggcaacgagaccactgccgacagcaacgagacaaccacgacctcaggccctccggacccgggcgcctcccagccgctgctggcctggctgctactgccgctgctgctcctcctcctcgtgctccttctcgccgcctacttcttcaggttcagggcccaagaagtattttcccatccccgtggagcacctggaggaggagatccgtatcagatccgccgacgactgcaagcagtttcgggaggagttcaactcattgccatctggacacatacaaggaacttttgaactggcaaataaagaagaaaacagagaaaaaaacagatatcccaacatccttcccaatgaccattctagggtgattctgagccaactggatggaattccctgttcagactacatcaatgcttcctacatagatggttacaaagagaagaataaattcatagcagctcaaggtcccaaacaggaaacggttaacgacttctggagaatggtctgggagcaaaagtctgcgaccatcgtcatgttaacaaacttgaaagaaaggaaagaggaaaagtgccatcagtactggcccgaccaaggctgctggacctatggaaacatccgggtgtgcgtggaggactgcgtggttttggtcgactacaccatccggaagttctgcatacagccacagctccccgacggctgcaaagcccccaggctggtctcacagctgcacttcaccagctggcccgacttcggagtgccttttacccccattgggatgctgaagttcctcaagaaagtaaagacgctcaaccccgtgcacgctgggcccatcgtggtccactgtagcgcgggcgtgggccggacgggcaccttcattgtgatcgatgccatgatggccatgatgcacgcggagcagaaggtggatgtgtttgaatttgtgtctcgaatccgtaatcagcgccctcagatggttcaaacggatatgcagtacacgttcatctaccaagccttactcgagtactacctctacggggacacagagctggacgtgtcctccctggagaagcacctgcagaccatgcacggcaccaccacccacttcgacaagatcgggctggaggaggagttcaggaaattgacaaatgtccggatcatgaaggagaacatgaggacgggcaacttgccggcaaacatgaagaaggccagggtcatccagatcatcccgtatgacttcaaccgagtgatcctttccatgaaaaggggtcaagaatacacagactacatcaacgcatccttcatagacggctaccgacagaaggactatttcatcgccacccaggggccactggcacacacggttgaggacttctggaggatgatctgggaatggaaatcccacactatcgtgatgctgacggaggtgcaggagagagagcaggataaatgctaccagtattggccaaccgagggctcagttactcatggagaaataacgattgagataaagaatgataccctttcagaagccatcagtatacgagactttctggtcactctcaatcagccccaggcccgccaggaggagcaggtccgagtagtgcgccagtttcacttccacggctggcctgagatcgggattcccgccgagggcaaaggcatgattgacctcatcgcagccgtgcagaagcagcagcagcagacaggcaaccaccccatcaccgtgcactgcaggaacagtatgaattctgctacaaagtggtacaagattttattgatatattttctgattatgctaatttcaaatgaagattcctgccttaaaatattttttaatttaatggaacaaaggagaagccactttccccaggacgcaagactctcccctccactgtccgggacagcgttcgccctttagcggggaggtcattacagcctcatggcctctaccaaggccccagatcacaggatctcctgggccttggagcacctcacgctgggggaatcaatccctg

SEQ ID NO: 24683 - DNA, 779 bp, Homo sapiens
  source 1..779: mol_type = unassigned DNA
gagcggcttcaggaacccacggcctctgcgcgtccccgcgacccttcttcgcgcccggcgaagacagccgggcgccccggagggcggcgggcaggcgcccgggagatgcggagcctccgctgcagcgcgatctgcgcgaccagaccggcccccccgagtaagcgcttgcagccagttgtctagttgtcagaagccgagctcatcagcgggctcctggtgtcggcgttctgctgctggaaggtcagggagttccctggaccccacggaagaagctgtctccatgaaggacagggaccgtgccgtgaaccttttattctcccactgacatgactatagccttcactttccctcggtccaccatggagcccttgtgtccactcctgctggtgggttttagcttgccgctcgccagggctctcaggggcaacgagaccactgccgacagcaacgagacaaccacgacctcaggccctccggacccgggcgcctcccagccgctgctggcctggctgctactgccgctgctgctcctcctcctcgtgctccttctcgccgcctacttcttcaggttcaggaagcagaggaaagctgtggtcagcaccagcgacaagaagatgcccaacggaatcttggaggagcaagagcagcaaagggtgatgctgctcagcaggtcaccctcagggcccaagaagtattttcccatccccgtggagcacctggaggaggagatccgtatcagatccgccgacgactgcaagcagtttcgggaggagttcaac

SEQ ID NO: 24684 - DNA, 2304 bp, Homo sapiens
  source 1..2304: mol_type = unassigned DNA
atctcaaatcctgttgcagtcagtagcgctggctgtctgcagtagagatggttttcaatgattgtttcagaaattccttatcaacagaaaatgaacgagacggggagttttcagaaaataaatggatttgcagacaacttaacgtcatcatcgaagtcaccaaagaaagcaaagcagcgactggggaagctgaggctgaagtagcaagggcatgccacccaggctgctattccagtcgctgtgaaagcctggtcactgtctttgccacgcagaacacatctctgggaatgctgtcgatctatgcctccatcttttaaaggctttccatttctgtctggattttttctttatgggaggcagaaataatagtgaattgaatgaaatggagtatataagtgtctagcacagtccttggcacatagaaagtgctctgtaaacagtacttcgcatcaaattcttgggatgaatgaaagtgagtgcctggcgctgcacataagaaaagacgtggcagcaaaccatcctcccgacatgacgtgctgcgttggtgcgtttacgtccctgttccttctgaaagactcaaaattgtgttggagctactggtgcacctttgtaagacctgcactaacgaccgcgccactgggaagggcacttctttatgaagtcgccgtattcccagggagactggtcaacccatacaatgtgaaaaaaaaagaagctatgtgaaaaaatattcccctttgtcatagagaaggagaacttggtgaggctgggcagctgcaggagcctcagtttttcagataacagaacagagtagaccttgagggtccatttccctttttgttttaggaagtgctgtagaagggggcaaagagatctttgatatgagaaggtatttcttcaaagcagcatcgtgcctgaaatagcattgttctttacgctgagagaggaggaaatgggaatttggtgttcaacgggtttaaagtttcagttacaagaaatggacaagtccgagagctctgctgtgccacatcatgcctaaagtcaccgagactgtgttgtacacttttttgttaaaaggtaaatctcatgttaaatgttgttactacaattaaaaagaagccctaggctgtgtttgcagaaaggcactaaccatacatgtgctcaagagcccttttgtgttttcttcacttcatgttgtagttcaatttagttttgctttgcaaggatcctcggaaagtgtatcatcagcaatgacttttattttagaactaaatgtgaaccacggggggaatcatgatcgacattgctcgttgtcctttcttcctccctgtgggctgtgaatccaactcgtcctgggagcagggcgctctcgccttctgttcctctccgagctcagtgcacagaagcattctgcttacccagctgggactgctgactgcaccatcgagcacgcaggttgcactgttctcagcagctacactggattatatgccgcctttcttactgactgattatgaacttaaaacaaattcactctgctgctgtgaattatacatttatttttaagcatttatttcaactcgagatgagcggtctctcctgtaaatttctccctgctggatctttgctctggtttctggtgacatagtgtgagtgccggcagccgcgagcctcagaaggaaaattacaaagggaatactcagtaaatgatgtattgcctttcgcatcagtagcctgcttggaaatgttcaaattatcagcccaggagactccagtgctgtggacatgggtctgaacgaattgatcacctaggggctactgagaacgcggtgctctgtccaccatggagcccttgtgtccactcctgctggtgggttttagcttgccgctcgccagggctctcaggggcaacgagaccactgccgacagcaacgagacaaccacgacctcaggccctccggacccgggcgcctcccagccgctgctggcctggctgctactgccgctgctgctcctcctcctcgtgctccttctcgccgcctacttcttcaggttcaggaagcagaggaaagctgtggtcagcaccagcgacaagaagatgcccaacggaatcttggaggagcaagagcagcaaagggtgatgctgctcagcaggtcaccctcagggcccaagaagtattttcccatccccgtggagcacctggaggaggagatccgtatcagatccgccgacgactgcaagcagtttcgggaggagttcaactcattgccatctggacacatacaaggaacttttgaactggc

SEQ ID NO: 24685 - DNA, 7727 bp, Homo sapiens
  source 1..7727: mol_type = unassigned DNA
cgggagcggcgggagcggtggcggcggcagaggcggcggctccagcttcggctccggctcgggctcgggctccggctccggctccggctccggctccagctcgggtggcggtggcgggagcgggaccaggtggaggcggcggcggcagaggagtgggagcagcggccctagcggcttgcggggggacatgcggaccgacggcccctggataggcggaaggagtggaggccctggtgcccggcccttggtgctgagtatccagcaagagtgaccggggtgaagaagcaaagactcggttgattgtcctgggctgtggctggctgtggagctagagccctggatggcccctgagccagccccagggaggacgatggtgccccttgtgcctgcactggtgatgcttggtttggtggcaggcgcccatggtgacagcaaacctgtcttcattaaagtccctgaggaccagactgggctgtcaggaggggtagcctccttcgtgtgccaagctacaggagaacccaagccgcgcatcacatggatgaagaaggggaagaaagtcagctcccagcgcttcgaggtcattgagtttgatgatggggcagggtcagtgcttcggatccagccattgcgggtgcagcgagatgaagccatctatgagtgtacagctactaacagcctgggtgagatcaacactagtgccaagctctcagtgctcgaagaggaacagctgccccctgggttcccttccatcgacatggggcctcagctgaaggtggtggagaaggcacgcacagccaccatgctatgtgccgcaggcggaaatccagaccctgagatttcttggttcaaggacttccttcctgtagaccctgccacgagcaacggccgcatcaagcagctgcgttcaggtgccttgcagatagagagcagtgaggaatccgaccaaggcaagtacgagtgtgtggcgaccaactcggcaggcacacgttactcagcccctgcgaacctgtatgtgcgagtgcgccgcgtggctcctcgtttctccatccctcccagcagccaggaggtgatgccaggcggcagcgtgaacctgacatgcgtggcagtgggtgcacccatgccctacgtgaagtggatgatgggggccgaggagctcaccaaggaggatgagatgccagttggccgcaacgtcctggagctcagcaatgtcgtacgctctgccaactacacctgtgtggccatctcctcgctgggcatgatcgaggccacagcccaggtcacagtgaaagctcttccaaagcctccgattgatcttgtggtgacagagacaactgccaccagtgtcaccctcacctgggactctgggaactcggagcctgtaacctactatggcatccagtaccgcgcagcgggcacggagggcccctttcaggaggtggatggtgtggccaccacccgctacagcattggcggcctcagccctttctcggaatatgccttccgcgtgctggcggtgaacagcatcgggcgagggccgcccagcgaggcagtgcgggcacgcacgggagaacaggcgccctccagcccaccgcgccgcgtgcaggcacgcatgctgagcgccagcaccatgctggtgcagtgggagcctcccgaggagcccaacggcctggtgcggggataccgcgtctactatactccggactcccgccgccccccgaacgcctggcacaagcacaacaccgacgcggggctcctcacgaccgtgggcagcctgctgcctggcatcacctacagcctgcgcgtgcttgccttcaccgccgtgggcgatggccctcccagccccaccatccaggtcaagacgcagcagggagtgcctgcccagcccgcggacttccaggccgaggtggagtcggacaccaggatccagctctcgtggctgctgccccctcaggagcggatcatcatgtatgaactggtgtactgggcggcagaggacgaagaccaacagcacaaggtgaccttcgacccaacctcctcctacacactagaggacctgaagcctgacacactctaccgcttccagctggctgcacgctcggatatgggggtgggcgtcttcacccccaccattgaggcccgcacagcccagtccaccccctccgcccctccccagaaggtgatgtgtgtgagcatgggctccaccacggtccgggtaagttgggtcccgccgcctgccgacagccgcaacggcgttatcacccagtactccgtggcctacgaggcggtggacggcgaggaccgcgggcggcatgtggtggatggcatcagccgtgagcactccagctgggacctggtgggcctggagaagtggacggagtaccgggtgtgggtgcgggcacacacagacgtgggccccggccccgagagcagcccggtgctggtgcgcaccgatgaggacgtgcccagcgggcctccgcggaaggtggaggtggagccactgaactccactgctgtgcatgtctactggaagctgcctgtccccagcaagcagcatggccagatccgcggctaccaggtcacctacgtgcggctggagaatggcgagccccgtggactccccatcatccaagacgtcatgctagccgaggcccagtggcggccagaggagtccgaggactatgaaaccactatcagcggcctgaccccggagaccacctactccgttactgttgctgcctataccaccaagggggatggtgcccgcagcaagcccaaaattgtcactacaacaggtgcagtcccaggccggcccaccatgatgatcagcaccacggccatgaacactgcgctgctccagtggcacccacccaaggaactgcctggcgagctgctgggctaccggctgcagtactgccgggccgacgaggcgcggcccaacaccatagatttcggcaaggatgaccagcacttcacagtcaccggcctgcacaaggggaccacctacatcttccggcttgctgccaagaaccgggctggcttgggtgaggagttcgagaaggagatcaggacccccgaggacctgcccagcggcttcccccaaaacctgcatgtgacaggactgaccacgtctaccacagaactggcctgggacccgccagtgctggcggagaggaacgggcgcatcatcagctacaccgtggtgttccgagacatcaacagccaacaggagctgcagaacatcacgacagacacccgctttacccttactggcctcaagccagacaccacttacgacatcaaggtccgcgcatggaccagcaaaggctctggcccactcagccccagcatccagtcccggaccatgccggtggagcaagtgtttgccaagaacttccgggtggcggctgcaatgaagacgtctgtgctgctcagctgggaggttcccgactcctataagtcagctgtgccctttaagattctgtacaatgggcagagtgtggaggtggacgggcactcgatgcggaagctgatcgcagacctgcagcccaacacagagtactcgtttgtgctgatgaaccgtggcagcagcgcagggggcctgcagcacctggtgtccatccgcacagcccccgacctcctgcctcacaagccgctgcctgcctctgcctacatagaggacggccgcttcgatctctccatgccccatgtgcaagacccctcgcttgtcaggtggttctacattgttgtggtgcccattgaccgtgtgggcgggagcatgctgacgccaaggtggagcacacccgaggaactggagctggacgagcttctagaagccatcgagcaaggcggagaggagcagcggcggcggcggcggcaggcagaacgtctgaagccatatgtggctgctcaactggatgtgctcccggagacctttaccttgggggacaagaagaactaccggggcttctacaaccggcccctgtctccggacttgagctaccagtgctttgtgcttgcctccttgaaggaacccatggaccagaagcgctatgcctccagcccctactcggatgagatcgtggtccaggtgacaccagcccagcagcaggaggagccggagatgctgtgggtgacgggtcccgtgctggcagtcatcctcatcatcctcattgtcatcgccatcctcttgttcaaaaggaaaaggacccactctccgtcctctaaggatgagcagtcgatcggactgaaggactccttgctggcccactcctctgaccctgtggagatgcggaggctcaactaccagaccccaggtatgcgagaccacccacccatccccatcaccgacctggcggacaacatcgagcgcctcaaagccaacgatggcctcaagttctcccaggagtatgagtccatcgaccctggacagcagttcacgtgggagaattcaaacctggaggtgaacaagcccaagaaccgctatgcgaatgtcatcgcctacgaccactctcgagtcatccttacctctatcgatggcgtccccgggagtgactacatcaatgccaactacatcgatggctaccgcaagcagaatgcctacatcgccacgcagggccccctgcccgagaccatgggtgatttctggaggatggtgtgggaacagcgcacggccactgtggtcatgatgacacggctggaggagaagtcccgggtaaaatgtgatcagtactggccagcccgtggcaccgagacctgtggccttattcaggtgaccctgttggacacagtggagctggccacatacactgtgcgcaccttcgcactccacaagagtggctccagtgagaagcgcgagctgcgtcagtttcagttcatggcctggccagaccatggagttcctgagtacccaactcccatcctggccttcctacgacgggtcaaggcctgcaaccccctagacgcagggcccatggtggtgcactgcagcgcgggcgtgggccgcaccggctgcttcatcgtgattgatgccatgttggagcggatgaagcacgagaagacggtggacatctatggccacgtgacctgcatgcgatcacagaggaactacatggtgcagacggaggaccagtacgtgttcatccatgaggcgctgctggaggctgccacgtgcggccacacagaggtgcctgcccgcaacctgtatgcccacatccagaagctgggccaagtgcctccaggggagagtgtgaccgccatggagctcgagttcaagttgctggccagctccaaggcccacacgtcccgcttcatcagcgccaacctgccctgcaacaagttcaagaaccggctggtgaacatcatgccctacgaattgacccgtgtgtgtctgcagcccatccgtggtgtggagggctctgactacatcaatgccagcttcctggatggttatagacagcagaaggcctacatagctacacaggggcctctggcagagagcaccgaggacttctggcgcatgctatgggagcacaattccaccatcatcgtcatgctgaccaagcttcgggagatgggcagggagaaatgccaccagtactggccagcagagcgctctgctcgctaccagtactttgttgttgacccgatggctgagtacaacatgccccagtatatcctgcgtgagttcaaggtcacggatgcccgggatgggcagtcaaggacaatccggcagttccagttcacagactggccagagcagggcgtgcccaagacaggcgagggattcattgacttcatcgggcaggtgcataagaccaaggagcagtttggacaggatgggcctatcacggtgcactgcagtgctggcgtgggccgcaccggggtgttcatcactctgagcatcgtcctggagcgcatgcgctacgagggcgtggtcgacatgtttcagaccgtgaagaccctgcgtacacagcgtcctgccatggtgcagacagaggaccagtatcagctgtgctaccgtgcggccctggagtacctcggcagctttgaccactatgcaacgtaactaccgctcccctctcctccgccacccccgccgtggggctccggaggggacccagctcctctgagccataccgaccatcgtccagccctcctacgcagatgctgtcactggcagagcacagcccacggggatcacagcgtttcaggaacgttgccacaccaatcagagagcctagaacatccctgggcaagtggatggcccagcaggcaggcactgtggcccttctgtccaccagacccacctggagcccgcttcaagctctctgttgcgctcccgcatttctcatgcttcttctcatggggtggggttggggcaaagcctcctttttaatacattaagtggggtagactgagggattttagcctcttccctctgatttttcctttcgcgaatccgtatctgcagaatgggccactgtaggggttggggtttattttgttttgtttttttttttcttgagttcactttggatccttattttgtatgacttctgctgaaggacagaacattgccttcctcgtgcagagctggggctgccagcctgagcggaggctcggccgtgggccgggaggcagtgctgatccggctgctcctccagcccttcagacgagatcctgtttcagctaaatgcagggaaactcaatgtttttttaagttttgttttccctttaaagcctttttttaggccacattgacagtggtgggcggggagaagatagggaacactcatccctggtcgtctatcccagtgtgtgtttaacattcacagcccagaaccacagatgtgtctgggagagcctggcaaggcattcctcatcaccatcgtgtttgcaaaggttaaaacaaaaacaaaaaaccacaaaaataaaaaacaaaaaaaacaaaaaacccaagaaaaaaaaaaagagtcagcccttggcttctgcttcaaaccctcaagaggggaagcaactccgtgtgcctggggttcccgagggagctgctggctgacctgggcccacagagcctggctttggtccccagcattgcagtatggtgtggtgtttgtaggctgtggggtctggctgtgtggccaaggtgaatagcacaggttagggtgtgtgccacaccccatgcacctcagggccaagcgggggcgtggctggcctttcaggtccaggccagtgggcctggtagcacatgtctgtcctcagagcaggggccagatgattttcctccctggtttgcagctgttttcaaagcccccgataatcgctcttttccactccaagatgccctcataaaccaatgtggcaagactactggacttctatcaatggtactctaatcagtccttattatcccagcttgctgaggggcagggagagcgcctcttcctctgggcagcgctatctagataggtaagtgggggcggggaagggtgcatagctgttttagctgagggacgtggtgccgacgtccccaaacctagctaggctaagtcaagatcaacattccagggttggtaatgttggatgatgaaacattcatttttaccttgtggatgctagtgctgtagagttcactgttgtacacagtctgttttctatttgttaagaaaaactacagcatcattgcataattcttgatggtaataaatttgaataatcagatttcttacaaa

SEQ ID NO: 24686 - DNA, 7412 bp, Homo sapiens
  source 1..7412: mol_type = unassigned DNA
ggttgattgtcctgggctgtggctggctgtggagctagagccctggatggcccctgagccagccccagggaggacgatggtgccccttgtgcctgcactggtgatgcttggtttggtggcaggcgcccatggtgacagcaaacctgtcttcattaaagtccctgaggaccagactgggctgtcaggaggggtagcctccttcgtgtgccaagctacaggagaacccaagccgcgcatcacatggatgaagaaggggaagaaagtcagctcccagcgcttcgaggtcattgagtttgatgatggggcagggtcagtgcttcggatccagccattgcgggtgcagcgagatgaagccatctatgagtgtacagctactaacagcctgggtgagatcaacactagtgccaagctctcagtgctcgaagaggaacagctgccccctgggttcccttccatcgacatggggcctcagctgaaggtggtggagaaggcacgcacagccaccatgctatgtgccgcaggcggaaatccagaccctgagatttcttggttcaaggacttccttcctgtagaccctgccacgagcaacggccgcatcaagcagctgcgttcaggtgccttgcagatagagagcagtgaggaatccgaccaaggcaagtacgagtgtgtggcgaccaactcggcaggcacacgttactcagcccctgcgaacctgtatgtgcgagtgcgccgcgtggctcctcgtttctccatccctcccagcagccaggaggtgatgccaggcggcagcgtgaacctgacatgcgtggcagtgggtgcacccatgccctacgtgaagtggatgatgggggccgaggagctcaccaaggaggatgagatgccagttggccgcaacgtcctggagctcagcaatgtcgtacgctctgccaactacacctgtgtggccatctcctcgctgggcatgatcgaggccacagcccaggtcacagtgaaagctcttccaaagcctccgattgatcttgtggtgacagagacaactgccaccagtgtcaccctcacctgggactctgggaactcggagcctgtaacctactatggcatccagtaccgcgcagcgggcacggagggcccctttcaggaggtggatggtgtggccaccacccgctacagcattggcggcctcagccctttctcggaatatgccttccgcgtgctggcggtgaacagcatcgggcgagggccgcccagcgaggcagtgcgggcacgcacgggagaacaggcgccctccagcccaccgcgccgcgtgcaggcacgcatgctgagcgccagcaccatgctggtgcagtgggagcctcccgaggagcccaacggcctggtgcggggataccgcgtctactatactccggactcccgccgccccccgaacgcctggcacaagcacaacaccgacgcggggctcctcacgaccgtgggcagcctgctgcctggcatcacctacagcctgcgcgtgcttgccttcaccgccgtgggcgatggccctcccagccccaccatccaggtcaagacgcagcagggagtgcctgcccagcccgcggacttccaggccgaggtggagtcggacaccaggatccagctctcgtggctgctgccccctcaggagcggatcatcatgtatgaactggtgtactgggcggcagaggacgaagaccaacagcacaaggtgaccttcgacccaacctcctcctacacactagaggacctgaagcctgacacactctaccgcttccagctggctgcacgctcggatatgggggtgggcgtcttcacccccaccattgaggcccgcacagcccagtccaccccctccgcccctccccagaaggtgatgtgtgtgagcatgggctccaccacggtccgggtaagttgggtcccgccgcctgccgacagccgcaacggcgttatcacccagtactccgtggcctacgaggcggtggacggcgaggaccgcgggcggcatgtggtggatggcatcagccgtgagcactccagctgggacctggtgggcctggagaagtggacggagtaccgggtgtgggtgcgggcacacacagacgtgggccccggccccgagagcagcccggtgctggtgcgcaccgatgaggacgtgcccagcgggcctccgcggaaggtggaggtggagccactgaactccactgctgtgcatgtctactggaagctgcctgtccccagcaagcagcatggccagatccgcggctaccaggtcacctacgtgcggctggagaatggcgagccccgtggactccccatcatccaagacgtcatgctagccgaggcccaggaaaccactatcagcggcctgaccccggagaccacctactccgttactgttgctgcctataccaccaagggggatggtgcccgcagcaagcccaaaattgtcactacaacaggtgcagtcccaggccggcccaccatgatgatcagcaccacggccatgaacactgcgctgctccagtggcacccacccaaggaactgcctggcgagctgctgggctaccggctgcagtactgccgggccgacgaggcgcggcccaacaccatagatttcggcaaggatgaccagcacttcacagtcaccggcctgcacaaggggaccacctacatcttccggcttgctgccaagaaccgggctggcttgggtgaggagttcgagaaggagatcaggacccccgaggacctgcccagcggcttcccccaaaacctgcatgtgacaggactgaccacgtctaccacagaactggcctgggacccgccagtgctggcggagaggaacgggcgcatcatcagctacaccgtggtgttccgagacatcaacagccaacaggagctgcagaacatcacgacagacacccgctttacccttactggcctcaagccagacaccacttacgacatcaaggtccgcgcatggaccagcaaaggctctggcccactcagccccagcatccagtcccggaccatgccggtggagcaagtgtttgccaagaacttccgggtggcggctgcaatgaagacgtctgtgctgctcagctgggaggttcccgactcctataagtcagctgtgccctttaagattctgtacaatgggcagagtgtggaggtggacgggcactcgatgcggaagctgatcgcagacctgcagcccaacacagagtactcgtttgtgctgatgaaccgtggcagcagcgcagggggcctgcagcacctggtgtccatccgcacagcccccgacctcctgcctcacaagccgctgcctgcctctgcctacatagaggacggccgcttcgatctctccatgccccatgtgcaagacccctcgcttgtcaggtggttctacattgttgtggtgcccattgaccgtgtgggcgggagcatgctgacgccaaggtggagcacacccgaggaactggagctggacgagcttctagaagccatcgagcaaggcggagaggagcagcggcggcggcggcggcaggcagaacgtctgaagccatatgtggctgctcaactggatgtgctcccggagacctttaccttgggggacaagaagaactaccggggcttctacaaccggcccctgtctccggacttgagctaccagtgctttgtgcttgcctccttgaaggaacccatggaccagaagcgctatgcctccagcccctactcggatgagatcgtggtccaggtgacaccagcccagcagcaggaggagccggagatgctgtgggtgacgggtcccgtgctggcagtcatcctcatcatcctcattgtcatcgccatcctcttgttcaaaaggaaaaggacccactctccgtcctctaaggatgagcagtcgatcggactgaaggactccttgctggcccactcctctgaccctgtggagatgcggaggctcaactaccagaccccaggtatgcgagaccacccacccatccccatcaccgacctggcggacaacatcgagcgcctcaaagccaacgatggcctcaagttctcccaggagtatgagtccatcgaccctggacagcagttcacgtgggagaattcaaacctggaggtgaacaagcccaagaaccgctatgcgaatgtcatcgcctacgaccactctcgagtcatccttacctctatcgatggcgtccccgggagtgactacatcaatgccaactacatcgatggctaccgcaagcagaatgcctacatcgccacgcagggccccctgcccgagaccatgggtgatttctggaggatggtgtgggaacagcgcacggccactgtggtcatgatgacacggctggaggagaagtcccgggtaaaatgtgatcagtactggccagcccgtggcaccgagacctgtggccttattcaggtgaccctgttggacacagtggagctggccacatacactgtgcgcaccttcgcactccacaagagtggctccagtgagaagcgcgagctgcgtcagtttcagttcatggcctggccagaccatggagttcctgagtacccaactcccatcctggccttcctacgacgggtcaaggcctgcaaccccctagacgcagggcccatggtggtgcactgcagcgcgggcgtgggccgcaccggctgcttcatcgtgattgatgccatgttggagcggatgaagcacgagaagacggtggacatctatggccacgtgacctgcatgcgatcacagaggaactacatggtgcagacggaggaccagtacgtgttcatccatgaggcgctgctggaggctgccacgtgcggccacacagaggtgcctgcccgcaacctgtatgcccacatccagaagctgggccaagtgcctccaggggagagtgtgaccgccatggagctcgagttcaagttgctggccagctccaaggcccacacgtcccgcttcatcagcgccaacctgccctgcaacaagttcaagaaccggctggtgaacatcatgccctacgaattgacccgtgtgtgtctgcagcccatccgtggtgtggagggctctgactacatcaatgccagcttcctggatggttatagacagcagaaggcctacatagctacacaggggcctctggcagagagcaccgaggacttctggcgcatgctatgggagcacaattccaccatcatcgtcatgctgaccaagcttcgggagatgggcagggagaaatgccaccagtactggccagcagagcgctctgctcgctaccagtactttgttgttgacccgatggctgagtacaacatgccccagtatatcctgcgtgagttcaaggtcacggatgcccgggatgggcagtcaaggacaatccggcagttccagttcacagactggccagagcagggcgtgcccaagacaggcgagggattcattgacttcatcgggcaggtgcataagaccaaggagcagtttggacaggatgggcctatcacggtgcactgcagtgctggcgtgggccgcaccggggtgttcatcactctgagcatcgtcctggagcgcatgcgctacgagggcgtggtcgacatgtttcagaccgtgaagaccctgcgtacacagcgtcctgccatggtgcagacagaggaccagtatcagctgtgctaccgtgcggccctggagtacctcggcagctttgaccactatgcaacgtaactaccgctcccctctcctccgccacccccgccgtggggctccggaggggacccagctcctctgagccataccgaccatcgtccagccctcctacgcagatgctgtcactggcagagcacagcccacggggatcacagcgtttcaggaacgttgccacaccaatcagagagcctagaacatccctgggcaagtggatggcccagcaggcaggcactgtggcccttctgtccaccagacccacctggagcccgcttcaagctctctgttgcgctcccgcatttctcatgcttcttctcatggggtggggttggggcaaagcctcctttttaatacattaagtggggtagactgagggattttagcctcttccctctgatttttcctttcgcgaatccgtatctgcagaatgggccactgtaggggttggggtttattttgttttgtttttttttttcttgagttcactttggatccttattttgtatgacttctgctgaaggacagaacattgccttcctcgtgcagagctggggctgccagcctgagcggaggctcggccgtgggccgggaggcagtgctgatccggctgctcctccagcccttcagacgagatcctgtttcagctaaatgcagggaaactcaatgtttttttaagttttgttttccctttaaagcctttttttaggccacattgacagtggtgggcggggagaagatagggaacactcatccctggtcgtctatcccagtgtgtgtttaacattcacagcccagaaccacagatgtgtctgggagagcctggcaaggcattcctcatcaccatcgtgtttgcaaaggttaaaacaaaaacaaaaaaccacaaaaataaaaaacaaaaaaaacaaaaaacccaagaaaaaaaaaaagagtcagcccttggcttctgcttcaaaccctcaagaggggaagcaactccgtgtgcctggggttcccgagggagctgctggctgacctgggcccacagagcctggctttggtccccagcattgcagtatggtgtggtgtttgtaggctgtggggtctggctgtgtggccaaggtgaatagcacaggttagggtgtgtgccacaccccatgcacctcagggccaagcgggggcgtggctggcctttcaggtccaggccagtgggcctggtagcacatgtctgtcctcagagcaggggccagatgattttcctccctggtttgcagctgttttcaaagcccccgataatcgctcttttccactccaagatgccctcataaaccaatgtggcaagactactggacttctatcaatggtactctaatcagtccttattatcccagcttgctgaggggcagggagagcgcctcttcctctgggcagcgctatctagataggtaagtgggggcggggaagggtgcatagctgttttagctgagggacgtggtgccgacgtccccaaacctagctaggctaagtcaagatcaacattccagggttggtaatgttggatgatgaaacattcatttttaccttgtggatgctagtgctgtagagttcactgttgtacacagtctgttttctatttgttaagaaaaactacagcatcattgcataattcttgatggtaataaatttgaataatcagatttcttacaaaccagga

SEQ ID NO: 24687 - DNA, 7439 bp, Homo sapiens
  source 1..7439: mol_type = unassigned DNA
ggttgattgtcctgggctgtggctggctgtggagctagagccctggatggcccctgagccagccccagggaggacgatggtgccccttgtgcctgcactggtgatgcttggtttggtggcaggcgcccatggtgacagcaaacctgtcttcattaaagtccctgaggaccagactgggctgtcaggaggggtagcctccttcgtgtgccaagctacaggagaacccaagccgcgcatcacatggatgaagaaggggaagaaagtcagctcccagcgcttcgaggtcattgagtttgatgatggggcagggtcagtgcttcggatccagccattgcgggtgcagcgagatgaagccatctatgagtgtacagctactaacagcctgggtgagatcaacactagtgccaagctctcagtgctcgaagaggaacagctgccccctgggttcccttccatcgacatggggcctcagctgaaggtggtggagaaggcacgcacagccaccatgctatgtgccgcaggcggaaatccagaccctgagatttcttggttcaaggacttccttcctgtagaccctgccacgagcaacggccgcatcaagcagctgcgttcaggtgccttgcagatagagagcagtgaggaatccgaccaaggcaagtacgagtgtgtggcgaccaactcggcaggcacacgttactcagcccctgcgaacctgtatgtgcgagtgcgccgcgtggctcctcgtttctccatccctcccagcagccaggaggtgatgccaggcggcagcgtgaacctgacatgcgtggcagtgggtgcacccatgccctacgtgaagtggatgatgggggccgaggagctcaccaaggaggatgagatgccagttggccgcaacgtcctggagctcagcaatgtcgtacgctctgccaactacacctgtgtggccatctcctcgctgggcatgatcgaggccacagcccaggtcacagtgaaagctcttccaaagcctccgattgatcttgtggtgacagagacaactgccaccagtgtcaccctcacctgggactctgggaactcggagcctgtaacctactatggcatccagtaccgcgcagcgggcacggagggcccctttcaggaggtggatggtgtggccaccacccgctacagcattggcggcctcagccctttctcggaatatgccttccgcgtgctggcggtgaacagcatcgggcgagggccgcccagcgaggcagtgcgggcacgcacgggagaacaggcgccctccagcccaccgcgccgcgtgcaggcacgcatgctgagcgccagcaccatgctggtgcagtgggagcctcccgaggagcccaacggcctggtgcggggataccgcgtctactatactccggactcccgccgccccccgaacgcctggcacaagcacaacaccgacgcggggctcctcacgaccgtgggcagcctgctgcctggcatcacctacagcctgcgcgtgcttgccttcaccgccgtgggcgatggccctcccagccccaccatccaggtcaagacgcagcagggagtgcctgcccagcccgcggacttccaggccgaggtggagtcggacaccaggatccagctctcgtggctgctgccccctcaggagcggatcatcatgtatgaactggtgtactgggcggcagaggacgaagaccaacagcacaaggtgaccttcgacccaacctcctcctacacactagaggacctgaagcctgacacactctaccgcttccagctggctgcacgctcggatatgggggtgggcgtcttcacccccaccattgaggcccgcacagcccagtccaccccctccgcccctccccagaaggtgatgtgtgtgagcatgggctccaccacggtccgggtaagttgggtcccgccgcctgccgacagccgcaacggcgttatcacccagtactccgtggcctacgaggcggtggacggcgaggaccgcgggcggcatgtggtggatggcatcagccgtgagcactccagctgggacctggtgggcctggagaagtggacggagtaccgggtgtgggtgcgggcacacacagacgtgggccccggccccgagagcagcccggtgctggtgcgcaccgatgaggacgtgcccagcgggcctccgcggaaggtggaggtggagccactgaactccactgctgtgcatgtctactggaagctgcctgtccccagcaagcagcatggccagatccgcggctaccaggtcacctacgtgcggctggagaatggcgagccccgtggactccccatcatccaagacgtcatgctagccgaggcccagtggcggccagaggagtccgaggactatgaaaccactatcagcggcctgaccccggagaccacctactccgttactgttgctgcctataccaccaagggggatggtgcccgcagcaagcccaaaattgtcactacaacaggtgcagtcccaggccggcccaccatgatgatcagcaccacggccatgaacactgcgctgctccagtggcacccacccaaggaactgcctggcgagctgctgggctaccggctgcagtactgccgggccgacgaggcgcggcccaacaccatagatttcggcaaggatgaccagcacttcacagtcaccggcctgcacaaggggaccacctacatcttccggcttgctgccaagaaccgggctggcttgggtgaggagttcgagaaggagatcaggacccccgaggacctgcccagcggcttcccccaaaacctgcatgtgacaggactgaccacgtctaccacagaactggcctgggacccgccagtgctggcggagaggaacgggcgcatcatcagctacaccgtggtgttccgagacatcaacagccaacaggagctgcagaacatcacgacagacacccgctttacccttactggcctcaagccagacaccacttacgacatcaaggtccgcgcatggaccagcaaaggctctggcccactcagccccagcatccagtcccggaccatgccggtggagcaagtgtttgccaagaacttccgggtggcggctgcaatgaagacgtctgtgctgctcagctgggaggttcccgactcctataagtcagctgtgccctttaagattctgtacaatgggcagagtgtggaggtggacgggcactcgatgcggaagctgatcgcagacctgcagcccaacacagagtactcgtttgtgctgatgaaccgtggcagcagcgcagggggcctgcagcacctggtgtccatccgcacagcccccgacctcctgcctcacaagccgctgcctgcctctgcctacatagaggacggccgcttcgatctctccatgccccatgtgcaagacccctcgcttgtcaggtggttctacattgttgtggtgcccattgaccgtgtgggcgggagcatgctgacgccaaggtggagcacacccgaggaactggagctggacgagcttctagaagccatcgagcaaggcggagaggagcagcggcggcggcggcggcaggcagaacgtctgaagccatatgtggctgctcaactggatgtgctcccggagacctttaccttgggggacaagaagaactaccggggcttctacaaccggcccctgtctccggacttgagctaccagtgctttgtgcttgcctccttgaaggaacccatggaccagaagcgctatgcctccagcccctactcggatgagatcgtggtccaggtgacaccagcccagcagcaggaggagccggagatgctgtgggtgacgggtcccgtgctggcagtcatcctcatcatcctcattgtcatcgccatcctcttgttcaaaaggaaaaggacccactctccgtcctctaaggatgagcagtcgatcggactgaaggactccttgctggcccactcctctgaccctgtggagatgcggaggctcaactaccagaccccaggtatgcgagaccacccacccatccccatcaccgacctggcggacaacatcgagcgcctcaaagccaacgatggcctcaagttctcccaggagtatgagtccatcgaccctggacagcagttcacgtgggagaattcaaacctggaggtgaacaagcccaagaaccgctatgcgaatgtcatcgcctacgaccactctcgagtcatccttacctctatcgatggcgtccccgggagtgactacatcaatgccaactacatcgatggctaccgcaagcagaatgcctacatcgccacgcagggccccctgcccgagaccatgggtgatttctggaggatggtgtgggaacagcgcacggccactgtggtcatgatgacacggctggaggagaagtcccgggtaaaatgtgatcagtactggccagcccgtggcaccgagacctgtggccttattcaggtgaccctgttggacacagtggagctggccacatacactgtgcgcaccttcgcactccacaagagtggctccagtgagaagcgcgagctgcgtcagtttcagttcatggcctggccagaccatggagttcctgagtacccaactcccatcctggccttcctacgacgggtcaaggcctgcaaccccctagacgcagggcccatggtggtgcactgcagcgcgggcgtgggccgcaccggctgcttcatcgtgattgatgccatgttggagcggatgaagcacgagaagacggtggacatctatggccacgtgacctgcatgcgatcacagaggaactacatggtgcagacggaggaccagtacgtgttcatccatgaggcgctgctggaggctgccacgtgcggccacacagaggtgcctgcccgcaacctgtatgcccacatccagaagctgggccaagtgcctccaggggagagtgtgaccgccatggagctcgagttcaagttgctggccagctccaaggcccacacgtcccgcttcatcagcgccaacctgccctgcaacaagttcaagaaccggctggtgaacatcatgccctacgaattgacccgtgtgtgtctgcagcccatccgtggtgtggagggctctgactacatcaatgccagcttcctggatggttatagacagcagaaggcctacatagctacacaggggcctctggcagagagcaccgaggacttctggcgcatgctatgggagcacaattccaccatcatcgtcatgctgaccaagcttcgggagatgggcagggagaaatgccaccagtactggccagcagagcgctctgctcgctaccagtactttgttgttgacccgatggctgagtacaacatgccccagtatatcctgcgtgagttcaaggtcacggatgcccgggatgggcagtcaaggacaatccggcagttccagttcacagactggccagagcagggcgtgcccaagacaggcgagggattcattgacttcatcgggcaggtgcataagaccaaggagcagtttggacaggatgggcctatcacggtgcactgcagtgctggcgtgggccgcaccggggtgttcatcactctgagcatcgtcctggagcgcatgcgctacgagggcgtggtcgacatgtttcagaccgtgaagaccctgcgtacacagcgtcctgccatggtgcagacagaggaccagtatcagctgtgctaccgtgcggccctggagtacctcggcagctttgaccactatgcaacgtaactaccgctcccctctcctccgccacccccgccgtggggctccggaggggacccagctcctctgagccataccgaccatcgtccagccctcctacgcagatgctgtcactggcagagcacagcccacggggatcacagcgtttcaggaacgttgccacaccaatcagagagcctagaacatccctgggcaagtggatggcccagcaggcaggcactgtggcccttctgtccaccagacccacctggagcccgcttcaagctctctgttgcgctcccgcatttctcatgcttcttctcatggggtggggttggggcaaagcctcctttttaatacattaagtggggtagactgagggattttagcctcttccctctgatttttcctttcgcgaatccgtatctgcagaatgggccactgtaggggttggggtttattttgttttgtttttttttttcttgagttcactttggatccttattttgtatgacttctgctgaaggacagaacattgccttcctcgtgcagagctggggctgccagcctgagcggaggctcggccgtgggccgggaggcagtgctgatccggctgctcctccagcccttcagacgagatcctgtttcagctaaatgcagggaaactcaatgtttttttaagttttgttttccctttaaagcctttttttaggccacattgacagtggtgggcggggagaagatagggaacactcatccctggtcgtctatcccagtgtgtgtttaacattcacagcccagaaccacagatgtgtctgggagagcctggcaaggcattcctcatcaccatcgtgtttgcaaaggttaaaacaaaaacaaaaaaccacaaaaataaaaaacaaaaaaaacaaaaaacccaagaaaaaaaaaaagagtcagcccttggcttctgcttcaaaccctcaagaggggaagcaactccgtgtgcctggggttcccgagggagctgctggctgacctgggcccacagagcctggctttggtccccagcattgcagtatggtgtggtgtttgtaggctgtggggtctggctgtgtggccaaggtgaatagcacaggttagggtgtgtgccacaccccatgcacctcagggccaagcgggggcgtggctggcctttcaggtccaggccagtgggcctggtagcacatgtctgtcctcagagcaggggccagatgattttcctccctggtttgcagctgttttcaaagcccccgataatcgctcttttccactccaagatgccctcataaaccaatgtggcaagactactggacttctatcaatggtactctaatcagtccttattatcccagcttgctgaggggcagggagagcgcctcttcctctgggcagcgctatctagataggtaagtgggggcggggaagggtgcatagctgttttagctgagggacgtggtgccgacgtccccaaacctagctaggctaagtcaagatcaacattccagggttggtaatgttggatgatgaaacattcatttttaccttgtggatgctagtgctgtagagttcactgttgtacacagtctgttttctatttgttaagaaaaactacagcatcattgcataattcttgatggtaataaatttgaataatcagatttcttacaaaccagga

SEQ ID NO: 24688 - DNA, 4836 bp, Homo sapiens
  source 1..4836: mol_type = unassigned DNA
cagcctgctgcctggcatcacctacagcctgcgcgtgcttgccttcaccgccgtgggcgatggccctcccagccccaccatccaggtcaagacgcagcagggagtgcctgcccagcccgcggacttccaggccgaggtggagtcggacaccaggatccagctctcgtggctgctgccccctcaggagcggatcatcatgtatgaactggtgtactgggcggcagaggacgaagaccaacagcacaaggtgaccttcgacccaacctcctcctacacactagaggacctgaagcctgacacactctaccgcttccagctggctgcacgctcggatatgggggtgggcgtcttcacccccaccattgaggcccgcacagcccagtccatgcccagcgggcctccgcggaaggtggaggtggagccactgaactccactgctgtgcatgtctactggaagctgcctgtccccagcaagcagcatggccagatccgcggctaccaggtcacctacgtgcggctggagaatggcgagccccgtggactccccatcatccaagacgtcatgctagccgaggcccaggaaaccactatcagcggcctgaccccggagaccacctactccgttactgttgctgcctataccaccaagggggatggtgcccgcagcaagcccaaaattgtcactacaacaggtgcagtcccaggccggcccaccatgatgatcagcaccacggccatgaacactgcgctgctccagtggcacccacccaaggaactgcctggcgagctgctgggctaccggctgcagtactgccgggccgacgaggcgcggcccaacaccatagatttcggcaaggatgaccagcacttcacagtcaccggcctgcacaaggggaccacctacatcttccggcttgctgccaagaaccgggctggcttgggtgaggagttcgagaaggagatcaggacccccgaggacctgcccagcggcttcccccaaaacctgcatgtgacaggactgaccacgtctaccacagaactggcctgggacccgccagtgctggcggagaggaacgggcgcatcatcagctacaccgtggtgttccgagacatcaacagccaacaggagctgcagaacatcacgacagacacccgctttacccttactggcctcaagccagacaccacttacgacatcaaggtccgcgcatggaccagcaaaggctctggcccactcagccccagcatccagtcccggaccatgccggtggagcaagtgtttgccaagaacttccgggtggcggctgcaatgaagacgtctgtgctgctcagctgggaggttcccgactcctataagtcagctgtgccctttaagattctgtacaatgggcagagtgtggaggtggacgggcactcgatgcggaagctgatcgcagacctgcagcccaacacagagtactcgtttgtgctgatgaaccgtggcagcagcgcagggggcctgcagcacctggtgtccatccgcacagcccccgacctcctgcctcacaagccgctgcctgcctctgcctacatagaggacggccgcttcgatctctccatgccccatgtgcaagacccctcgcttgtcaggtggttctacattgttgtggtgcccattgaccgtgtgggcgggagcatgctgacgccaaggtggagcacacccgaggaactggagctggacgagcttctagaagccatcgagcaaggcggagaggagcagcggcggcggcggcggcaggcagaacgtctgaagccatatgtggctgctcaactggatgtgctcccggagacctttaccttgggggacaagaagaactaccggggcttctacaaccggcccctgtctccggacttgagctaccagtgctttgtgcttgcctccttgaaggaacccatggaccagaagcgctatgcctccagcccctactcggatgagatcgtggtccaggtgacaccagcccagcagcaggaggagccggagatgctgtgggtgacgggtcccgtgctggcagtcatcctcatcatcctcattgtcatcgccatcctcttgttcaaaaggaaaaggacccactctccgtcctctaaggatgagcagtcgatcggactgaaggactccttgctggcccactcctctgaccctgtggagatgcggaggctcaactaccagaccccaggttccagtgtccccagttgcccgaatacctcaagtatgcgagaccacccacccatccccatcaccgacctggcggacaacatcgagcgcctcaaagccaacgatggcctcaagttctcccaggagtatgagtccatcgaccctggacagcagttcacgtgggagaattcaaacctggaggtgaacaagcccaagaaccgctatgcgaatgtcatcgcctacgaccactctcgagtcatccttacctctatcgatggcgtccccgggagtgactacatcaatgccaactacatcgatggctaccgcaagcagaatgcctacatcgccacgcagggccccctgcccgagaccatgggtgatttctggaggatggtgtgggaacagcgcacggccactgtggtcatgatgacacggctggaggagaagtcccgggtaaaatgtgatcagtactggccagcccgtggcaccgagacctgtggccttattcaggtgaccctgttggacacagtggagctggccacatacactgtgcgcaccttcgcactccacaagagtggctccagtgagaagcgcgagctgcgtcagtttcagttcatggcctggccagaccatggagttcctgagtacccaactcccatcctggccttcctacgacgggtcaaggcctgcaaccccctagacgcagggcccatggtggtgcactgcagcgcgggcgtgggccgcaccggctgcttcatcgtgattgatgccatgttggagcggatgaagcacgagaagacggtggacatctatggccacgtgacctgcatgcgatcacagaggaactacatggtgcagacggaggaccagtacgtgttcatccatgaggcgctgctggaggctgccacgtgcggccacacagaggtgcctgcccgcaacctgtatgcccacatccagaagctgggccaagtgcctccaggggagagtgtgaccgccatggagctcgagttcaagttgctggccagctccaaggcccacacgtcccgcttcatcagcgccaacctgccctgcaacaagttcaagaaccggctggtgaacatcatgccctacgaattgacccgtgtgtgtctgcagcccatccgtggtgtggagggctctgactacatcaatgccagcttcctggatggttatagacagcagaaggcctacatagctacacaggggcctctggcagagagcaccgaggacttctggcgcatgctatgggagcacaattccaccatcatcgtcatgctgaccaagcttcgggagatgggcagggagaaatgccaccagtactggccagcagagcgctctgctcgctaccagtactttgttgttgacccgatggctgagtacaacatgccccagtatatcctgcgtgagttcaaggtcacggatgcccgggatgggcagtcaaggacaatccggcagttccagttcacagactggccagagcagggcgtgcccaagacaggcgagggattcattgacttcatcgggcaggtgcataagaccaaggagcagtttggacaggatgggcctatcacggtgcactgcagtgctggcgtgggccgcaccggggtgttcatcactctgagcatcgtcctggagcgcatgcgctacgagggcgtggtcgacatgtttcagaccgtgaagaccctgcgtacacagcgtcctgccatggtgcagacagaggaccagtatcagctgtgctaccgtgcggccctggagtacctcggcagctttgaccactatgcaacgtaactaccgctcccctctcctccgccacccccgccgtggggctccggaggggacccagctcctctgagccataccgaccatcgtccagccctcctacgcagatgctgtcactggcagagcacagcccacggggatcacagcgtttcaggaacgttgccacaccaatcagagagcctagaacatccctgggcaagtggatggcccagcaggcaggcactgtggcccttctgtccaccagacccacctggagcccgcttcaagctctctgttgcgctcccgcatttctcatgcttcttctcatggggtggggttggggcaaagcctcctttttaatacattaagtggggtagactgagggattttagcctcttccctctgatttttcctttcgcgaatccgtatctgcagaatgggccactgtaggggttggggtttattttgttttgtttttttttttcttgagttcactttggatccttattttgtatgacttctgctgaaggacagaacattgccttcctcgtgcagagctggggctgccagcctgagcggaggctcggccgtgggccgggaggcagtgctgatccggctgctcctccagcccttcagacgagatcctgtttcagctaaatgcagggaaactcaatgtttttttaagttttgttttccctttaaagcctttttttaggccacattgacagtggtgggcggggagaagatagggaacactcatccctggtcgtctatcccagtgtgtgtttaacattcacagcccagaaccacagatgtgtctgggagagcctggcaaggcattcctcatcaccatcgtgtttgcaaaggtt

SEQ ID NO: 24689 - DNA, 6377 bp, Homo sapiens
  source 1..6377: mol_type = unassigned DNA
gcggtggcggcggcagaggcggcggctccagcttcggctccggctcgggctcgggctccggctccggctccggctccggctccagctcgggtggcggtggcgggagcgggaccaggtggaggcggcggcggcagaggagtgggagcagcggccctagcggcttgcggggggacatgcggaccgacggcccctggataggcggaaggagtggaggccctggtgcccggcccttggtgctgagtatccagcaagagtgaccggggtgaagaagcaaagactcggttgattgtcctgggctgtggctggctgtggagctagagccctggatggcccctgagccagccccagggaggacgatggtgccccttgtgcctgcactggtgatgcttggtttggtggcaggcgcccatggtgacagcaaacctgtcttcattaaagtccctgaggaccagactgggctgtcaggaggggtagcctccttcgtgtgccaagctacaggagaacccaagccgcgcatcacatggatgaagaaggggaagaaagtcagctcccagcgcttcgaggtcattgagtttgatgatggggcagggtcagtgcttcggatccagccattgcgggtgcagcgagatgaagccatctatgagtgtacagctactaacagcctgggtgagatcaacactagtgccaagctctcagtgctcgaagaggaacagctgccccctgggttcccttccatcgacatggggcctcagctgaaggtggtggagaaggcacgcacagccaccatgctatgtgccgcaggcggaaatccagaccctgagatttcttggttcaaggacttccttcctgtagaccctgccacgagcaacggccgcatcaagcagctgcgttcaggtgccttgcagatagagagcagtgaggaatccgaccaaggcaagtacgagtgtgtggcgaccaactcggcaggcacacgttactcagcccctgcgaacctgtatgtgcgagtgcgccgcgtggctcctcgtttctccatccctcccagcagccaggaggtgatgccaggcggcagcgtgaacctgacatgcgtggcagtgggtgcacccatgccctacgtgaagtggatgatgggggccgaggagctcaccaaggaggatgagatgccagttggccgcaacgtcctggagctcagcaatgtcgtacgctctgccaactacacctgtgtggccatctcctcgctgggcatgatcgaggccacagcccaggtcacagtgaaagctcttccaaagcctccgattgatcttgtggtgacagagacaactgccaccagtgtcaccctcacctgggactctgggaactcggagcctgtaacctactatggcatccagtaccgcgcagcgggcacggagggcccctttcaggaggtggatggtgtggccaccacccgctacagcattggcggcctcagccctttctcggaatatgccttccgcgtgctggcggtgaacagcatcgggcgagggccgcccagcgaggcagtgcgggcacgcacgggagaacaggcgccctccagcccaccgcgccgcgtgcaggcacgcatgctgagcgccagcaccatgctggtgcagtgggagcctcccgaggagcccaacggcctggtgcggggataccgcgtctactatactccggactcccgccgccccccgaacgcctggcacaagcacaacaccgacgcggggctcctcacgaccgtgggcagcctgctgcctggcatcacctacagcctgcgcgtgcttgccttcaccgccgtgggcgatggccctcccagccccaccatccaggtcaagacgcagcagggagtgcctgcccagcccgcggacttccaggccgaggtggagtcggacaccaggatccagctctcgtggctgctgccccctcaggagcggatcatcatgtatgaactggtgtactgggcggcagaggacgaagaccaacagcacaaggtgaccttcgacccaacctcctcctacacactagaggacctgaagcctgacacactctaccgcttccagctggctgcacgctcggatatgggggtgggcgtcttcacccccaccattgaggcccgcacagcccagtccaccccctccgcccctccccagaaggtgatgtgtgtgagcatgggctccaccacggtccgggtaagttgggtcccgccgcctgccgacagccgcaacggcgttatcacccagtactccgtggcctacgaggcggtggacggcgaggaccgcgggcggcatgtggtggatggcatcagccgtgagcactccagctgggacctggtgggcctggagaagtggacggagtaccgggtgtgggtgcgggcacacacagacgtgggccccggccccgagagcagcccggtgctggtgcgcaccgatgaggacgtgcccagcgggcctccgcggaaggtggaggtggagccactgaactccactgctgtgcatgtctactggaagctgcctgtccccagcaagcagcatggccagatccgcggctaccaggtcacctacgtgcggctggagaatggcgagccccgtggactccccatcatccaagacgtcatgctagccgaggcccaggaaaccactatcagcggcctgaccccggagaccacctactccgttactgttgctgcctataccaccaagggggatggtgcccgcagcaagcccaaaattgtcactacaacaggtgcagtcccaggccggcccaccatgatgatcagcaccacggccatgaacactgcgctgctccagtggcacccacccaaggaactgcctggcgagctgctgggctaccggctgcagtactgccgggccgacgaggcgcggcccaacaccatagatttcggcaaggatgaccagcacttcacagtcaccggcctgcacaaggggaccacctacatcttccggcttgctgccaagaaccgggctggcttgggtgaggagttcgagaaggagatcaggacccccgaggacctgcccagcggcttcccccaaaacctgcatgtgacaggactgaccacgtctaccacagaactggcctgggacccgccagtgctggcggagaggaacgggcgcatcatcagctacaccgtggtgttccgagacatcaacagccaacaggagctgcagaacatcacgacagacacccgctttacccttactggcctcaagccagacaccacttacgacatcaaggtccgcgcatggaccagcaaaggctctggcccactcagccccagcatccagtcccggaccatgccggtggagcaagtgtttgccaagaacttccgggtggcggctgcaatgaagacgtctgtgctgctcagctgggaggttcccgactcctataagtcagctgtgccctttaagattctgtacaatgggcagagtgtggaggtggacgggcactcgatgcggaagctgatcgcagacctgcagcccaacacagagtactcgtttgtgctgatgaaccgtggcagcagcgcagggggcctgcagcacctggtgtccatccgcacagcccccgacctcctgcctcacaagccgctgcctgcctctgcctacatagaggacggccgcttcgatctctccatgccccatgtgcaagacccctcgcttgtcaggtggttctacattgttgtggtgcccattgaccgtgtgggcgggagcatgctgacgccaaggtggagcacacccgaggaactggagctggacgagcttctagaagccatcgagcaaggcggagaggagcagcggcggcggcggcggcaggcagaacgtctgaagccatatgtggctgctcaactggatgtgctcccggagacctttaccttgggggacaagaagaactaccggggcttctacaaccggcccctgtctccggacttgagctaccagtgctttgtgcttgcctccttgaaggaacccatggaccagaagcgctatgcctccagcccctactcggatgagatcgtggtccaggtgacaccagcccagcagcaggaggagccggagatgctgtgggtgacgggtcccgtgctggcagtcatcctcatcatcctcattgtcatcgccatcctcttgttcaaaaggaaaaggacccactctccgtcctctaaggatgagcagtcgatcggactgaaggactccttgctggcccactcctctgaccctgtggagatgcggaggctcaactaccagaccccaggtatgcgagaccacccacccatccccatcaccgacctggcggacaacatcgagcgcctcaaagccaacgatggcctcaagttctcccaggagtatgagtccatcgaccctggacagcagttcacgtgggagaattcaaacctggaggtgaacaagcccaagaaccgctatgcgaatgtcatcgcctacgaccactctcgagtcatccttacctctatcgatggcgtccccgggagtgactacatcaatgccaactacatcgatggctaccgcaagcagaatgcctacatcgccacgcagggccccctgcccgagaccatgggtgatttctggaggatggtgtgggaacagcgcacggccactgtggtcatgatgacacggctggaggagaagtcccgggtaaaatgtgatcagtactggccagcccgtggcaccgagacctgtggccttattcaggtgaccctgttggacacagtggagctggccacatacactgtgcgcaccttcgcactccacaagagtggctccagtgagaagcgcgagctgcgtcagtttcagttcatggcctggccagaccatggagttcctgagtacccaactcccatcctggccttcctacgacgggtcaaggcctgcaaccccctagacgcagggcccatggtggtgcactgcagcgcgggcgtgggccgcaccggctgcttcatcgtgattgatgccatgttggagcggatgaagcacgagaagacggtggacatctatggccacgtgacctgcatgcgatcacagaggaactacatggtgcagacggaggaccagtacgtgttcatccatgaggcgctgctggaggctgccacgtgcggccacacagaggtgcctgcccgcaacctgtatgcccacatccagaagctgggccaagtgcctccaggggagagtgtgaccgccatggagctcgagttcaagttgctggccagctccaaggcccacacgtcccgcttcatcagcgccaacctgccctgcaacaagttcaagaaccggctggtgaacatcatgccctacgaattgacccgtgtgtgtctgcagcccatccgtggtgtggagggctctgactacatcaatgccagcttcctggatggttatagacagcagaaggcctacatagctacacaggggcctctggcagagagcaccgaggacttctggcgcatgctatgggagcacaattccaccatcatcgtcatgctgaccaagcttcgggagatgggcagggagaaatgccaccagtactggccagcagagcgctctgctcgctaccagtactttgttgttgacccgatggctgagtacaacatgccccagtatatcctgcgtgagttcaaggtcacggatgcccgggatgggcagtcaaggacaatccggcagttccagttcacagactggccagagcagggcgtgcccaagacaggcgagggattcattgacttcatcgggcaggtgcataagaccaaggagcagtttggacaggatgggcctatcacggtgcactgcagtgctggcgtgggccgcaccggggtgttcatcactctgagcatcgtcctggagcgcatgcgctacgagggcgtggtcgacatgtttcagaccgtgaagaccctgcgtacacagcgtcctgccatggtgcagacagaggaccagtatcagctgtgctaccgtgcggccctggagtacctcggcagctttgaccactatgcaacgtaactaccgctcccctctcctccgccacccccgccgtggggctccggaggggacccagctcctctgagccataccgaccatcgtccagccctcctacgcagatgctgtcactggcagagcacagcccacggggatcacagcgtttcaggaacgttgccacaccaatcagagagcctagaacatccctgggcaagtggatggcccagcaggcaggcactgtggcccttctgtccaccagacccacctggagcccgcttcaagctctctgttgcgctcccgcatttctcatgcttcttctcatggggtggggttggggcaaagcctcctttttaatacattaagtggggtagactgagg

SEQ ID NO: 24690 - DNA, 5234 bp, Homo sapiens
  source 1..5234: mol_type = unassigned DNA
gccgcgcagccgggcccgctcctcctccgctccgccagtgtccggccgcgggccggccttagtgactggggcggcgggccccggggccgcggcgtggggcgggcaggcggacgccggccgcgggctgctttcgtcggctcccaagctctcccggagcgagcagccgcccgcgagccgccgcggagcctcctcgcccgctcccgccggcgagcaagatgatgtgcgaggtgatgccgaccatcagcgaagcagaaggcccccctggaggaggtggaggccatggttccggctccccttcacagccagatgcagattcacattttgaacagttgatggtctccatgctagaagaaagggaccgccttcttgatacactgagagagactcaagaaacgctggccttaacccaggggaagttacacgaggttggtcatgaaagagattccttgcagagacagctcaacacggcacttccacaggagttcgcagcacttactaaagaactcaatgtatgcagggaacagctccttgaaagggaagaagaaattgctgaactgaaagcagaaaggaataacaccaggctgctgttagagcatttggaatgccttgtctccaggcatgagcggtctcttaggatgaccgtggtgaagagacaagcgcagtctccagcaggcgtgtccagcgaagtggaagtgctgaaagcactgaagtccttatttgaacaccacaaagctctggatgaaaaggtgagagagcgattacgagtagcacttgaaagatgtagtttgttagaagaggaattaggtgccacacacaaagagctaatgattcttaaagaacagaataatcagaaaaaaactctaacagatggagtgctggacataaaccatgaacaagaaaatacaccaagcacgagtggaaagagatcttctgatggttctttaagccacgaggaagaccttgctaaagtaattgagctccaagaaatcataagtaagcagtcaagggaacagagccaaatgaaagaacgcctggcttccctttccagtcatgtgacagaactggaagaggatctggacacggctagaaaagatctcatcaaatctgaagaaatgaacacaaaattgcaacgagatgtccgtgaagccatggcccaaaaggaagatatggaagagagaatcactactcttgaaaaacgctacctcgctgcacagcgtgaagccacatctgtgcatgacctcaatgataaacttgaaaatgaaattgcaaataaagattctatgcatcgacagactgaagataaaaaccgccagttacaggagcgcttggaattggcagagcaaaagctgcaacagacactgaggaaggcagagacgctcccggaggtggaggcggagctggcccagagggtggcagcgctttccaaggctgaagagagacacggcaacattgaagaaaggttacgacagatggaagcacagttggaggagaagaatcaagaactgcagcgggcaaggcaaagagaaaaaatgaacgaagaacataataaacgtttatcagacactgttgacaagctgctttcagaatctaatgagaggcttcaacttcatcttaaagagagaatggctgctttggaagataagaactctcttttaagagaagttgaaagtgcaaaaaagcagttagaagaaacacaacacgataaggatcagcttgtcctaaacattgaagcactgagggctgaactagaccacatgagactaagaggtgcttcacttcatcatggccgaccccacttgggcagtgtcccagatttcaggttccccatggcagacggccacacagactcctacagcaccagtgcagtgctgcggcgcccacagaaaggccggctggcagccctgcgagatgagccttccaaggtacaaactcttaatgagcaggattgggaacgtgcccagcaagctagtgtcttggcaaatgtagcacaagcattcgagagtgatgctgacgtgtctgatggtgaagatgacagggacactctcctcagctcagttgacctgctatcgcccagcgggcaggccgacgcgcacacactagccatgatgcttcaggagcagctggacgccatcaacaaagagatcaggttgattcaggaagaaaaagaaaatacagagcagcgggcagaggagattgaaagtcgagttggcagtggaagtctagacaatcttggtcgttttagatcaatgagctccattcccccctaccctgcttcctcgcttgctagctcctcccctccgggcagtgggcgctccaccccacgaaggatccctcacagcccagctcgggaagtggacagactgggcgtcatgacccttttgccaccttccagagaagaggtacgagatgacaagacaaccataaagtgtgaaacctccccgccttcctccccgagagcccttcggttagaccggctgcacaaaggggcgctgcacaccgtcagccacgaggacatcagggacataaggaactccacaggctcccaggatggtcccgtgagcaaccccagcagtagcaacagtagccaggactcgctccacaaagccccaaagaagaaaggcattaagtcctccattggccgcttgtttggcaagaaagaaaagggccgacctggacaaactggcaaagaagcattaggacaagctggtgtttccgagacggataactcatctcaggatgccttgggacttagcaaattggggggacaggctgaaaaaaatcgtaaacttcaaaaaaagcatgaattgctggaggaagcccggagacaaggtttaccttttgcccaatgggacgggccaacggttgtggtctggctagagctctgggttgggatgccagcctggtatgtggctgcctgccgagcaaacgtgaaaagcggggccatcatgtcggccctgtccgacacagagatccagcgtgagattggcatcagcaaccccctgcacaggctgaagctgaggctggccatccaggagatcatgtcgctgaccagcccgtctgccccgcccacatctagaacgacactcgcctatggggacatgaaccacgagtggatcggcaacgagtggctccccagcctgggcctcccccagtaccgcagctacttcatggagtgccttgtagacgccaggatgctggaccacttgaccaagaaagaccttcgagggcagctgaaaatggtcgacagttttcacagaaacagtttccagtgtggaattatgtgcctgagaaggttaaattatgaccggaaagaactggaaagaaaaagagaagaaagtcagagtgaaataaaagacgtgcttgtttggagcaatgatcgagtgattcgctggatcctgtcaattggccttaaagaatatgcaaacaatcttatagagagtggtgttcacggagcacttctggccttagatgaaaccttcgacttcagtgcactggcactgctgttacagatcccgacgcagaacacacaggctcgtgctgtcttggaaagagaatttaacaaccttttggtcatggggactgatagaaggtttgatgaagatgatgataaaagctttaggagagcaccttcatggagaaaaaagtttagaccaaaggacattcgtggcttagctgctgggtcagcagagactctccctgcaaacttccgggtgacttcttctatgtcttccccctctatgcagccaaagaagatgcagatggacggcaatgtatcaggaacacagaggttggattctgctacagtcaggacttactcctgctaaagtctcctgttgtttacccacactacttctacagatgattatgcagcatttgaatccaacaaagactacattttggaatccagtggaatctttaatcttgttaatacttgttatatggaccctaagatattttattacagagtttttaattagtgaaaaattcatgaataccatagagaaaatattttagaatttaatgtttcttatatttatgtaaacttatgactcttcatttatatagttacttactttttcatgtatatccaggctataaatatcctttcaaatcatgttcttatacctaattttagtctttcaaatgaatgtactgtaatgcttgtatgtataaatcctatgaatagagggcttttgtaaattatgcatttattgtaattatcattaattttttaatgataaaccatgacaaaggattttacgtttataaaattatgacagaagccatgtgcattatcctttacggacgcagcctagctctacagcaatcatcctgaaataagcatacctaatttcaagcaattgttgtattttcatgactgaccttaactgtactttttctagcaagagatgctttattctgcagcatgaacagatttaaaatggctggtgttaaatatcagctcctaataagatgtggactgaaaacactatcacaacactatgagaagcccctagcactggttaacgctttcctagcctagtctctggatttggggagcttgtcttcagtggctgagactgtgagctgggagcagttctctcagctggagagactcgggatggggtaacctggggaccagtctagcccctgcaccctcttccctgcctctgctccttgggagcgggtggagagacacccatgtggctccccttagggccagcaccaagcaccacgctctcatcctgcaagtcggcgcacacagtggatgaaggcaggagacccagaaagcagtgcagtgcagctctaataaaggccttatttttcttatgtaaatcatctttttacatttgtttgtaaacatgtttaaagaacgaacctagtgggacatttttagactttgatgctctagccattttggattgtgtaagttgcagatgtggcttttactttttaaatggcatattaacaagccagcaaagtgtgtcagaccatggcgtggtatttattgtgcagcagatccagagacagaggcagcctgtcttttcagttggtttctgcttttaatttacttgtacaattcattgttactgttctgtttttctattaatcttttgtcaacttcctgattatgtaacaaagtatgtacagtctacttttgaactatttttatcacagtattatttattgctttctttcaataaagtactgaagcattttccactgccaatgaa

SEQ ID NO: 24691 - DNA, 4133 bp, Homo sapiens
  source 1..4133: mol_type = unassigned DNA
gctcctcctccgctccgccagtgtccggccgcgggccggccttagtgactggggcggcgggccccggggccgcggcgtggggcgggcaggcggacgccggccgcgggctgctttcgtcggctcccaagctctcccggagcgagcagccgcccgcgagccgccgcggagcctcctcgcccgctcccgccggcgagcaagatgatgtgcgaggtgatgccgaccatcagcgaagcagaaggcccccctggaggaggtggaggccatggttccggctccccttcacagccagatgcagattcacattttgaacagttgatggtctccatgctagaagaaagggaccgccttcttgatacactgagagagactcaagaaacgctggccttaacccaggggaagttacacgaggttggtcatgaaagagattccttgcagagacagctcaacacggcacttccacaggagttcgcagcacttactaaagaactcaatgtatgcagggaacagctccttgaaagggaagaagaaattgctgaactgaaagcagaaaggaataacaccaggctgctgttagagcatttggaatgccttgtctccaggcatgagcggtctcttaggatgaccgtggtgaagagacaagcgcagtctccagcaggcgtgtccagcgaagtggaagtgctgaaagcactgaagtccttatttgaacaccacaaagctctggatgaaaaggtgagagagcgattacgagtagcacttgaaagatgtagtttgttagaagaggaattaggtgccacacacaaagagctaatgattcttaaagaacagaataatcagaaaaaaactctaacagatggagtgctggacataaaccatgaacaagaaaatacaccaagcacgagtggaaagagatcttctgatggttctttaagccacgaggaagaccttgctaaagtaattgagctccaagaaatcataagtaagcagtcaagggaacagagccaaatgaaagaacgcctggcttccctttccagtcatgtgacagaactggaagaggatctggacacggctagaaaagatctcatcaaatctgaagaaatgaacacaaaattgcaacgagatgtccgtgaagccatggcccaaaaggaagatatggaagagagaatcactactcttgaaaaacgctacctcgctgcacagcgtgaagccacatctgtgcatgacctcaatgataaacttgaaaatgaaattgcaaataaagattctatgcatcgacagactgaagataaaaaccgccagttacaggagcgcttggaattggcagagcaaaagctgcaacagacactgaggaaggcagagacgctcccggaggtggaggcggagctggcccagagggtggcagcgctttccaaggctgaagagagacacggcaacattgaagaaaggttacgacagatggaagcacagttggaggagaagaatcaagaactgcagcgggcaaggcaaagagaaaaaatgaacgaagaacataataaacgtttatcagacactgttgacaagctgctttcagaatctaatgagaggcttcaacttcatcttaaagagagaatggctgctttggaagataagaactctcttttaagagaagttgaaagtgcaaaaaagcagttagaagaaacacaacacgataaggatcagcttgtcctaaacattgaagcactgagggctgaactagaccacatgagactaagaggtgcttcacttcatcatggccgaccccacttgggcagtgtcccagatttcaggttccccatggcagacggccacacagactcctacagcaccagtgcagtgctgcggcgcccacagaaaggccggctggcagccctgcgagatgagccttccaaggtacaaactcttaatgagcaggattgggaacgtgcccagcaagctagtgtcttggcaaatgtagcacaagcattcgagagtgatgctgacgtgtctgatggtgaagatgacagggacactctcctcagctcagttgacctgctatcgcccagcgggcaggccgacgcgcacacactagccatgatgcttcaggagcagctggacgccatcaacaaagagatcaggttgattcaggaagaaaaagaaaatacagagcagcgggcagaggagattgaaagtcgagttggcagtggaagtctagacaatcttggtcgttttagatcaatgagctccattcccccctaccctgcttcctcgcttgctagctcctcccctccgggcagtgggcgctccaccccacgaaggatccctcacagcccagctcgggaagtggacagactgggcgtcatgacccttttgccaccttccagagaagaggtacgagatgacaagacaaccataaagtgtgaaacctccccgccttcctccccgagagcccttcggttagaccggctgcacaaaggggcgctgcacaccgtcagccacgaggacatcagggacataaggaactccacaggctcccaggatggtcccgtgagcaaccccagcagtagcaacagtagccaggactcgctccacaaagccccaaagaagaaaggcattaagtcctccattggccgcttgtttggcaagaaagaaaagggccgacctggacaaactggcaaagaagcattaggacaagctggtgtttccgagacggataactcatctcaggatgccttgggacttagcaaattggggggacaggctgaaaaaaatcgtaaacttcaaaaaaagcatgaattgctggaggaagcccggagacaaggtttaccttttgcccaatgggacgggccaacggttgtggtctggctagagctctgggttgggatgccagcctggtatgtggctgcctgccgagcaaacgtgaaaagcggggccatcatgtcggccctgtccgacacagagatccagcgtgagattggcatcagcaaccccctgcacaggctgaagctgaggctggccatccaggagatcatgtcgctgaccagcccgtctgccccgcccacatctagaacgacactcgcctatggggacatgaaccacgagtggatcggcaacgagtggctccccagcctgggcctcccccagtaccgcagctacttcatggagtgccttgtagacgccaggatgctggaccacttgaccaagaaagaccttcgagggcagctgaaaatggtcgacagttttcacagaaacagtttccagtgtggaattatgtgcctgagaaggttaaattatgaccggaaagaactggaaagaaaaagagaagaaagtcagagtgaaataaaagacgtgcttgtttggagcaatgatcgagtgattcgctggatcctgtcaattggccttaaagaatatgcaaacaatcttatagagagtggtgttcacggagcacttctggccttagatgaaaccttcgacttcagtgcactggcactgctgttacagatcccgacgcagaacacacaggctcgtgctgtcttggaaagagaatttaacaaccttttggtcatggggactgatagaaggtttgatgaagatgatgataaaagctttaggagagcaccttcatggagaaaaaagtttagaccaaaggacattcgtggcttagctgctgggtcagcagagactctccctgcaaacttccgggtgacttcttctatgtcttccccctctatgcagccaaagaagatgcagatggacggtatgtgatgggtcacactaacctgtcacttgttgggagcatgagcagctttctgtctggaacattaataatgatctaaaacggcctatttaatatgttacaaggcacttgagtatggttgcatgtccaaatataaatgtttttaaattaactctaacatttgtttataaaagtttaaccataataatagaatttttaaaacacgcttgtctggttgaatcttagcatatttttccaactaataaagctcagtattcgtctgtgttctcagagagagactgaggcatacttgtaaatttgtgtctgtgacaggccgtgctagaaagctctttcaggaaatagtagtgtagtagtagcttccaaaccacataatttactgctctcc

SEQ ID NO: 24692 - DNA, 575 bp, Homo sapiens
  source 1..575: mol_type = unassigned DNA
tcaacggtcctcaccccccggggttcggggcttccgccgcacctgatacaggaggggaggagtgcggctcgagcaggctggaggtcaccatccccatcagatgatgtgcgaggtgatgccgaccatcagcgaagcagaaggcccccctggaggaggtggaggccatggttccggctccccttcacagccagatgcagattcacattttgaacagttgatggtctccatgctagaagaaagggaccgccttcttgatacactgagagagactcaagaaacgctggccttaacccaggggaagttacacgaggttggtcatgaaagagattccttgcagagacagctcaacacggcacttccacaggagttcgcagcacttactaaagaactcaatgtatgcagggaacagctccttgaaagggaagaagaaattgctgaactgaaagcagaaaggaataacaccaggctgctgttagagcatttggaatgccttgtctccaggcatgagcggtctcttaggatgaccgtggtgaagagacaagcgcagtctccagcaggcgtgtccagcgaagtgg

SEQ ID NO: 24693 - DNA, 563 bp, Homo sapiens
  source 1..563: mol_type = unassigned DNA
ggcttgcccttttttgtgagggtagtcctttgggatcttgaccccttccctggatttttgtctgtgttaatgtcttcatgttgtgtatttttgcacttaatatttgccctgtgtatgttttcccagcttatttacacacaaagcataacagatctgagcataatgagactgcccatctttttagctacagatacctgtaaagttgcatatttgtgggaacctgtattctgagcttaattactgtagcctgggtctttcatttcaagatgatgtgcgaggtgatgccgaccatcagcgaagcagaaggcccccctggaggaggtggaggccatggttccggctccccttcacagccagatgcagattcacattttgaacagttgatggtctccatgctagaagaaagggaccgccttcttgatacactgagagagactcaagaaacgctggccttaacccaggggaagttacacgaggttggtcatgaaagagattccttgcagagacagctcaacacggcacttccacaggagttcgcagcacttactaaagaactcaatgta

SEQ ID NO: 24694 - DNA, 5241 bp, Homo sapiens
  source 1..5241: mol_type = unassigned DNA
gctcctcctccgctccgccagtgtccggccgcgggccggccttagtgactggggcggcgggccccggggccgcggcgtggggcgggcaggcggacgccggccgcgggctgctttcgtcggctcccaagctctcccggagcgagcagccgcccgcgagccgccgcggagcctcctcgcccgctcccgccggcgagcaagatgatgtgcgaggtgatgccgaccatcagcgaagcagaaggcccccctggaggaggtggaggccatggttccggctccccttcacagccagatgcagattcacattttgaacagttgatggtctccatgctagaagaaagggaccgccttcttgatacactgagagagactcaagaaacgctggccttaacccaggggaagttacacgaggttggtcatgaaagagattccttgcagagacagctcaacacggcacttccacaggagttcgcagcacttactaaagaactcaatgtatgcagggaacagctccttgaaagggaagaagaaattgctgaactgaaagcagaaaggaataacaccaggctgctgttagagcatttggaatgccttgtctccaggcatgagcggtctcttaggatgaccgtggtgaagagacaagcgcagtctccagcaggcgtgtccagcgaagtggaagtgctgaaagcactgaagtccttatttgaacaccacaaagctctggatgaaaaggtgagagagcgattacgagtagcacttgaaagatgtagtttgttagaagaggaattaggtgccacacacaaagagctaatgattcttaaagaacagaataatcagaaaaaaactctaacagatggagtgctggacataaaccatgaacaagaaaatacaccaagcacgagtggaaagagatcttctgatggttctttaagccacgaggaagaccttgctaaagtaattgagctccaagaaatcataagtaagcagtcaagggaacagagccaaatgaaagaacgcctggcttccctttccagtcatgtgacagaactggaagaggatctggacacggctagaaaagatctcatcaaatctgaagaaatgaacacaaaattgcaacgagatgtccgtgaagccatggcccaaaaggaagatatggaagagagaatcactactcttgaaaaacgctacctcgctgcacagcgtgaagccacatctgtgcatgacctcaatgataaacttgaaaatgaaattgcaaataaagattctatgcatcgacagactgaagataaaaaccgccagttacaggagcgcttggaattggcagagcaaaagctgcaacagacactgaggaaggcagagacgctcccggaggtggaggcggagctggcccagagggtggcagcgctttccaaggctgaagagagacacggcaacattgaagaaaggttacgacagatggaagcacagttggaggagaagaatcaagaactgcagcgggcaaggcaaagagaaaaaatgaacgaagaacataataaacgtttatcagacactgttgacaagctgctttcagaatctaatgagaggcttcaacttcatcttaaagagagaatggctgctttggaagataagaactctcttttaagagaagttgaaagtgcaaaaaagcagttagaagaaacacaacacgataaggatcagcttgtcctaaacattgaagcactgagggctgaactagaccacatgagactaagaggtgcttcacttcatcatggccgaccccacttgggcagtgtcccagatttcaggttccccatggcagacggccacacagactcctacagcaccagtgcagtgctgcggcgcccacagaaaggccggctggcagccctgcgagatgagccttccaaggtacaaactcttaatgagcaggattgggaacgtgcccagcaagctagtgtcttggcaaatgtagcacaagcattcgagagtgatgctgacgtgtctgatggtgaagatgacagggacactctcctcagctcagttgacctgctatcgcccagcgggcaggccgacgcgcacacactagccatgatgcttcaggagcagctggacgccatcaacaaagagatcaggttgattcaggaagaaaaagaaaatacagagcagcgggcagaggagattgaaagtcgagttggcagtggaagtctagacaatcttggtcgttttagatcaatgagctccattcccccctaccctgcttcctcgcttgctagctcctcccctccgggcagtgggcgctccaccccacgaaggatccctcacagcccagctcgggaagtggacagactgggcgtcatgacccttcctagtgatttaaggaaacatcgtagaaagttgccaccttccagagaagaggtacgagatgacaagacaaccataaagtgtgaaacctccccgccttcctccccgagagcccttcggttagaccggctgcacaaaggggcgctgcacaccgtcagccacgaggacatcagggacataaggaactccacaggctcccaggatggtcccgtgagcaaccccagcagtagcaacagtagccaggactcgctccacaaagccccaaagaagaaaggcattaagtcctccattggccgcttgtttggcaagaaagaaaagggccgacctggacaaactggcaaagaagcattaggacaagctggtgtttccgagacggataactcatctcaggatgccttgggacttagcaaattggggggacaggctgaaaaaaatcgtaaacttcaaaaaaagcatgaattgctggaggaagcccggagacaaggtttaccttttgcccaatgggacgggccaacggttgtggtctggctagagctctgggttgggatgccagcctggtatgtggctgcctgccgagcaaacgtgaaaagcggggccatcatgtcggccctgtccgacacagagatccagcgtgagattggcatcagcaaccccctgcacaggctgaagctgaggctggccatccaggagatcatgtcgctgaccagcccgtctgccccgcccacatctagaacgacactcgcctatggggacatgaaccacgagtggatcggcaacgagtggctccccagcctgggcctcccccagtaccgcagctacttcatggagtgccttgtagacgccaggatgctggaccacttgaccaagaaagaccttcgagggcagctgaaaatggtcgacagttttcacagaaacagtttccagtgtggaattatgtgcctgagaaggttaaattatgaccggaaagaactggaaagaaaaagagaagaaagtcagagtgaaataaaagacgtgcttgtttggagcaatgatcgagtgattcgctggatcctgtcaattggccttaaagaatatgcaaacaatcttatagagagtggtgttcacggagcacttctggccttagatgaaaccttcgacttcagtgcactggcactgctgttacagatcccgacgcagaacacacaggctcgtgctgtcttggaaagagaatttaacaaccttttggtcatggggactgatagaaggtttgatgaagatgatgataaaagctttaggagagcaccttcatggagaaaaaagtttagaccaaaggacattcgtggcttagctgctgggtcagcagagactctccctgcaaacttccgggtgacttcttctatgtcttccccctctatgcagccaaagaagatgcagatggacggcaatgtatcaggaacacagaggttggattctgctacagtcaggacttactcctgctaaagtctcctgttgtttacccacactacttctacagatgattatgcagcatttgaatccaacaaagactacattttggaatccagtggaatctttaatcttgttaatacttgttatatggaccctaagatattttattacagagtttttaattagtgaaaaattcatgaataccatagagaaaatattttagaatttaatgtttcttatatttatgtaaacttatgactcttcatttatatagttacttactttttcatgtatatccaggctataaatatcctttcaaatcatgttcttatacctaattttagtctttcaaatgaatgtactgtaatgcttgtatgtataaatcctatgaatagagggcttttgtaaattatgcatttattgtaattatcattaattttttaatgataaaccatgacaaaggattttacgtttataaaattatgacagaagccatgtgcattatcctttacggacgcagcctagctctacagcaatcatcctgaaataagcatacctaatttcaagcaattgttgtattttcatgactgaccttaactgtactttttctagcaagagatgctttattctgcagcatgaacagatttaaaatggctggtgttaaatatcagctcctaataagatgtggactgaaaacactatcacaacactatgagaagcccctagcactggttaacgctttcctagcctagtctctggatttggggagcttgtcttcagtggctgagactgtgagctgggagcagttctctcagctggagagactcgggatggggtaacctggggaccagtctagcccctgcaccctcttccctgcctctgctccttgggagcgggtggagagacacccatgtggctccccttagggccagcaccaagcaccacgctctcatcctgcaagtcggcgcacacagtggatgaaggcaggagacccagaaagcagtgcagtgcagctctaataaaggccttatttttcttatgtaaatcatctttttacatttgtttgtaaacatgtttaaagaacgaacctagtgggacatttttagactttgatgctctagccattttggattgtgtaagttgcagatgtggcttttactttttaaatggcatattaacaagccagcaaagtgtgtcagaccatggcgtggtatttattgtgcagcagatccagagacagaggcagcctgtcttttcagttggtttctgcttttaatttacttgtacaattcattgttactgttctgtttttctattaatcttttgtcaacttcctgattatgtaacaaagtatgtacagtctacttttgaactatttttatcacagtattatttattgctttctttcaataaagtactgaagcattttccactgcc

SEQ ID NO: 24695 - DNA, 4716 bp, Homo sapiens
  source 1..4716: mol_type = unassigned DNA
gtgggatttggggggcgctggtgggcacccctggatctggcggctgcggcctcgcggggggaggctgatcggtgacaggggcagggggctattttgggggtagaaggcagtgagagcgtgagggggaggggggtccccagcgcccaagccggagccagagacgcggagcccgcgcgagcgtcggagacagggctccagggctccgaagcgacagagccgggccccggccgctgccaggggccccgcccggcccccccactccaccccacgtccctcctgcagcccagctccgcccgcagccgccgcggaccaggcaggcccgcaccgccgccatgatgtgcgaggtgatgcccaccatcagcgaggatggccggcggggctcggcgctgggcccggacgaggcgggcggggagctggagcgcctcatggtcacgatgctcacggagcgcgagcgcctgctggagacgctgcgcgaggcacaggacgggttggctacagcgcagctgcggctgcgcgagctcggccacgagaaggactcgctgcagcgccagctcagcatcgcgctgccccaggagtttgcagctctgacgaaggagctgaacttatgtcgggagcagctgctggagagggaggaagagattgcagagctgaaggcggaacggaacaacacgcggctgctcctggaacacctggagtgcctggtgtccaggcacgagaggtcactgcgcatgaccgtggtgaagcgccaggcccagtccccgggtggggtctcctcggaggtagaagtgctcaaagctctaaagtctctcttcgagcaccacaaggccctggatgagaaggtccgggagcggctgcggatggcgctggagcgcgtggcagtgctcgaggaggagctggaactgagcaatcaggagactctgaaccttcgagaacagctgtctaggcggcggtcagggctggaagagccgggcaaggatggggatgggcagactcttgccaatggcctgggtcctggcggggattccaaccggcgcacagcagagctggaggaggccctggagcggcagcgcgccgaggtgtgccagctgcgggagcgcctggcggtgctgtgccgtcagatgagccagctggaggaggagttgggcaccgcgcaccgtgagctgggcaaggcagaggaagccaactccaagctgcagcgcgacctcaaggaggcgctggcgcagcgggaagatatggaggagcggattacaacactggagaagcgctacctgagcgcccagcgggaggccacgtctctgcacgacgccaacgacaaactggagaacgagttagctagcaaggagtcgttgtatcggcagagtgaagagaagagccgtcagctggccgagtggttggacgacgccaagcagaagctgcagcagacgctgcagaaagcggagaccttgcccgagatagaggcgcagctggcgcagcgcgtggcggcgctcaacaaggccgaggaacgtcatgggaattttgaggagcggcttcggcagctggaggcccagctggaagagaagaatcaagagctgcagcgggcccggcagcgggagaagatgaacgatgaccacaataagcggctgtccgagacggtggacaagctgctgagcgagtccaacgagcgcttacagcttcacctcaaggagcgcatgggggcgctggaggagaagaactccctgagcgaggagatagccaacatgaagaagcttcaggatgagttgctgctaaacaaggagcagctcttggccgaaatggagcggatgcagatggagatcgaccagctgcgggggaggccaccatcctcctactccaggtctctccctggcagtgccctggagctccgttactctcaggcacccactttaccttctggtgcccacctggatccctatgtggctggcagtggtcgggcaggcaagaggggccgctggtcaggggtcaaggaggagccctccaaggattgggagcggtctgcccctgcgggctccataccacccccattccctggggaactggacggctccgatgaggaggaggcagaggggatgtttggggccgagctgctgtcccccagtgggcaggctgacgtgcagacgctggccatcatgcttcaggagcagctggaggccatcaacaaggagatcaagctgatccaagaggagaaggagacaacagaacagagggcagaggagctggagagtcgggtgtccagctctggcttggactcgttgggccgctaccgcagcagctgctccctgcccccctccctcaccacctctacccttgccagcccctcccctcccagctctggccactcaacaccccgcctggcaccccctagccctgcccgtgagggcaccgacaaggctaatcatgtccctaaggaggaagctggagctccacgaggggaggggccggccatcccaggagacaccccaccacccactccccgctctgcccgtcttgagagaatgacccaggccttggcactgcaggcggggtccctggaagatgggggacccccacggggaagtgagggcaccccagattctctgcacaaagcccccaagaagaagagcatcaagtcatccataggccgtctctttggcaagaaagagaagggacgaatgggacccccaggccgggacagctcttctctggctggaacaccctcagatgagacactggccactgaccctctggggctagccaagctgacaggcccaggagacaaggaccgaaggaacaagaggaagcatgaactcctggaggaggcctgccgccagggcctaccttttgctgcctgggacgggcccaccgtggtgtcctggctggagctgtgggtgggcatgcctgcctggtatgtggccgcctgccgggccaatgtcaagagcggtgccatcatggccaacctgtcagacacggagatccagcgcgagatcggcatcagcaacccgctgcaccgactcaagctacgcctcgccatccaggagatggtctcgctcacctcgccctcagcccccgcctcctcccgcacttccacaggaaacgtgtggatgacacacgaggagatggagtcccttacggccacgaccaagcccgagaccaaggagatcagctgggagcagatcctggcatatggcgacatgaaccacgagtgggtggggaacgactggctgcccagcctggggctgccccaataccgcagctacttcatggagtcgctggtggacgctcgaatgttagatcaccttaacaagaaggagctccggggccaactcaagatggtggacagctttcacagggtgagtctacattatgggattatgtgcctgaaacggctcaactatgaccggaaggacctggagcggaggcgggaagaaagtcagacccagatccgagacgtgatggtgtggtccaatgagcgggtcatgggttgggtgtccgggctgggcctgaaggaatttgccacgaacctcacggagagcggggtacacggggcactgctcgccctggacgagaccttcgactactccgacctggccttgctcctgcagatccccacgcagaatgcacaggcccggcagcttctggagaaggaattcagcaaccttatctccttaggcacagacaggcggctggacgaggacagcgccaagtctttcagccgctccccatcctggcggaagatgttccgggagaaggacctccgaggcgtaactcccgactcagctgagatgttgccccccaactttcgttcggctgcagcgggagccctgggctctccggggctccctctccgcaagctgcagccagaaggccagacttctgggagttcccgggcagacggcgtttcggtccggacctattcctgctagtgcaggcctccaggtgacctcactcggacggaagaatcttcccgaggctgggctgttccctctcctgcccggactgtggcctcgccggggagagcgggcgggggagctcgcgccgaggactggaccatctgtacagaccagcgggagtgcgcgcgcccgcctcgcacagggccggggcctggaccaaaccacatgaactggactgagagggggaagaagcggggaggaagaaatcccgccccaaacgtccgctttccttttctctactttgtaatttattgatcagtttctgttgggagacgggtgtcctttacccgcgggaagggggcggggcttccctcccgggccgcatgcggggagaggctgctccctcccctttttcctgcccagtcgcggggcccaagtcttccttcttcgtccgaaaggaggggaggggggactcgctgctacaagcctcgccccctgtgccactcagctccgccccgccgcgtccggtcgccggtcccccgggtcatctgcgggcgggttcccctctccctcccccgtgtctcgtgtccccggggcctcaccgccccccgtgctgtggccgtgtccgtgccccgggggtagggggcgcagaatggcgcttccccttctcctctggctccggggtttgcatgggagaatcctctttccacgatgccgctgggcgacgtggcgtgggggcagggggacggtgggggagccctcgcccccgactctcggtcggcctccccgccccaggcgtcactcagtgatcacgggtaaagagaactgtttc

SEQ ID NO: 24696 - DNA, 2236 bp, Homo sapiens
  source 1..2236: mol_type = unassigned DNA
gattgagccgaatgtccagatcctgccaatgtctggacaggagtttgcagctctgacgaaggagctgaacttatgtcgggagcagctgctggagagggaggaagagattgcagagctgaaggcggaacggaacaacacgcggctgctcctggaacacctggagtgcctggtgtccaggcacgagaggtcactgcgcatgaccgtggtgaagcgccaggcccagtccccgggtggggtctcctcggaggtagaagtgctcaaagctctaaagtctctcttcgagcaccacaaggccctggatgagaaggtccgggagcggctgcggatggcgctggagcgcgtggcagtgctcgaggaggagctggaactgagcaatcaggagactctgaaccttcgagaacagctgtctaggcggcggtcagggctggaagagccgggcaaggatggggatgggcagactcttgccaatggcctgggtcctggcggggattccaaccggcgcacagcagagctggaggaggccctggagcggcagcgcgccgaggtgtgccagctgcgggagcgcctggcggtgctgtgccgtcagatgagccagctggaggaggagttgggcaccgcgcaccgtgagctgggcaaggcagaggaagccaactccaagctgcagcgcgacctcaaggaggcgctggcgcagcgggaagatatggaggagcggattacaacactggagaagcgctacctgagcgcccagcgggaggccacgtctctgcacgacgccaacgacaaactggagaacgagttagctagcaaggagtcgttgtatcggcagagtgaagagaagagccgtcagctggccgagtggttggacgacgccaagcagaagctgcagcagacgctgcagaaagcggagaccttgcccgagatagaggcgcagctggcgcagcgcgtggcggcgctcaacaaggccgaggaacgtcatgggaattttgaggagcggcttcggcagctggaggcccagctggaagagaagaatcaagagctgcagcgggcccggcagcgggagaagatgaacgatgaccacaataagcggctgtccgagacggtggacaagctgctgagcgagtccaacgagcgcttacagcttcacctcaaggagcgcatgggggcgctggaggagaagaactccctgagcgaggagatagccaacatgaagaagcttcaggatgagttgctgctaaacaaggagcagctcttggccgaaatggagcggatgcagatggagatcgaccagctgcgggggaggccaccatcctcctactccaggtctctccctggcagtgccctggagctccgttactctcaggcacccactttaccttctggtgcccacctggatccctatgtggctggcagtggtcgggcaggcaagaggggccgctggtcaggggtcaaggaggagccctccaaggattgggagcggtctgcccctgcgggctccataccacccccattccctggggaactggacggctccgatgaggaggaggcagaggggatgtttggggccgagctgctgtcccccagtgggcaggctgacgtgcagacgctggccatcatgcttcaggagcagctggaggccatcaacaaggagatcaaaatcatgtccctaaggaggaagctggagctccacgaggggaggggccggccatcccaggagacaccccaccacccactccccgctctgcccgtcttgagagaatgacccaggccttggcactgcaggcggggtccctggaagatgggggacccccacggggaagtgagggcaccccagattctctgcacaaagcccccaagaagaagagcatcaagtcatccataggccgtctctttggcaagaaagagaagggacgaatgggacccccaggccgggacagctcttctctggctggaacaccctcagatgagacactggccactgaccctctggggctagccaagctgacaggcccaggagacaaggaccgaaggaacaagaggaagcatgaactcctggaggaggcctgccgccagggcctaccttttgctgcctgggacgggcccaccgtggtgtcctggctggagctgtgggtgggcatgcctgcctggtatgtggccgcctgccgggccaatgtcaagagcggtgccatcatggccaacctgtcagacacggagatccagcgcgagatcggcatcagca

SEQ ID NO: 24697 - DNA, 9021 bp, Homo sapiens
  source 1..9021: mol_type = unassigned DNA
ctcaagttggggatcctcggctgctcgccgccgccgcccgcggtccctgcctgccccaggcccggggcatcgccgccggccgccgactccgcgccctgcccgatcggctctctcctttttaaacggaaagcagcctttctccgccgagaggatcgtccccagcgtggctctgcgttcccggtcactttttgagattttccggggggcgctcggcggcttcccggattccaaggggactcgggccgccgagcgcggggggcccgtggagcgggcgagccggggaagcgccccggcttagcggaggctcgcacggaggcaagaacttattcaacaagtttacctccctgctttcctcttttcgatgtgcgttttcggacatgcggaggttactggaaccgtgttggtggattttgttcctgaaaatcaccagttccgtgctccattatgtcgtgtgcttccccgcgttgacagaaggctacgttggggccctgcacgagaatagacacggcagcgcagtgcagatccgcaggcgcaaggcttcaggcgacccgtactgggcctactctggtgcctatggtcctgagcactgggtcacgtctagtgtcagctgtgggggccgtcaccagtctcctattgacattttagaccagtatgcgcgtgttggggaagaataccaggaactgcaactcgatggcttcgacaatgagtcttctaacaaaacctggatgaaaaacacagggaaaacagtcgccatccttctgaaagacgactattttgtcagtggagctggtctacctggcagattcaaagctgagaaggtggaatttcactggggccacagcaatggctcagcgggctctgaacacagcatcaatggcaggaggtttcctgttgagatgcagattttcttttacaatccagatgactttgacagctttcaaaccgcaatttctgagaacagaataatcggagccatggccatattttttcaagtcagtccgagggacaattctgcactggatcctattatccacgggttgaagggtgtcgtacatcatgagaaggagacctttctggatcctttcgtcctccgggacctcctgcctgcatccctgggcagctattatcggtacacaggttccttgaccacaccaccgtgtagcgaaatagtggagtggatagtcttccggagacccgtccccatctcttaccatcagcttgaggctttttattccatcttcaccacggagcagcaagaccatgtcaagtcggtggagtatctgagaaataactttcgaccacagcagcgtctgcatgacagggtggtgtccaagtccgccgtccgtgactcctggaaccacgacatgacagacttcttagaaaacccactggggacagaagcctctaaagtttgcagctctccacccatccacatgaaggtgcagcctctgaaccagacggcactgcaggtgtcctggagccagccggagactatctaccacccacccatcatgaactacatgatctcctacagctggaccaagaatgaggacgagaaggagaagacgtttacaaaggacagcgacaaagacttgaaagccaccattagccatgtctcacccgatagcctttacctgttccgagtccaggccgtgtgtcggaacgacatgcgcagcgactttagccagacgatgctgtttcaagctaataccactcgaatattccaagggaccagaatagtgaaaacaggagtgcccacagcgtctcctgcctcttcagccgacatggcccccatcagctcggggtcttctacctggacgtcctctggcatcccattctcatttgtttccatggcaactgggatgggcccctcctccagtggcagccaggccacagtggcctcggtggtcaccagcacgctgctcgccggcctggggttcggcggtggtggcatctcctctttccccagcactgtgtggcccacgcgcctcccgacggccgcctcagccagcaagcaggcggctaggccagtcctagccaccacagaggccttggcttctccagggcccgatggtgattcgtcaccaaccaaggacggcgagggcaccgaggaaggagagaaggatgagaaaagcgagagtgaggatggggagcgggagcacgaggaggatggagagaaggactccgaaaagaaggagaagagtggggtgacccacgctgccgaggagcggaatcagacggagcccagccccacaccctcgtctcctaacaggactgccgagggagggcatcagactatacctgggcatgagcaggatcacactgccgtccccacagaccagacgggcggaaggagggatgccggcccaggcctggaccccgacatggtcacctccacccaagtgccccccaccgccacagaggagcagtatgcagggagtgatcccaagaggcccgaaatgccatctaaaaagcctatgtcccgcggggaccgattttctgaagacagcagatttatcactgttaatccagcggaaaaaaacacctctggaatgataagccgccctgctccagggaggatggagtggatcatccctctgattgtggtatcagccttgaccttcgtgtgcctcatccttctcattgctgtgctcgtttactggagagggtgtaacaaaataaagtccaagggctttcccagacgtttccgtgaagtgccttcttctggggagagaggagagaaggggagcagaaaatgttttcagactgctcatttctatgtggaagacagcagttcacctcgagtggtccctaatgaaagtatccctattattcctattccggatgacatggaagccattcctgtcaaacagtttgtcaaacacatcggtgagctctattctaataaccagcatgggttctctgaggattttgaggaagtccagcgctgtactgctgatatgaacatcactgcagagcattccaatcatccagaaaacaagcacaaaaacagatacatcaacattttagcatatgatcacagtagggtgaagttaagacctttaccaggaaaagactctaagcacagcgactacattaatgcaaactatgttgatggttacaacaaagcaaaagcctacattgccacccaaggacctttgaagtctacatttgaagatttctggaggatgatttgggaacaaaacactggaatcattgtgatgattacgaaccttgtggaaaaaggaagacgaaaatgtgatcagtattggccaacagagaacagtgaggaatatggaaacattattgtcacgctgaagagcacaaaaatacatgcctgctacactgttcgtcgtttttcaatcagaaatacaaaagtgaaaaagggtcagaagggaaatcccaagggtcgtcagaatgaaagggtagtgatccagtatcactatacacagtggcctgacatgggagttcccgagtatgcccttccagtactgactttcgtgaggagatcctcagcagctcggatgccagaaacgggccctgtgttggtgcactgcagtgctggtgtgggcagaacaggcacctatattgtaatagacagcatgctgcaacagataaaagacaaaagcacagttaacgtcctgggattcctgaagcatatcaggacacagcgtaactacctcgtccagactgaggagcagtacattttcatccatgatgccttgttggaagccattcttggaaaggagactgaagtatcttcaaatcagctgcacagctatgttaacagcatccttataccaggagtaggaggaaagacacgactggaaaagcaattcaagctggtcacacagtgtaatgcaaaatatgtggaatgtttcagtgctcagaaagagtgtaacaaagaaaagaacagaaactcttcagttgtgccatctgagcgtgctcgagtgggtcttgcaccattgcctggaatgaaaggaacagattacattaatgcttcttatatcatgggctattataggagcaatgaatttattataactcagcatcctctgccacatactacgaaagatttctggcgaatgatttgggatcataacgcacagatcattgtcatgctgccagacaaccagagcttggcagaagatgagtttgtgtactggccaagtcgagaagaatccatgaactgtgaggcctttaccgtcacccttatcagcaaagacagactgtgcctctctaatgaagaacaaattatcatccatgactttatccttgaagctacacaggatgactatgtcttagaagttcggcactttcagtgtcccaaatggcctaacccagatgcccccataagtagtacctttgaacttatcaacgtcatcaaggaagaggccttaacaagggatggtcccaccattgttcatgatgagtatggagcagtttcagcaggaatgttatgtgcccttaccaccctgtcccagcaactggagaatgaaaatgctgtggatgttttccaggttgcaaaaatgatcaatcttatgaggcctggagtattcacagacattgaacaataccagttcatctataaagcaatgcttagcttggtcagcactaaagaaaatggaaatggtcccatgacagtagacaaaaatggtgctgttcttattgcagatgaatcagaccctgctgagagcatggagtccctagtgtgactggaatcctgaaagggcacttaatttgtaaacttctgaagactgagaacttttttgaggccttttttgccagactctaggttatacaataacccagttacttttttacactgataaaagttttgatatttattttttgccattttatgtcttaatggtatcctactgagcatttgcacctctgttcatttcacacagtgaaacgcaattttacctagtttgcactatatgatcagtgttactgcctataatcttatacaacagcaaaccctgatgtgacattccatgacgacatacatgctacttttttttagttcaatacagtgaaggtctttgttatgacagtgaatattgcttttattattattattgctgaagtggttgcattctactagcaggcaatgctgtacttttcttcagtcctcctctcctttttattttaggcactgttcaatactgtatgccttctgtattttaatggagtggatagcattgttttcttttacagactagcaggctactgggacctaaaaaggtctgttaatgtcatggccttgaaacagttccatttatgctggttaagagatcccttaagaagttagaaggcttaagaactgcttcatgtgaacatcccttattagttacaaagttatattcacagttttttaaaaatgtgtcaaaataaaggataactctgtattacagctttcacagtagctatgtggacaatgtgttatttccattttgactctctaaaatagctacatcctaaaatcagggctatctttaacaatagcaagatagcaatattatatacaactcagttatgagaccctttagttattctccattaatgcttcttagtttgtaataccatacctcacagtaggtagaagaatgaaaacttctgcaggtgtgtaattttgaaactagtcctctaaaaattccctattactcctatagcaatctaataaaaactacctacatagttactgttttctttccttctttgccaaatgttttataataaatctcttaattacatacatttttctacttaagattaaattggaaatactgtcttagcaaaagtcttgggactatctaaactcccacacatagataaatctgatttggagagagaaatttaaaatatttaattaaaggtgatacccacattttcaagtttttaaaagagggagatggctttgtatgcttttgtgtagtttagaacagatacacattagtaaaagataccaataatcattagagctcaaggaagttattaggtgcagcctctggagccatactcacgctgcagtgcataatgggaaaattaggagcattaataagaaatttcagtagtgtttgtaaggaaaataagctacttactgagatctgtttcttctattgcatgtttgcttttgagggacagcttctgtcaaaagtgaaatcatcaccagaactgggcctgttaggaagaatagggttttatttactttttatgtcaattaacttcaacaaaaaggccacgctggctgctgtcatgccatctgggtatgcattaaacattaatgatgatcagcactgaggttctatttatcttgatttggctttcataaagtttgtcagaatggtgctggaggaccagaagtgctaaggagaaagaagctatgggccaagttaaagaatttgaatgcaaaggccaggtcaatggagttttcataaactacataatttaccagggtttatctcatcttctcaatacatagatttaacaacatggaatactctgcttttcaagagctgcgtaagctagtcctgagataagatgttcaagagagcatgctaagttgcatgtgctagatgagagacacctttacagcccctccgctccaaccagaggtgacacaggaagctctgtaaagttcaagtaaagcttgaacacaggaacactacaactgccagatgctgaggagaatcaggaaagcaatgagctagactctttttttagtcaattaagtgggttgttttagatgtatagagtattgatatgagttaacactttttagtagatggcaaagtgggcttgatgttcaaaagtaatgttcgagttagggttcatggtccctttctcagtaattttttcttaataaaagtaaacactggttcaaagacaaatagcaagtattccctcctgtgctatttatagagggctcaattcgtagaaaggcataccctccaatgcaattctgtggctgtcccttacagtggtttcagaatcacgaaaaaacagctagtaaataggatagaaacaataaaagaaagagtttagaagttccctgtgagcaatctgtgtgtcttcagcgagcttgaaccaaagtcttcatatcctgacccactgaattataagcaattgctacttgcccatcttgccaaagtagtccaaacacacttcaatgaggacagttatatttagcaggtcctcacccctgcaagagacagcatatcctcactattattattcatgtgttattggcaaaaacatagcttgcatctttccagaggcagagtttcaaagacagggttttctttgagacataagcacattgcttaagtacataacaaggttattaacacttgcactcaggggaaaggaaatagctattgcaaattaatgtgtgcaacttaataaaataagctgtttgtgtatatgaatttagctctaggtaagcaaaatgcacacatcatataaaaataaattgcaatgatcagaccaagtggctgtgctggacatcaaagaaaagacatgctgttgccatcaggagaactctttcttatatgcgatagccaagatatcttctttaatatgaaaaaagttaatttctgaatttcaaaaagagtaagattagctaattggtcttcctaatttttatgcctttagagtttttagtctattcaagtagaagagtccagcgaggccaaagaagggttacggtgttcaagttctggttgttggagtttttagcccagagtgacatactgaaatcagtaaataattattttataatgacacagcacaactgccttgttatgaatttttcttaaatgcatatatactgtatttaaaattaaaatatagataccaatttaccaaagatacatattactaattctaagcaaaactaaaaaaaaaacccaactcatcataatttaagaatcaaaatgtagtttgtcttaagaatttagtggttatactggaaatgcattttcaactcctatgttctaaagtttatgttcaaatggtgccagtgaatttttatatgaagggaaaatgcctgctttttttttttttttaacagatgtaatttcacttaaccctttgcgctttcccttagttgtcatttaacatacaatactggctttacttatctctagaaagaagaaggcatgctacaaataggaaggaattgtaataatgatatttggcctctactttgtcttagctgttaaactgtttttagtatttttgttaaatatttgcaaagggaagcattttctacagaggataattaatttcaagaaaaatatcttgagttttaagaaataaacatctccagaaaaggagaaagtcgattttataaaatgtcgcaactctccaacatttggggtagtgactccttttttgttaggacatttgaaactagcaagcagccattgtttctaaagaattctggcttcacattgactcatgtttctttcactccattttgaaatagctaaaaatcattaaaactgtaaatattttgttgcttgggtaagcatcttctgggaactttgtatctatggtatataatcatagaattttatattttcatataaagctaatttttttctagtttcaactccgtcatagttttttttcctttttgtggtggatatgtgaattcaactttctgtgtattgaagtagcaaaaaccatctttacattccaaaagaatccaacatgtgttatttctttgaggcagtgattgtgaaagttgggttttctttttaattccattgaccatttgtgcaataggaattagacataattagtcactgaaaacattcgtcacattgacccatttggaaaaagtgtgctttttttttttttttaaatttgttcagggggaggggttttgtaacctgaaatttttccctttttcttctgtttaaactatatcaaatcattctattatagtgttatttaatatgtaaattgtattgctatacataaaataaagtatggtttttgatgtattca

SEQ ID NO: 24698 - DNA, 2677 bp, Homo sapiens
  source 1..2677: mol_type = unassigned DNA
ccagtttccagccccgcgctcttcgttccttcccagcctgcgccggctctcgggctgtgctgcgctgccgactcaagttggggatcctcggctgctcgccgccgccgcccgcggtccctgcctgccccaggcccggggcatcgccgccggccgccgactccgcgccctgcccgatcggctctctcctttttaaacggaaagcagcctttctccgccgagaggatcgtccccagcgtggctctgcgttcccggtcactttttgagattttccggggggcgctcggcggcttcccggattccaaggggactcgggccgccgagcgcggggggcccgtggagcgggcgagccggggaagcgccccggcttagcggaggctcgcacggaggcaagaacttattcaacaagtttacctccctgctttcctcttttcgatgtgcgttttcggacatgcggaggttactggaaccgtgttggtggattttgttcctgaaaatcaccagttccgtgctccattatgtcgtgtgcttccccgcgttgacagaaggctacgttggggccctgcacgagaatagacacggcagcgcagtgcagatccgcaggcgcaaggcttcaggcgacccgtactgggcctactctggtaagtccagttgttctaatggagatcacacaggccagttaacatcccattcaactcacttgaaagcacactttgaatcacttttatgcctgagttctgtttgctcaaatctttcgtagttcactaaaagttgaaatattcgagcctgtttttcctcaaggttataagcaccttaatttatctctaccacctgtttcctcaacctgttttcccctcaatttgcgtttatttctgaactttactgttaatgagttattgtaccaaacttgtaattttctgaaagacgtagtcttgtcttttctgttttttcaggggctgtgatttcagagagcagaaaatatatggctagtcttgagctgctaaatgtctgctaaacattacaaacatcacatatcagaatgctctattaggctctaagccaagaaatgcaactttatttttaaatcacatcttgttctttgaatatattttagctgtctactcgatggtaatctgcagtccttttcatttttatttttacttttacccttttgagctaatgaagggagagagcattgttctaactatgttgaatgttacattgcaaataattttcttacattttaaggggacaaaaatgaagaccgaaaactagggatagacttttctggattaggcttcccaaaactcccaaaatatgagaggtggattgttatttctagaagagatttttgatgctcaaaaatatatggaaaatgtattaaagctaattaaggaatgcttgagtaagatagaccactttggaaattactttggcactgaataattcaaactccttctatgaaagagcttggaggcatggagtattagtcttaataataaatctatgtattatgcaatgttgttgcatatagaactgaaagtattcttttcataatgatgctcgggtttaaatcctgaatttctcccagcaaatcctgttaaatttatgccagtgtaaaatttataggtctgatctttaattataccttatctattggctttttgcatccttttgtctattgataaatctgctgcccctgcagggagaatatcctatctgttttgttttgcagtgaacagatagtgattctgaagttttccatcacacccagtaccttgtgattagaattatctaattagaggctttttgtcaccatttctgataaatgaaggaaattggcagatgaaagccaaaattacatatatatagcatcttgccaagaaacccaaagaaaatttatcattttgtactctgtggctctgacatcagtcaggaggaggcacaaagtggcttgctatttacagttcatcagtttagaataataatgctgttagtcaggaaattggaagttatatcccattagcatgtccaattgcaaatggcagtgaagagatgaaagcccttaaacttttcccattatgtagttaagaatgaccataagtggtgccatctttgtgatggagtgattgttgatgtctttaactttggtagagttcagaagtctccattttgtatttctggaatgcattgtgtctgaatttgggtattgcctccagtagtagaaggactaatggttcaaattcaagagttggcacactttttctgaaaagatccaggtaacaaacatcaaaagccatgtcgtctttgttgcaactgcccaactctgccattgtagcttaaaagtacccactgacaattctggacagactggctgtgctctgataaaaatttacttatgaatactggaatttgaattttataattttcatgtgtcaggaaatattcttcttttgatttttttctcattcattaaaaaatatacaaaccattcttgctttgcaggctgtgcaaaaacaggtggctggttggatagggtccacaggttatatagtttgtgaacccttgttccagttgatttttttcctagaaatcagataggagagtcatttgaggaattgcttggaaggatgtggactggtttggaagactgaatgaagtcatttgttaggcataatgg

SEQ ID NO: 24699 - DNA, 3391 bp, Homo sapiens
  source 1..3391: mol_type = unassigned DNA
ttcttgagtgtaaagtccagcaggtggaaggactaggcctgggactcctgggtccccggcagtgtctggaggcatggctggggctggcgggggcctcggggtctgggggaacctggtgctgctgggcctgtgcagctggacaggggccagggcgcctgcccccaacccagggaggaacctgacagtggagactcagaccaccagctccatctccctgagctgggaggtccccgatggcctagactcacagaactccaactactgggttcagtgtactggagacggcggcacaacagagactcgaaacacaacagccaccaacgtcaccgtggatggccttggacccgggtcattgtatacgtgttctgtgtgggtggagaaagacggagtaaatagctctgtggggactgtcactactgccacagctcccaacccagtgagaaacctgacagtggaggctcagaccaacagctccatcgccctgacctgggaggtccccgatggcccagacccacagaactccacctacggggttgagtacactggagatggtggcagagcagggactcgaagcacagcacacaccaacatcaccgtggatagacttgaacccgggtgtttgtatgtgttttccgtgtgggtggggaagaatggaatcaacagctcccgggagactcgaaatgccaccacagcccccaacccagtgagaaacctccatatggagactcagaccaacagctccatcgccctatgctgggaagtccccgatggcccataccctcaggactacacctactgggtagagtacactggagacggtggtggcacagagacccgaaacacaacaaataccagtgtgacagctgagagacttgagcccggaaccttgtacacattctctgtatgggcagaaaaaaatggagcacgtggctccaggcagaatgtcagcatctccacagtccccaacgcagtgacaagcctcagcaagcaggactggaccaacagcaccattgctttgcgctggacagctccccagggcccaggccagtcttcctacagctactgggtctcatgggtcagggaaggcatgactgaccccaggacccaaagcacctcaggtactgacatcaccctaaaggaactggaagctggcagcctgtaccacctcaccgtctgggccgagaggaatgaggtcagaggctataacagcaccctcactgcagccactgctcccaatgaggtcacagatctccagaatgaaactcagactaagaactcagtcatgctgtggtggaaggcccctggagacccccactctcagttgtacgtatactgggtccagtgggccagcaagggacatccccggagggggcaagatccccaagcgaattgggtcaaccagaccagcaggaccaatgagacgtggtacaaagtggaggccctggaacccgggacgttgtacaatttcaccgtgtgggcagagaggaatgacgtagccagttccacgcagagcctctgtgcgtccacatacccagacacagtcaccatcacttcctgtgtcagcacctcagcgggctatggagtcaacttgatctggtcctgcccccagggaggctacgaggcctttgagttggaggtgggaggacagcggggctcccaggacagatcttcatgtggggaggctgtgtctgtgttgggtctcgggccggctcggtcctacccagccaccatcacgaccatctgggacggaatgaaggtcgtgtctcactctgtggtctgccacaccgagagtgcaggggtcattgccggagcctttgtgggcatcctcctgtttctcatcctcgtgggcctgctgattttcttcctgaagaggaggaataagaagaagcagcagaaaccagaactcagggatctggtctttagctccccaggggacatcccagctgaagacttcgctgaccacgtcaggaagaatgagagggacagcaactgtggttttgcagacaagtaccagcaactctccctggtgggccacagccagtctcagatggtggcttcggcttcagagaacaacgccaagaaccgctacagaaatgtgctgccctatgactggtcccgggtgcccctgaagcccatccatgaggagccaggctctgactacatcaatgccagcttcatgcccggtctctggagcccccaggagttcattgcaacccagggtcccctgccacagacagtgggtgacttctggcgcctggtgtgggaacagcagagccacaccctggtcatgctgaccaactgcatggaggccggccgggtgaagtgtgagcattactggcctctggactcgcagccctgcacccatgggcacctgcgggtaaccctggtaggtgaggaagtgatggagaactggacggtgcgggaactgctgctcctccaggtggaggagcagaagacactgtctgtgcgccaattccactaccaggcctggccggatcacggcgttccctcctccccagacaccttgctggctttctggaggatgcttcggcagtggctggatcagaccatggagggaggcccacccattgtgcactgcagtgctggcgtgggtcgcacaggaaccctcattgccctggacgtcctgctccggcagctgcagtccgagggtctccttgggcccttcagctttgtaaggaagatgagagagagtcggccgttgatggtgcagactgaggctcagtacgtattcctgcatcagtgcatcctgcggttcctccaacagtcagcccaggccccagccgagaaggaagtcccgtatgaggatgtcgaaaacctcatctacgagaacgtggccgccatccaggcccacaagttggaggtctaagtgacgagggggctgggtcggcagcccaggcatcctcaagctctggacacccacttgagcccagattcctggaagagcagagggctgggctcccagactcctgggtgctgtgggaggagggggctggtatcccaaactctggtttccccaggagagagtggtctggtgggcttcagatgagtcctatgggagctggggatctggattcctggttccctgaaggaggagagggatgatagcttggattccctaggtctttccaggatgcagaaagaaacaggctggggcctggattctgaggcaggaaggaatttgggtctggagttctggctacttgaggaccaaaggcaggaaggatcctgccttgattttacttcagaaaccaaatcagtcttctataatctggggtcggagggagtccctgtgcccaaggtctctctgcaccccaccatccacatgtatttttccttctatcccataatttattaaatcactgttctcccc

SEQ ID NO: 24700 - DNA, 3925 bp, Homo sapiens
  source 1..3925: mol_type = unassigned DNA
ttcttgagtgtaaagtccagcaggtggaaggactaggcctgggactcctgggtccccggcagtgtctggaggcatggctggggctggcgggggcctcggggtctgggggaacctggtgctgctgggcctgtgcagctggacaggggccagggcgcctgcccccaacccagggaggaacctgacagtggagactcagaccaccagctccatctccctgagctgggaggtccccgatggcctagactcacagaactccaactactgggttcagtgtactggagacggcggcacaacagagactcgaaacacaacagccaccaacgtcaccgtggatggccttggacccgggtcattgtatacgtgttctgtgtgggtggagaaagacggagtaaatagctctgtggggactgtcactactgccacagctcccaacccagtgaggaacctgagagtggaggctcagaccaacagctccatcgccctgacctgggaggtccccgacggcccagacccacagaactccacctacggggttgagtacactggagatggtggcagagcagggactcgaagcacagcacacactaacatcaccgtggatggacttgaacccgggtgtttgtatgcgttttccatgtgggtgggaaagaatggaatcaacagctcccgggagactcgaaatgccaccacagctcacaacccagtgaggaacctgagagtggaggctcagaccaccagctccatctccctgagctgggaggtccccgatggcacagacccacagaactcgacctactgcgttcagtgcactggagatggtggcagaacagagactcgaaacacaacagacaccagagtcaccgtggatggccttggacccgggtcattgtatacgtgttctgtgtgggtggagaaagacggagtaaatagctctgtggagattgtcactagtgccacagctcccaacccagtgagaaacctgacagtggaggctcagaccaacagctccatcgccctgacctgggaggtccccgatggcccagacccacagaactccacctacggggttgagtacactggagatggtggcagagcagggactcgaagcacagcacacaccaacatcaccgtggatagacttgaacccgggtgtttgtatgtgttttccgtgtgggtggggaagaatggaatcaacagctcccgggagactcgaaatgccaccacagcccccaacccagtgagaaacctccatatggagactcagaccaacagctccatcgccctatgctgggaagtccccgatggcccataccctcaggactacacctactgggtagagtacactggagacggtggtggcacagagacccgaaacacaacaaataccagtgtgacagctgagagacttgagcccggaaccttgtacacattctctgtatgggcagaaaaaaatggagcacgtggctccaggcagaatgtcagcatctccacagtccccaacgcagtgacaagcctcagcaagcaggactggaccaacagcaccattgctttgcgctggacagctccccagggcccaggccagtcttcctacagctactgggtctcatgggtcagggaaggcatgactgaccccaggacccaaagcacctcaggtactgacatcaccctaaaggaactggaagctggcagcctgtaccacctcaccgtctgggccgagaggaatgaggtcagaggctataacagcaccctcactgcagccactgctcccaatgaggtcacagatctccagaatgaaactcagactaagaactcagtcatgctgtggtggaaggcccctggagacccccactctcagttgtacgtatactgggtccagtgggccagcaagggacatccccggagggggcaagatccccaagcgaattgggtcaaccagaccagcaggaccaatgagacgtggtacaaagtggaggccctggaacccgggacgttgtacaatttcaccgtgtgggcagagaggaatgacgtagccagttccacgcagagcctctgtgcgtccacatacccagacacagtcaccatcacttcctgtgtcagcacctcagcgggctatggagtcaacttgatctggtcctgcccccagggaggctacgaggcctttgagttggaggtgggaggacagcggggctcccaggacagatcttcatgtggggaggctgtgtctgtgttgggtctcgggccggctcggtcctacccagccaccatcacgaccatctgggacggaatgaaggtcgtgtctcactctgtggtctgccacaccgagagtgcaggggtcattgccggagcctttgtgggcatcctcctgtttctcatcctcgtgggcctgctgattttcttcctgaagaggaggaataagaagaagcagcagaaaccagaactcagggatctggtctttagctccccaggggacatcccagctgaagacttcgctgaccacgtcaggaagaatgagagggacagcaactgtggttttgcagacaagtaccagcaactctccctggtgggccacagccagtctcagatggtggcttcggcttcagagaacaacgccaagaaccgctacagaaatgtgctgccctatgactggtcccgggtgcccctgaagcccatccatgaggagccaggctctgactacatcaatgccagcttcatgcccggtctctggagcccccaggagttcattgcaacccagggtcccctgccacagacagtgggtgacttctggcgcctggtgtgggaacagcagagccacaccctggtcatgctgaccaactgcatggaggccggccgggtgaagtgtgagcattactggcctctggactcgcagccctgcacccatgggcacctgcgggtaaccctggtaggtgaggaagtgatggagaactggacggtgcgggaactgctgctcctccaggtggaggagcagaagacactgtctgtgcgccaattccactaccaggcctggccggatcacggcgttccctcctccccagacaccttgctggctttctggaggatgcttcggcagtggctggatcagaccatggagggaggcccacccattgtgcactgcagtgctggcgtgggtcgcacaggaaccctcattgccctggacgtcctgctccggcagctgcagtccgagggtctccttgggcccttcagctttgtaaggaagatgagagagagtcggccgttgatggtgcagactgaggctcagtacgtattcctgcatcagtgcatcctgcggttcctccaacagtcagcccaggccccagccgagaaggaagtcccgtatgaggatgtcgaaaacctcatctacgagaacgtggccgccatccaggcccacaagttggaggtctaagtgacgagggggctgggtcggcagcccaggcatcctcaagctctggacacccacttgagcccagattcctggaagagcagagggctgggctcccagactcctgggtgctgtgggaggagggggctggtatcccaaactctggtttccccaggagagagtggtctggtgggcttcagatgagtcctatgggagctggggatctggattcctggttccctgaaggaggagagggatgatagcttggattccctaggtctttccaggatgcagaaagaaacaggctggggcctggattctgaggcaggaaggaatttgggtctggagttctggctacttgaggaccaaaggcaggaaggatcctgccttgattttacttcagaaaccaaatcagtcttctataatctggggtcggagggagtccctgtgcccaaggtctctctgcaccccaccatccacatgtatttttccttctatcccataatttattaaatcactgttctcccc

SEQ ID NO: 24701 - DNA, 7846 bp, Homo sapiens
  source 1..7846: mol_type = unassigned DNA
cagccccagccgcatgacgcgcggaggaggcagcgggagcagccgcgggagccgggaccgggtagccgcgcgctgggggtgggcgccgctcgctccgccccgcgaagcccctgcgcgctcagggacgcggcccccccgcggcagccgcgctaggctccggcgtgtggccgcggccgccgccgccgctgccatgtctccggggaagcccggggcgggcggagcggggacgaggcggaccggctggcggaggaggaggcgaaggagacggcaggaggcggcgacgacggtgcccgggctcgggcgcacggcggggcccgattcgcgcgtccggggcacgttccagggcgcgcggggcatgaagccggcggcgcgggaggcgcggctgcctccgcgctcgcccgggctgcgctgggcgctgccgctgctgctgctgctgctgcgcctgggccagatcctgtgcgcaggtggcacccctagtccaattcctgacccttcagtagcaactgttgccacaggggaaaatggcataacgcagatcagcagtacagcagaatcctttcataaacagaatggaactggaacacctcaggtggaaacaaacaccagtgaggatggtgaaagctctggagccaacgatagtttaagaacacctgaacaaggatctaatgggactgatggggcatctcaaaaaactcccagtagcactgggcccagtcctgtgtttgacattaaagctgtttccatcagtccaaccaatgtgatcttaacttggaaaagtaatgacacagctgcttctgagtacaagtatgtagtaaagcataagatggaaaatgagaagacaattactgttgtgcatcaaccatggtgtaacatcacaggcttacgtccagcgacttcatatgtattctccatcactccaggaataggcaatgagacttggggagatcccagagtcataaaagtcatcacagagccgatcccagtttctgatctccgtgttgccctcacgggtgtgaggaaggctgctctctcctggagcaatggcaatggcactgcctcctgccgggttcttcttgaaagcattggaagccatgaggagttgactcaagactcaagacttcaggtcaatatctcgggcctgaagccaggggttcaatacaacatcaacccgtatcttctacaatcaaataagacaaagggagaccccttgggcacagaaggtggcttggatgccagcaatacagagagaagccgggcagggagccccaccgcccctgtgcatgatgagtccctcgtgggacctgtggacccatcctccggccagcagtcccgagacacggaagtcctgcttgtcgggttagagcctggcacccgatacaatgccaccgtttattcccaagcagcgaatggcacagaaggacagccccaggccatagagttcaggacaaatgctattcaggtttttgacgtcaccgctgtgaacatcagtgccacaagcctgaccctgatctggaaagtcagcgataacgagtcgtcatctaactatacctacaagatacatgtggcgggggagacagattcttccaatctcaacgtcagtgagcctcgcgctgtcatccccggactccgctccagcaccttctacaacatcacagtgtgtcctgtcctaggtgacatcgagggcacgccgggcttcctccaagtgcacaccccccctgttccagtttctgacttccgagtgacagtggtcagcacgacggagatcggcttagcatggagcagccatgatgcagaatcatttcagatgcatatcacacaggagggagctggcaattctcgggtagaaataaccaccaaccaaagtattatcattggtggcttgttccctggaaccaagtattgctttgaaatagttccaaaaggaccaaatgggactgaaggggcatctcggacagtttgcaatagaactgttcccagtgcagtgtttgacatccacgtggtctacgtcaccaccacggagatgtggctggactggaagagccctgacggtgcttccgagtatgtctaccatttagtcatagagtccaagcatggctctaaccacacaagcacgtatgacaaagcgattactctccagggcctgattccgggcaccttatataacatcaccatctctccagaagtggaccacgtctggggggaccccaactccactgcacagtacacacggcccagcaatgtgtccaacattgatgtaagtaccaacaccacagcagcaactttaagttggcagaactttgatgacgcctctcccacgtactcctactgccttcttattgagaaggctggaaattccagcaacgcaacacaagtagtcacggacattggaattactgacgctacagtcactgaattaatacctggctcatcatacacagtggagatctttgcacaagtaggggatgggatcaagtcactggaacctggccggaagtcattctgtacagatcctgcgtccatggcctccttcgactgcgaagtggtccccaaagagccagccctggttctcaaatggacctgccctcctggcgccaatgcaggctttgagctggaggtcagcagtggagcctggaacaatgcgacccacctggagagctgctcctctgagaatggcactgagtatagaacggaagtcacgtatttgaatttttctacctcgtacaacatcagcatcaccactgtgtcctgtggaaagatggcagcccccacccggaacacctgcactactggcatcacagatccccctcctccagatggatcccctaatattacatctgtcagtcacaattcagtaaaggtcaagttcagtggatttgaagccagccacggacccatcaaagcctatgctgtcattctcaccaccggggaagctggtcacccttctgcagatgtcctgaaatacacgtatgaggatttcaaaaagggagcctcagatacttatgtgacatacctcataagaacagaagaaaagggacgttctcagagcttgtctgaagttttgaaatatgaaattgacgttgggaatgagtcaaccacacttggttattacaatgggaagctggaacctctgggctcctaccgggcttgtgtggctggcttcaccaacattaccttccaccctcaaaacaaggggctcattgatggggctgagagctatgtgtccttcagtcgctactcagatgctgtttccttgccccaggatccaggtgtcatctgtggagcggtttttggctgtatctttggtgccctggttattgtgactgtgggaggcttcatcttctggagaaagaagaggaaagatgcaaagaataatgaagtgtccttttctcaaattaagtaatagatctaagttaatcagagtggagaattttgaggcctacttcaagaagcagcaagctgactccaactgtgggttcgcagaggaatacgaagatctgaagcttgttggaattagtcaacctaaatatgcagcagaactggctgagaatagaggaaagaatcgctataataatgttctgccctatgatatttcccgtgtcaaactttcggtccagacccattcaacggatgactacatcaatgccaactacatgcctggctaccactccaagaaagattttattgccacacaaggacctttaccgaacactttgaaagatttttggcgtatggtttgggagaaaaatgtatatgccatcattatgttgactaaatgtgttgaacagggaagaaccaaatgtgaggagtattggccctccaagcaggctcaggactatggagacataactgtggcaatgacatcagaaattgttcttccggaatggaccatcagagatttcacagtgaaaaatatccagacaagtgagagtcaccctctgagacagttccatttcacctcctggccagaccacggtgttcccgacaccactgacctgctcatcaacttccggtacctcgttcgtgactacatgaagcagagtcctcccgaatcgccgattctggtgcattgcagtgctggggtcggaaggacgggcactttcattgccattgatcgtctcatctaccagatagagaatgagaacaccgtggatgtgtatgggattgtgtatgaccttcgaatgcataggcctttaatggtgcagacagaggaccagtatgttttcctcaatcagtgtgttttggatattgtcagatcccagaaagactcaaaagtagatcttatctaccagaacacaactgcaatgacaatctatgaaaaccttgcgcccgtgaccacatttggaaagaccaatggttacatcgcctaattccaaaggaataacctttctggagtgaaccagaccgtcgcacccacagcgaaggcacatgccccgatgtcgacatgtttttatatgtctaatatcttaattctttgttctgttttgtgagaactaattttgagggcatgaagctgcatatgatagatgacaaattggggctgtcgggggctgtggatgggtggggagcaaatcatctgcattcctgatgaccaatgggatgaggtcactttttttttttttcccccttgaggattgtggaaaaccaggaaaagggagctatgatttttttttccaaaacaatttcttttttaaaaaagactattttatatgattcacatgctaaagccaggattgtgttgggttgaatatattttaagtatcagaggtctatttttacctactgtgtcttggaatctagccgatggaaaatacctaattgtggatgatgattgcgcagggaggggtacgtggcacctcttccgaatgggttttctatttgaacatgtgccttttctgaattatgcttccacaggcaaaactcagtagagatctatatttttgtactgaatctcataattggaatatacggaatatttaaacagtagcttagcatcagaggtttgcttcctcagtaacatttctgttctcatttgatcaggggaggcctctttgccccgactccgcttcccctgccccctgtacatttgtgctccattttttcttcccttttccctcccagttttctccaaagactcttctgttggcaacattttcaacccattggttgggtgagaatggcgactcaaatatcaccttgagaatttctgtgggtgggaatgggagaagcagaggaatcctacagtggcagaaatccttttcttgtccctgtattatcctttttctcatgtctgtatttggtatgaaggattatttaaaggtgcaatatgtgaattagtgattcatgatgttctaggtttttagtaacgttttactcaggttggcattttatgtgtctgtgtctgtatgtgtgtgtgtatgttcagaagcgtggcaatctgtgaacacttcagcgtgaattcagtgtcagattaatccctccttccccaaagtccactggctttcgtctctctctgccgtgacacatatcggaatctactgtgtatatatatatatatatatatatatatatatatatatatatatatatacactaagctctcaaaaacagtcattcctatgaattgaggtgtacaaagtttgaatttgtatcaaagatgtaattattatttttaaaaccttttcactatactgctgctgtaattactttgatttttaaaatgtagattaatttttttttttttgcttcaggtgtgtatccaccaagaatttcaaatttatgtggatttattttattggtacataatctgtaaacttcttaaggcattaacatgaaaagattttttctttttattttatattgtggctcaggttatattttgaagatgttttgagtttatcctccaataggcaatgaagttgacaaggttttatgaaggaataaccaagtccctggagtcctgtggctgttgccacagtaatgtgtcctgctgtaaacaggacaggtgtgtcctgttgagaatgtgagcgggctcttccagcctcctggtccctcctgactctgccacgcccctcacctcactggcacttcgataactgactggacgtgttaatgggtcttttagggttctaaagggtgaaccacacttttaaagccccggctgtggttcggagggttagtgctgtatgccttttatttccctttccctttgaggtactgaaaggatgaaaaggtggtgtcatgttttggggagaatcttacttctcaaatggaaattgcactttttgctgaatcctttgcatttttttggtagtaagcagttcattgagtatcaggtcctcaaaggaatgagttggcccggctagggtgggccctcttgacctaacttcagagggggccttggctcagtaggtgtgaatcagggaagccacattgtcctcagggtgctgtatgaagctgggtgtgggcggattcctcccacaccttcacactggcctgcctccaactcatacagatctcggagcggtcggtacttcattcataggtccctgttcaggcagcagttctgtgggctgtggccctctcccctccaatatgtccgaaaccattgtgatgggtggcaaatcccagggagctcctaagccctgctctgcccacatcactgccacagagaagtcagaggaagggacttgttgctaaaaaatcctttaaaaggttaaatactttaaaagattaaagcaacataactgtaaacatattgtataaaaatgaaaaacacaggaaccctcttcccttccgcctggtgtgggcttgggaaatgggcaagcggccccagcaatcatgggaggaactcttgcgggggagcggtctgggattccaaatgggcaggtcacacgaaggtcacgatgcttctctgcatcctgaaaagggctggggacagggccagtgggggtggtaagggtatttatagcacagtgcttgaaaagggaagattaatgtgtaaatataaaggacacacaggctgggggttggtcagaggcaagaggagggtgcctctgagcttcaacccctcccaggaacaatgagctcaaattggaagagtccagtggaatcggggggatggtgtgagcacccctgttcagtctttgacaattgcatacagaaaagcagctggtatgggtttgggtgtcaatgaaagggccaaagactggtggccagctggtttgggggatttgggccattgatagcatctcccaggaacaacgactttttgcctccaaagttggatctagtgatgatcagcaccagcaggaaatgacatttggtgtctgcccactgcagccatactgtgacctccagccagacttccgcctaattgactccactggatttgtgctctgttgagtcagaggctcccgggggttggggatcgaggggcgggggtcagctatgcagcccatcacgtgtgtttttcatctgggatgaaaaagcctggttctcttttgaaatgcttgattgtacttattgagctaaacaagtcttggtgactgttgttgatttgcctcaaaagttttaagtcctgggttttcagactactgtgtagcagctgtgtgtttaacatactgtagctttttctcccttgggggcacatacaaataggatgtgttgatgtggactctaaactgtaattttcctgtaactattttggaatgatgcatatttctaatgtttgttatacttgtacagagtattgctgttggttgctttttttttttttaaggaaaaaatggcctgaaaacatttttttaaagacttacaaataccaaatataaaaaaatgtcaatgcatt

SEQ ID NO: 24702 - DNA, 5122 bp, Homo sapiens
  source 1..5122: mol_type = unassigned DNA
ccccagccgcatgacgcgcggaggaggcagcgggagcagccgcgggagccgggaccgggtagccgcgcgctgggggtgggcgccgctcgctccgccccgcgaagcccctgcgcgctcagggacgcggcccccccgcggcagccgcgctaggctccggcgtgtggccgcggccgccgccgccgctgccatgtctccggggaagcccggggcgggcggagcggggacgaggcggaccggctggcggaggaggaggcgaaggagacggcaggaggcggcgacgacggtgcccgggctcgggcgcacggcggggcccgattcgcgcgtccggggcacgttccagggcgcgcggggcatgaagccggcggcgcgggaggcgcggctgcctccgcgctcgcccgggctgcgctgggcgctgccgctgctgctgctgctgctgcgcctgggccagatcctgtgcgcaggtggcacccctagtccaattcctgacccttcagtagcaactgttgccacaggggaaaatggcataacgcagatcagcagtacagcagaatcctttcataaacagaatggaactggaacacctcaggtggaaacaaacaccagtgaggatggtgaaagctctggagccaacgatagtttaagaacacctgaacaaggatctaatgggactgatggggcatctcaaaaaactcccagtagcactgggcccagtcctgtgtttgacattaaagctgtttccatcagtccaaccaatgtgatcttaacttggaaaagtaatgacacagctgcttctgagtacaagtatgtagtaaagcataagatggaaaatgagaagacaattactgttgtgcatcaaccatggtgtaacatcacaggcttacgtccagcgacttcatatgtattctccatcactccaggaataggcaatgagacttggggagatcccagagtcataaaagtcatcacagagccgatcccagtttctgatctccgtgttgccctcacgggtgtgaggaaggctgctctctcctggagcaatggcaatggcactgcctcctgccgggttcttcttgaaagcattggaagccatgaggagttgactcaagactcaagacttcaggtcaatatctcgggcctgaagccaggggttcaatacaacatcaacccgtatcttctacaatcaaataagacaaagggagaccccttgggcacagaaggtggcttggatgccagcaatacagagagaagccgggcagggagccccaccgcccctgtgcatgatgagtccctcgtgggacctgtggacccatcctccggccagcagtcccgagacacggaagtcctgcttgtcgggttagagcctggcacccgatacaatgccaccgtttattcccaagcagcgaatggcacagaaggacagccccaggccatagagttcaggacaaatgctattcaggtttttgacgtcaccgctgtgaacatcagtgccacaagcctgaccctgatctggaaagtcagcgataacgagtcgtcatctaactatacctacaagatacatgtggcgggggagacagattcttccaatctcaacgtcagtgagcctcgcgctgtcatccccggactccgctccagcaccttctacaacatcacagtgtgtcctgtcctaggtgacatcgagggcacgccgggcttcctccaagtgcacaccccccctgttccagtttctgacttccgagtgacagtggtcagcacgacggagatcggcttagcatggagcagccatgatgcagaatcatttcagatgcatatcacacaggagggagctggcaattctcgggtagaaataaccaccaaccaaagtattatcattggtggcttgttccctggaaccaagtattgctttgaaatagttccaaaaggaccaaatgggactgaaggggcatctcggacagtttgcaatagaactgttcccagtgcagtgtttgacatccacgtggtctacgtcaccaccacggagatgtggctggactggaagagccctgacggtgcttccgagtatgtctaccatttagtcatagagtccaagcatggctctaaccacacaagcacgtatgacaaagcgattactctccagggcctgattccgggcaccttatataacatcaccatctctccagaagtggaccacgtctggggggaccccaactccactgcacagtacacacggcccagcaatgtgtccaacattgatgtaagtaccaacaccacagcagcaactttaagttggcagaactttgatgacgcctctcccacgtactcctactgccttcttattgagaaggctggaaattccagcaacgcaacacaagtagtcacggacattggaattactgacgctacagtcactgaattaatacctggctcatcatacacagtggagatctttgcacaagtaggggatgggatcaagtcactggaacctggccggaagtcattctgtacagatcctgcgtccatggcctccttcgactgcgaagtggtccccaaagagccagccctggttctcaaatggacctgccctcctggcgccaatgcaggctttgagctggaggtcagcagtggagcctggaacaatgcgacccacctggagagctgctcctctgagaatggcactgagtatagaacggaagtcacgtatttgaatttttctacctcgtacaacatcagcatcaccactgtgtcctgtggaaagatggcagcccccacccggaacacctgcactactggcatcacagatccccctcctccagatggatcccctaatattacatctgtcagtcacaattcagtaaaggtcaagttcagtggatttgaagccagccacggacccatcaaagcctatgctgtcattctcaccaccggggaagctggtcacccttctgcagatgtcctgaaatacacgtatgaggatttcaaaaagggagcctcagatacttatgtgacatacctcataagaacagaagaaaagggacgttctcagagcttgtctgaagttttgaaatatgaaattgacgttgggaatgagtcaaccacacttggttattacaatgggaagctggaacctctgggctcctaccgggcttgtgtggctggcttcaccaacattaccttccaccctcaaaacaaggggctcattgatggggctgagagctatgtgtccttcagtcgctactcagatgctgtttccttgccccaggatccaggtgtcatctgtggagcggtttttggctgtatctttggtgccctggttattgtgactgtgggaggcttcatcttctggagaaagaagaggaaagatgcaaagaataatgaagtgtccttttctcaaattaaacctaaaaaatctaagttaatcagagtggagaattttgaggcctacttcaagaagcagcaagctgactccaactgtgggttcgcagaggaatacgaagatctgaagcttgttggaattagtcaacctaaatatgcagcagaactggctgagaatagaggaaagaatcgctataataatgttctgccctatgatatttcccgtgtcaaactttcggtccagacccattcaacggatgactacatcaatgccaactacatgcctggctaccactccaagaaagattttattgccacacaaggacctttaccgaacactttgaaagatttttggcgtatggtttgggagaaaaatgtatatgccatcattatgttgactaaatgtgttgaacagggaagaaccaaatgtgaggagtattggccctccaagcaggctcaggactatggagacataactgtggcaatgacatcagaaattgttcttccggaatggaccatcagagatttcacagtgaaaaatatccagacaagtgagagtcaccctctgagacagttccatttcacctcctggccagaccacggtgttcccgacaccactgacctgctcatcaacttccggtacctcgttcgtgactacatgaagcagagtcctcccgaatcgccgattctggtgcattgcagtgctggggtcggaaggacgggcactttcattgccattgatcgtctcatctaccagatagagaatgagaacaccgtggatgtgtatgggattgtgtatgaccttcgaatgcataggcctttaatggtgcagacagaggaccagtatgttttcctcaatcagtgtgttttggatattgtcagatcccagaaagactcaaaagtagatcttatctaccagaacacaactgcaatgacaatctatgaaaaccttgcgcccgtgaccacatttggaaagaccaatggttacatcgcctaattccaaaggaataacctttctggagtgaaccagaccgtcgcacccacagcgaaggcacatgccccgatgtcgacatgtttttatatgtctaatatcttaattctttgttctgttttgtgagaactaattttgagggcatgaagctgcatatgatagatgacaaattggggctgtcgggggctgtggatgggtggggagcaaatcatctgcattcctgatgaccaatgggatgaggtcactttttttttttttcccccttgaggattgtggaaaaccaggaaaagggagctatgatttttttttccaaaacaatttcttttttaaaaaagactattttatatgattcacatgctaaagccaggattgtgttgggttgaatatattttaagtatcagaggtctatttttacctactgtgtcttggaatctagccgatggaaaatacctaattgtggatgatgattgcgcagggaggggtacgtggcacctcttccgaatgggttttctatttgaacatgtgccttttctgaattatgcttccacaggcaaaactcagtagagatctatatttttgtactgaatctcataattggaatatacggaatatttaaacagtagcttagcatcagaggtttgcttcctcagtaacatttctgttctcatttgatcaggggaggcctctttgccccgactccgcttcccctgccccctgtacatttgtgctccattttttcttcccttttccctcccagttttc

SEQ ID NO: 24703 - DNA, 3158 bp, Homo sapiens
  source 1..3158: mol_type = unassigned DNA
ggaggaggcagcgggagcagccgcgggagccgggaccgggtagccgcgcgctgggggtgggcgccgctcgctccgccccgcgaagcccctgcgcgctcagggacgcggcccccccgcggcagccgcgctaggctccggcgtgtggccgcggccgccgccgccgctgccatgtctccggggaagcccggggcgggcggagcggggacgaggcggaccggctggcggaggaggaggcgaaggagacggcaggaggcggcgacgacggtgcccgggctcgggcgcacggcggggcccgattcgcgcgtccggggcacgttccagggcgcgcggggcatgaagccggcggcgcgggaggcgcggctgcctccgcgctcgcccgggctgcgctgggcgctgccgctgctgctgctgctgctgcgcctgggccagatcctgtgcgcaggtggcacccctagtccaattcctgacccttcagtagcaactgttgccacaggggaaaatggcataacgcagatcagcagtacagcagaatcctttcataaacagaatggaactggaacacctcaggtggaaacaaacaccagtgaggatggtgaaagctctggagccaacgatagtttaagaacacctgaacaaggatctaatgggactgatggggcatctcaaaaaactcccagtagcactgggcccagtcctgtgtttgacattaaagctgtttccatcagtccaaccaatgtgatcttaacttggaaaagtaatgacacagctgcttctgagtacaagtatgtagtaaagcataagatggaaaatgagaagacaattactgttgtgcatcaaccatggtgtaacatcacaggcttacgtccagcgacttcatatgtattctccatcactccaggaataggcaatgagacttggggagatcccagagtcataaaagtcatcacagagccgatcccagtttctgatctccgtgttgccctcacgggtgtgaggaaggctgctctctcctggagcaatggcaatggcactgcctcctgccgggttcttcttgaaagcattggaagccatgaggagttgactcaagactcaagacttcaggtcaatatctcgggcctgaagccaggggttcaatacaacatcaacccgtatcttctacaatcaaataagacaaagggagaccccttgggcacagaaggtggcttggatgccagcaatacagagagaagccgggcagggagccccaccgcccctgtgcatgatgagtccctcgtgggacctgtggacccatcctccggccagcagtcccgagacacggaagtcctgcttgtcgggttagagcctggcacccgatacaatgccaccgtttattcccaagcagcgaatggcacagaaggacagccccaggccatagagttcaggacaaatgctattcaggtttttgacgtcaccgctgtgaacatcagtgccacaagcctgaccctgatctggaaagtcagcgataacgagtcgtcatctaactatacctacaagatacatgtggcgggggagacagattcttccaatctcaacgtcagtgagcctcgcgctgtcatccccggactccgctccagcaccttctacaacatcacagtgtgtcctgtcctaggtgacatcgagggcacgccgggcttcctccaagtgcacaccccccctgttccagtttctgacttccgagtgacagtggtcagcacgacggagatcggcttagcatggagcagccatgatgcagaatcatttcagatgcatatcacacaggagggagctggcaattctcgggtagaaataaccaccaaccaaagtattatcattggtggcttgttccctggaaccaagtattgctttgaaatagttccaaaaggaccaaatgggactgaaggggcatctcggacagtttgcaatagaactggatgatttgaacacctgcctggaattccatcatctgaaacagagttggcagataagaatggcccctatgccaaatttggctcattgtctgtttttgtaaataaagttttattggatcacagccatgttcatttgcttatgtactgtctatggctactttggtgctagaattgagtagtggcagcagagaacgtgtggcttgtgaagcctgagatatttattttctggccattacagagaatgtttgctgacctctgggctagatcagtggttttcaaattgtggtccagggctctctagggatccctaggttctttcaaggggtctccaaggtagtattatcataacaatactaaaatgttatttggctttttcattctcattctcttttggagttttccaactttgatccgatatgggatgacattgtctctcaggtctaatggaatatatgctgtggattcttacattttaaaaatttcttcattttaaatccctgatatagtaaatattaataaatataacctatgtaaatacaaattctctgagagccttaataacttttaagatggtaaagaagtcctgagagcaaaaagtttaagaacctctggtcaagatgtgttagaaattaactactgtgctgtgttgggcaggtggactgttcacagtctttcctaaacaacactgtgatgagatactttgttagttctagaaggctaattgaaattgataaaatcattttatagtcagctacggtggcctgcacccatcgtcccagctacttgagaggctgcggcaggaggattgcttggcccaacagttgcagactagcaccagcctgggagaccctgtctcaaaaaaaaatttttttttatagaaacagtttaaattattaaattatttctaggcctacaggagaaacttctgggaaatcctagagagtaatgttcattattgttgttttaaaattttgaaataattgttttttggaaaggttgaaaaacatacagtcttccttgatctaagattcaagatagttgaaatcttttatacagagggtagaataaagatatacctaatgtaaatgatgagttaatgggtgcagcacaccaacatggcacatgtatacatatgtaacaaacctgcacgttgtgcacatgtaccctagaacttaaagtataataaaaacatatatatatatataaaagaaa

SEQ ID NO: 24704 - DNA, 4758 bp, Homo sapiens
  source 1..4758: mol_type = unassigned DNA
tccgccgagcatggagagctgccgccgcggccggccggcgacgctggcgacgctttcgcccctgaggtagtttggcgaccgcgaagaaggaaaaagggcgggcgggcggctgtcctctcaccgtcctcaccccgcgaggcccggcccgctcctccgtcgtggatttcgcggcgatccccccggcagctctttgcaaagctgcttgaaacttctcccaaactcggcatggatacgactgcggcggcggcgctgcctgcttttgtggcgctcttgctcctctctccttggcctctcctgggatcggcccaaggccagttctccgcaggtggctgtacttttgatgatggtccaggggcctgtgattaccaccaggatctgtatgatgactttgaatgggtgcatgttagtgctcaagagcctcattatctaccacccgagatgccccaaggttcctatatgatagtggactcttcagatcacgaccctggagaaaaagccagacttcagctgcctacaatgaaggagaacgacactcactgcattgatttcagttacctattatatagccagaaaggactgaatcctggcactttgaacatattagttagggtgaataaaggacctcttgccaatccaatttggaatgtgactggattcacgggtagagattggcttcgggctgagctagcagtgagcaccttttggcccaatgaatatcaggtaatatttgaagctgaagtctcaggagggagaagtggttatattgccattgatgacatccaagtactgagttatccttgtgataaatctcctcatttcctccgtctaggggatgtagaggtgaatgcagggcaaaacgctacatttcagtgcattgccacagggagagatgctgtgcataacaagttatggctccagagacgaaatggagaagatataccagtagcccagactaagaacatcaatcatagaaggtttgccgcttccttcagattgcaagaagtgacaaaaactgaccaggatttgtatcgctgtgtaactcagtcagaacgaggttccggtgtgtccaattttgctcaacttattgtgagagaaccgccaagacccattgctcctcctcagcttcttggtgttgggcctacatatttgctgatccaactaaatgccaactcgatcattggcgatggtcctatcatcctgaaagaagtagagtaccgaatgacatcaggatcctggacagaaacccatgcagtcaatgctccaacttacaaattatggcatttagatccagataccgaatatgagatccgagttctacttacaagacctggtgaaggtggaacggggctcccaggacctccactaatcaccagaacaaaatgtgcagaacctatgagaaccccaaagacattaaagattgctgaaatacaggcaagacggattgctgtggactgggaatccttgggttacaacattacgcgttgccacacttttaatgtcactatctgctaccattacttccgtggtcacaacgagagcaaggcagactgtttggacatggaccccaaagcccctcagcatgttgtgaaccatctgccaccttatacaaatgtcagcctcaagatgatcctaaccaatccagagggaaggaaggagagtgaagagacaattattcaaactgatgaagatgtgcctggtcccgtaccagtaaaatctcttcaaggaacatcctttgaaaataagatcttcttgaactggaaagaacctttggatccaaatggaatcatcactcaatatgagatcagctatagcagtataagatcatttgatcctgcagttccagtggctggacctccccagactgtatcaaatttatggaacagtacacaccatgtctttatgcatctccaccctggaaccacgtaccagtttttcataagagccagcacggtcaaaggctttggtccagccacagccatcaatgtcaccaccaatatctcagctccaactttacctgactatgaaggagttgatgcctctctcaatgaaactgccaccacaataactgtattgttgagaccagcacaagccaaaggtgctcctatcagtgcttatcagattgttgtggaagaactgcacccacaccgaaccaagagagaagccggagccatggaatgctaccaggttcctgtcacataccaaaatgccatgagtgggggtgcaccgtattactttgctgcagaactccccccgggaaacctacctgagcctgccccgttcactgtgggtgacaatcggacctaccaaggcttttggaaccctcctttggctccgcgcaaaggatacaacatctatttccaggcgatgagcagtgtggagaaggaaactaaaacccagtgcgtacgcattgctacaaaagcagcagcaacagaagaaccagaagtgatcccagatcccgccaagcagacagacagagtggtgaaaatagcaggaattagtgctggaattttggtgttcatcctccttctcctagttgtcatattaattgtaaaaaagaggaggagctactattcttactcctactacctcaaacttgctaaaaaacgcaaagatgccatggggaatacccggcaggagatgactcacatggtgaatgcaatggatcgaagttatgctgatcagagcactctgcatgcagaagatcctctttccatcaccttcatggaccaacataactttagtccaagattgcccaatgatccacttgtaccgactgctgtgttagttcctataacagatgagaaccacagtgctacagcagagtccagtcgccttctagacgtacctcgctacctctgtgaggggacggaatccccttaccagacaggacagctgcatccagccatcagggtagctgatttactgcagcacattaatctcatgaagacatcagacagctatgggttcaaagaggaatatgagagcttttttgaaggacagtcagcatcttgggatgtagctaaaaaagatcaaaatagagcaaaaaaccgatatggaaacattatagcatatgatcactccagagtgattttgcaacccgtagaggatgatccttcctcagattatattaatgccaactatattgatatttggctgtacagggatggctaccagagaccaagtcattacattgcaacccaaggtcccgttcatgaaacagtgtatgatttctggaggatgatttggcaagaacaatctgcttgcattgtgatggttacaaatttagttgaggttggccgggttaaatgctataaatattggcctgatgatactgaagtttatggtgacttcaaagtaacgtgtgtagaaatggaaccacttgctgaatatgtagttaggacattcaccctggaaaggagggggtacaatgaaatccgtgaagttaaacagttccatttcacgggctggcctgaccatggagtgccctaccatgctacagggctgctttcctttatccggcgagtcaagttatcaaaccctcccagtgctggccccatcgttgtacattgcagtgctggtgctggacgaactggctgctacattgtgattgacatcatgctagacatggctgaaagagagggtgttgttgatatttacaattgtgtcaaagccttaagatctcggcgtattaatatggtccagacagaggaacagtacatttttattcatgatgccattttagaagcctgcttatgtggagaaactgccatacctgtctgtgaatttaaagctgcatattttgatatgattagaatagactcccagactaactcttcacatctcaaggatgaatttcagactctgaattcagtcacccctcgactacaagctgaagactgcagtatagcgtgcctgccaaggaaccatgacaagaaccgtttcatggacatgctgccacctgacagatgtctgccttttttaattacaattgatggggagagcagtaactacatcaatgctgctcttatggacagctacaggcaaccagctgctttcatcgtcacacaataccctctgccaaacactgtaaaagacttctggagattagtgtatgattatggctgtacctccattgtgatgttaaacgaagtcgacttgtcccagggctgccctcagtactggccagaggaagggatgctacgatatggccccatccaagtggaatgtatgtcttgttcaatggactgtgatgtgatcaaccggatttttaggatatgcaatctaacaagaccacaggaaggttatctgatggtgcaacagtttcagtacctaggatgggcttctcatcgagaagtgcctggatccaaaaggtcattcttgaaactgatacttcaggtggaaaagtggcaggaggaatgcgaggaaggggaaggccggacgattatccactgcctaaatggtggcgggcgaagtggcatgttctgtgctataggcatcgttgttgaaatggtgaaacggcaaaatgttgtcgatgttttccatgcagtaaagacactgaggaacagcaagccaaacatggtggaagccccggagcaataccgtttctgctatgatgtagctttggagtacctggaatcatcttagttgggtgagactctttaaagtgcatccatgaagaaacctgtccatctattgagccagcagctgttgtacctgttacacttgtgcagaaagattttaatgtggggggtgggagac

SEQ ID NO: 24705 - DNA, 5025 bp, Homo sapiens
  source 1..5025: mol_type = unassigned DNA
gagcaaagtaactcttgactaacaggagcagcctccgccgagcatggagagctgccgccgcggccggccggcgacgctggcgacgctttcgcccctgaggtagtttggcgaccgcgaagaaggaaaaagggcgggcgggcggctgtcctctcaccgtcctcaccccgcgaggcccggcccgctcctccgtcgtggatttcgcggcgatccccccggcagctctttgcaaagctgcttgaaacttctcccaaactcggcatggatacgactgcggcggcggcgctgcctgcttttgtggcgctcttgctcctctctccttggcctctcctgggatcggcccaaggccagttctccgcaggtggctgtacttttgatgatggtccaggggcctgtgattaccaccaggatctgtatgatgactttgaatgggtgcatgttagtgctcaagagcctcattatctaccacccgagatgccccaaggttcctatatgatagtggactcttcagatcacgaccctggagaaaaagccagacttcagctgcctacaatgaaggagaacgacactcactgcattgatttcagttacctattatatagccagaaaggactgaatcctggcactttgaacatattagttagggtgaataaaggacctcttgccaatccaatttggaatgtgactggattcacgggtagagattggcttcgggctgagctagcagtgagcaccttttggcccaatgaatatcaggtaatatttgaagctgaagtctcaggagggagaagtggttatattgccattgatgacatccaagtactgagttatccttgtgataaatctcctcatttcctccgtctaggggatgtagaggtgaatgcagggcaaaacgctacatttcagtgcattgccacagggagagatgctgtgcataacaagttatggctccagagacgaaatggagaagatataccagtagcccagactaagaacatcaatcatagaaggtttgccgcttccttcagattgcaagaagtgacaaaaactgaccaggatttgtatcgctgtgtaactcagtcagaacgaggttccggtgtgtccaattttgctcaacttattgtgagagaaccgccaagacccattgctcctcctcagcttcttggtgttgggcctacatatttgctgatccaactaaatgccaactcgatcattggcgatggtcctatcatcctgaaagaagtagagtaccgaatgacatcaggatcctggacagaaacccatgcagtcaatgctccaacttacaaattatggcatttagatccagataccgaatatgagatccgagttctacttacaagacctggtgaaggtggaacggggctcccaggacctccactaatcaccagaacaaaatgtgcagaacctatgagaaccccaaagacattaaagattgctgaaatacaggcaagacggattgctgtggactgggaatccttgggttacaacattacgcgttgccacacttttaatgtcactatctgctaccattacttccgtggtcacaacgagagcaaggcagactgtttggacatggaccccaaagcccctcagcatgttgtgaaccatctgccaccttatacaaatgtcagcctcaagatgatcctaaccaatccagagggaaggaaggagagtgaagagacaattattcaaactgatgaagatgtgcctggtcccgtaccagtaaaatctcttcaaggaacatcctttgaaaataagatcttcttgaactggaaagaacctttggatccaaatggaatcatcactcaatatgagatcagctatagcagtataagatcatttgatcctgcagttccagtggctggacctccccagactgtatcaaatttatggaacagtacacaccatgtctttatgcatctccaccctggaaccacgtaccagtttttcataagagccagcacggtcaaaggctttggtccagccacagccatcaatgtcaccaccaatatctcagctccaactttacctgactatgaaggagttgatgcctctctcaatgaaactgccaccacaataactgtattgttgagaccagcacaagccaaaggtgctcctatcagtgcttatcagattgttgtggaagaactgcacccacaccgaaccaagagagaagccggagccatggaatgctaccaggttcctgtcacataccaaaatgccatgagtgggggtgcaccgtattactttgctgcagaactccccccgggaaacctacctgagcctgccccgttcactgtgggtgacaatcggacctaccaaggcttttggaaccctcctttggctccgcgcaaaggatacaacatctatttccaggcgatgagcagtgtggagaaggaaactaaaacccagtgcgtacgcattgctacaaaagcagcagcaacagaagaaccagaagtgatcccagatcccgccaagcagacagacagagtggtgaaaatagcaggaattagtgctggaattttggtgttcatcctccttctcctagttgtcatattaattgtaaaaaagagcaaacttgctaaaaaacgcaaagatgccatggggaatacccggcaggagatgactcacatggtgaatgcaatggatcgaagttatgctgatcagagcactctgcatgcagaagatcctctttccatcaccttcatggaccaacataactttagtccaagattgcccaatgatccacttgtaccgactgctgtgttagatgagaaccacagtgctacagcagagtccagtcgccttctagacgtacctcgctacctctgtgaggggacggaatccccttaccagacaggacagctgcatccagccatcagggtagctgatttactgcagcacattaatctcatgaagacatcagacagctatgggttcaaagaggaatatgagagcttttttgaaggacagtcagcatcttgggatgtagctaaaaaagatcaaaatagagcaaaaaaccgatatggaaacattatagcatatgatcactccagagtgattttgcaacccgtagaggatgatccttcctcagattatattaatgccaactatattgatatttggctgtacagggatggctaccagagaccaagtcattacattgcaacccaaggtcccgttcatgaaacagtgtatgatttctggaggatgatttggcaagaacaatctgcttgcattgtgatggttacaaatttagttgaggttggccgggttaaatgctataaatattggcctgatgatactgaagtttatggtgacttcaaagtaacgtgtgtagaaatggaaccacttgctgaatatgtagttaggacattcaccctggaaaggagggggtacaatgaaatccgtgaagttaaacagttccatttcacgggctggcctgaccatggagtgccctaccatgctacagggctgctttcctttatccggcgagtcaagttatcaaaccctcccagtgctggccccatcgttgtacattgcagtgctggtgctggacgaactggctgctacattgtgattgacatcatgctagacatggctgaaagagagggtgttgttgatatttacaattgtgtcaaagccttaagatctcggcgtattaatatggtccagacagaggaacagtacatttttattcatgatgccattttagaagcctgcttatgtggagaaactgccatacctgtctgtgaatttaaagctgcatattttgatatgattagaatagactcccagactaactcttcacatctcaaggatgaatttcagactctgaattcagtcacccctcgactacaagctgaagactgcagtatagcgtgcctgccaaggaaccatgacaagaaccgtttcatggacatgctgccacctgacagatgtctgccttttttaattacaattgatggggagagcagtaactacatcaatgctgctcttatggacagctacaggcaaccagctgctttcatcgtcacacaataccctctgccaaacactgtaaaagacttctggagattagtgtatgattatggctgtacctccattgtgatgttaaacgaagtcgacttgtcccagggctgccctcagtactggccagaggaagggatgctacgatatggccccatccaagtggaatgtatgtcttgttcaatggactgtgatgtgatcaaccggatttttaggatatgcaatctaacaagaccacaggaaggttatctgatggtgcaacagtttcagtacctaggatgggcttctcatcgagaagtgcctggatccaaaaggtcattcttgaaactgatacttcaggtggaaaagtggcaggaggaatgcgaggaaggggaaggccggacgattatccactgcctaaatggtggcgggcgaagtggcatgttctgtgctataggcatcgttgttgaaatggtgaaacggcaaaatgttgtcgatgttttccatgcagtaaagacactgaggaacagcaagccaaacatggtggaagccccggagcaataccgtttctgctatgatgtagctttggagtacctggaatcatcttagttgggtgagactctttaaagtgcatccatgaagaaacctgtccatctattgagccagcagctgttgtacctgttacacttgtgcagaaagattttaatgtggggggtgggagacttttacatttgagaggtaaaagtattttttttatgaagttgtgtatcttaataaaaaggactgaattagtttttattactatattaaagcatcaacatttcatgccacataaattatatttaataagaaccagattgaaatgagaacgtattggtgtttgtacagtgaacatgccaccttttttctcatggtttcagtagagcagctaccacatgttgcatgagttcatactttctacgtggcatttttctccctttctaaaatgaaagctgatga

SEQ ID NO: 24706 - DNA, 5816 bp, Homo sapiens
  source 1..5816: mol_type = unassigned DNA
tccgccgagcatggagagctgccgccgcggccggccggcgacgctggcgacgctttcgcccctgaggtagtttggcgaccgcgaagaaggaaaaagggcgggcgggcggctgtcctctcaccgtcctcaccccgcgaggcccggcccgctcctccgtcgtggatttcgcggcgatccccccggcagctctttgcaaagctgcttgaaacttctcccaaactcggcatggatacgactgcggcggcggcgctgcctgcttttgtggcgctcttgctcctctctccttggcctctcctgggatcggcccaaggccagttctccgcaggtggctgtacttttgatgatggtccaggggcctgtgattaccaccaggatctgtatgatgactttgaatgggtgcatgttagtgctcaagagcctcattatctaccacccgagatgccccaaggttcctatatgatagtggactcttcagatcacgaccctggagaaaaagccagacttcagctgcctacaatgaaggagaacgacactcactgcattgatttcagttacctattatatagccagaaaggactgaatcctggcactttgaacatattagttagggtgaataaaggacctcttgccaatccaatttggaatgtgactggattcacgggtagagattggcttcgggctgagctagcagtgagcaccttttggcccaatgaatatcaggtaatatttgaagctgaagtctcaggagggagaagtggttatattgccattgatgacatccaagtactgagttatccttgtgataaatctcctcatttcctccgtctaggggatgtagaggtgaatgcagggcaaaacgctacatttcagtgcattgccacagggagagatgctgtgcataacaagttatggctccagagacgaaatggagaagatataccagtagcccagactaagaacatcaatcatagaaggtttgccgcttccttcagattgcaagaagtgacaaaaactgaccaggatttgtatcgctgtgtaactcagtcagaacgaggttccggtgtgtccaattttgctcaacttattgtgagagaaccgccaagacccattgctcctcctcagcttcttggtgttgggcctacatatttgctgatccaactaaatgccaactcgatcattggcgatggtcctatcatcctgaaagaagtagagtaccgaatgacatcaggatcctggacagaaacccatgcagtcaatgctccaacttacaaattatggcatttagatccagataccgaatatgagatccgagttctacttacaagacctggtgaaggtggaacggggctcccaggacctccactaatcaccagaacaaaatgtgcagaacctatgagaaccccaaagacattaaagattgctgaaatacaggcaagacggattgctgtggactgggaatccttgggttacaacattacgcgttgccacacttttaatgtcactatctgctaccattacttccgtggtcacaacgagagcaaggcagactgtttggacatggaccccaaagcccctcagcatgttgtgaaccatctgccaccttatacaaatgtcagcctcaagatgatcctaaccaatccagagggaaggaaggagagtgaagagacaattattcaaactgatgaagatgtgcctggtcccgtaccagtaaaatctcttcaaggaacatcctttgaaaataagatcttcttgaactggaaagaacctttggatccaaatggaatcatcactcaatatgagatcagctatagcagtataagatcatttgatcctgcagttccagtggctggacctccccagactgtatcaaatttatggaacagtacacaccatgtctttatgcatctccaccctggaaccacgtaccagtttttcataagagccagcacggtcaaaggctttggtccagccacagccatcaatgtcaccaccaatatctcagctccaactttacctgactatgaaggagttgatgcctctctcaatgaaactgccaccacaataactgtattgttgagaccagcacaagccaaaggtgctcctatcagtgcttatcagattgttgtggaagaactgcacccacaccgaaccaagagagaagccggagccatggaatgctaccaggttcctgtcacataccaaaatgccatgagtgggggtgcaccgtattactttgctgcagaactccccccgggaaacctacctgagcctgccccgttcactgtgggtgacaatcggacctaccaaggcttttggaaccctcctttggctccgcgcaaaggatacaacatctatttccaggcgatgagcagtgtggagaaggaaactaaaacccagtgcgtacgcattgctacaaaagcagcagcaacagaagaaccagaagtgatcccagatcccgccaagcagacagacagagtggtgaaaatagcaggaattagtgctggaattttggtgttcatcctccttctcctagttgtcatattaattgtaaaaaagagcaaacttgctaaaaaacgcaaagatgccatggggaatacccggcaggagatgactcacatggtgaatgcaatggatcgaagttatgctgatcagagcactctgcatgcagaagatcctctttccatcaccttcatggaccaacataactttagtccaagatatgagaaccacagtgctacagcagagtccagtcgccttctagacgtacctcgctacctctgtgaggggacggaatccccttaccagacaggacagctgcatccagccatcagggtagctgatttactgcagcacattaatctcatgaagacatcagacagctatgggttcaaagaggaatatgagagcttttttgaaggacagtcagcatcttgggatgtagctaaaaaagatcaaaatagagcaaaaaaccgatatggaaacattatagcatatgatcactccagagtgattttgcaacccgtagaggatgatccttcctcagattatattaatgccaactatattgatatttggctgtacagggatggctaccagagaccaagtcattacattgcaacccaaggtcccgttcatgaaacagtgtatgatttctggaggatgatttggcaagaacaatctgcttgcattgtgatggttacaaatttagttgaggttggccgggttaaatgctataaatattggcctgatgatactgaagtttatggtgacttcaaagtaacgtgtgtagaaatggaaccacttgctgaatatgtagttaggacattcaccctggaaaggagggggtacaatgaaatccgtgaagttaaacagttccatttcacgggctggcctgaccatggagtgccctaccatgctacagggctgctttcctttatccggcgagtcaagttatcaaaccctcccagtgctggccccatcgttgtacattgcagtgctggtgctggacgaactggctgctacattgtgattgacatcatgctagacatggctgaaagagagggtgttgttgatatttacaattgtgtcaaagccttaagatctcggcgtattaatatggtccagacagaggaacagtacatttttattcatgatgccattttagaagcctgcttatgtggagaaactgccatacctgtctgtgaatttaaagctgcatattttgatatgattagaatagactcccagactaactcttcacatctcaaggatgaatttcagactctgaattcagtcacccctcgactacaagctgaagactgcagtatagcgtgcctgccaaggaaccatgacaagaaccgtttcatggacatgctgccacctgacagatgtctgccttttttaattacaattgatggggagagcagtaactacatcaatgctgctcttatggacagctacaggcaaccagctgctttcatcgtcacacaataccctctgccaaacactgtaaaagacttctggagattagtgtatgattatggctgtacctccattgtgatgttaaacgaagtcgacttgtcccagggctgccctcagtactggccagaggaagggatgctacgatatggccccatccaagtggaatgtatgtcttgttcaatggactgtgatgtgatcaaccggatttttaggatatgcaatctaacaagaccacaggaaggttatctgatggtgcaacagtttcagtacctaggatgggcttctcatcgagaagtgcctggatccaaaaggtcattcttgaaactgatacttcaggtggaaaagtggcaggaggaatgcgaggaaggggaaggccggacgattatccactgcctaaatggtggcgggcgaagtggcatgttctgtgctataggcatcgttgttgaaatggtgaaacggcaaaatgttgtcgatgttttccatgcagtaaagacactgaggaacagcaagccaaacatggtggaagccccggagcaataccgtttctgctatgatgtagctttggagtacctggaatcatcttagttgggtgagactctttaaagtgcatccatgaagaaacctgtccatctattgagccagcagctgttgtacctgttacacttgtgcagaaagattttaatgtggggggtgggagacttttacatttgagaggtaaaagtattttttttatgaagttgtgtatcttaataaaaaggactgaattagtttttattactatattaaagcatcaacatttcatgccacataaattatatttaataagaaccagattgaaatgagaacgtattggtgtttgtacagtgaacatgccaccttttttctcatggtttcagtagagcagctaccacatgttgcatgagttcatactttctacgtggcatttttctccctttctaaaatgaaagctgatgaatcttaaaaggaagaagaaaagaaaagctgtgcaaattcatagtaaagttcgttttttatatgtttccagtgtagcagatctctatataaatatataaatatatataactggcttattttcttttaatgtgcaatgatggctggatcatttaaagttctttttagaaaataacataagccaaagactcaagtgtaaatatgtctatatggagaaagcacattatatttattggttacttacattccttttttgatggctaaaatactaccaccacacaatcatcttttttttcctgaagaaagctttttctttagctaaaatcaattgtaaacgatttttgtagattattttttgtatgttttagtgtaagtagaagataaactttttattcataaaccaggaagcaatgttctttatagtgattctcttgtgtacatgcttgtgaattaaatttgtgtaaaatcccttggcaattgggtcttttaatataggaccaaattaaaacattttgctgaatatgtatagtttttcacaatttcattaggtaaataatggtttggtgatcatacatgagaaatgtacacattaaaaggccttgctgacaacttgcacaatgttgaacatagcctttaagcatcatttaaattttaaaggaatggagtttttcagcctgtggcccagcactggtcaagaaaacaagatggcaacatatatgctttcagggtcaaatttgagcaaactgtaaactgtcagggtgataaaatgtttctcttgatgtttacatgcacaagctttgcgttctgactataaaaagtgtgaacaaatcaatgccagattcctgttttgcgcattgtcatgg

SEQ ID NO: 24707 - DNA, 4651 bp, Homo sapiens
  source 1..4651: mol_type = unassigned DNA
atggatacgactgcggcggcggcgctgcctgcttttgtggcgctcttgctcctctctccttggcctctcctgggatcggcccaaggccagttctccgcaggtggctgtacttttgatgatggtccaggggcctgtgattaccaccaggatctgtatgatgactttgaatgggtgcatgttagtgctcaagagcctcattatctaccacccgagatgccccaaggttcctatatgatagtggactcttcagatcacgaccctggagaaaaagccagacttcagctgcctacaatgaaggagaacgacactcactgcattgatttcagttacctattatatagccagaaaggactgaatcctggcactttgaacatattagttagggtgaataaaggacctcttgccaatccaatttggaatgtgactggattcacgggtagagattggcttcgggctgagctagcagtgagcaccttttggcccaatgaatatcaggtaatatttgaagctgaagtctcaggagggagaagtggttatattgccattgatgacatccaagtactgagttatccttgtgataaatctcctcatttcctccgtctaggggatgtagaggtgaatgcagggcaaaacgctacatttcagtgcattgccacagggagagatgctgtgcataacaagttatggctccagagacgaaatggagaagatataccagtagcccagactaagaacatcaatcatagaaggtttgccgcttccttcagattgcaagaagtgacaaaaactgaccaggatttgtatcgctgtgtaactcagtcagaacgaggttccggtgtgtccaattttgctcaacttattgtgagagaaccgccaagacccattgctcctcctcagcttcttggtgttgggcctacatatttgctgatccaactaaatgccaactcgatcattggcgatggtcctatcatcctgaaagaagtagagtaccgaatgacatcaggatcctggacagaaacccatgcagtcaatgctccaacttacaaattatggcatttagatccagataccgaatatgagatccgagttctacttacaagacctggtgaaggtggaacggggctcccaggacctccactaatcaccagaacaaaatgtgcagaacctatgagaaccccaaagacattaaagattgctgaaatacaggcaagacggattgctgtggactgggaatccttgggttacaacattacgcgttgccacacttttaatgtcactatctgctaccattacttccgtggtcacaacgagagcaaggcagactgtttggacatggaccccaaagcccctcagcatgttgtgaaccatctgccaccttatacaaatgtcagcctcaagatgatcctaaccaatccagagggaaggaaggagagtgaagagacaattattcaaactgatgaagatgtgcctggtcccgtaccagtaaaatctcttcaaggaacatcctttgaaaataagatcttcttgaactggaaagaacctttggatccaaatggaatcatcactcaatatgagatcagctatagcagtataagatcatttgatcctgcagttccagtggctggacctccccagactgtatcaaatttatggaacagtacacaccatgtctttatgcatctccaccctggaaccacgtaccagtttttcataagagccagcacggtcaaaggctttggtccagccacagccatcaatgtcaccaccaatatctcagctccaactttacctgactatgaaggagttgatgcctctctcaatgaaactgccaccacaataactgtattgttgagaccagcacaagccaaaggtgctcctatcagtgcttatcagattgttgtggaagaactgcacccacaccgaaccaagagagaagccggagccatggaatgctaccaggttcctgtcacataccaaaatgccatgagtgggggtgcaccgtattactttgctgcagaactccccccgggaaacctacctgagcctgccccgttcactgtgggtgacaatcggacctaccaaggcttttggaaccctcctttggctccgcgcaaaggatacaacatctatttccaggcgatgagcagtgtggagaaggaaactaaaacccagtgcgtacgcattgctacaaaagcagcaacagaagaaccagaagtgatcccagatcccgccaagcagacagacagagtggtgaaaatagcaggaattagtgctggaattttggtgttcatcctccttctcctagttgtcatattaattgtaaaaaagagcaaacttgctaaaaaacgcaaagatgccatggggaatacccggcaggagatgactcacatggtgaatgcaatggatcgaagttatgctgatcagagcactctgcatgcagaagatcctctttccatcaccttcatggaccaacataactttagtccaagatatgagaaccacagtgctacagcagagtccagtcgccttctagacgtacctcgctacctctgtgaggggacggaatccccttaccagacaggacagctgcatccagccatcagggtagctgatttactgcagcacattaatctcatgaagacatcagacagctatgggttcaaagaggaatatgagagcttttttgaaggacagtcagcatcttgggatgtagctaaaaaagatcaaaatagagcaaaaaaccgatatggaaacattatagcatatgatcactccagagtgattttgcaacccgtagaggatgatccttcctcagattatattaatgccaactatattgatggctaccagagaccaagtcattacattgcaacccaaggtcccgttcatgaaacagtgtatgatttctggaggatgatttggcaagaacaatctgcttgcattgtgatggttacaaatttagttgaggttggccgggttaaatgctataaatattggcctgatgatactgaagtttatggtgacttcaaagtaacgtgtgtagaaatggaaccacttgctgaatatgtagttaggacattcaccctggaaaggagggggtacaatgaaatccgtgaagttaaacagttccatttcacgggctggcctgaccatggagtgccctaccatgctacagggctgctttcctttatccggcgagtcaagttatcaaaccctcccagtgctggccccatcgttgtacattgcagtgctggtgctggacgaactggctgctacattgtgattgacatcatgctagacatggctgaaagagagggtgttgttgatatttacaattgtgtcaaagccttaagatctcggcgtattaatatggtccagacagaggaacagtacatttttattcatgatgccattttagaagcctgcttatgtggagaaactgccatacctgtctgtgaatttaaagctgcatattttgatatgattagaatagactcccagactaactcttcacatctcaaggatgaatttcagactctgaattcagtcacccctcgactacaagctgaagactgcagtatagcgtgcctgccaaggaaccatgacaagaaccgtttcatggacatgctgccacctgacagatgtctgccttttttaattacaattgatggggagagcagtaactacatcaatgctgctcttatggacagctacaggcaaccagctgctttcatcgtcacacaataccctctgccaaacactgtaaaagacttctggagattagtgtatgattatggctgtacctccattgtgatgttaaacgaagtcgacttgtcccagggctgccctcagtactggccagaggaagggatgctacgatatggccccatccaagtggaatgtatgtcttgttcaatggactgtgatgtgatcaaccggatttttaggatatgcaatctaacaagaccacaggaaggttatctgatggtgcaacagtttcagtacctaggatgggcttctcatcgagaagtgcctggatccaaaaggtcattcttgaaactgatacttcaggtggaaaagtggcaggaggaatgcgaggaaggggaaggccggacgattatccactgcctaaatggtggcgggcgaagtggcatgttctgtgctataggcatcgttgttgaaatggtgaaacggcaaaatgttgtcgatgttttccatgcagtaaagacactgaggaacagcaagccaaacatggtggaagccccggagcaataccgtttctgctatgatgtagctttggagtacctggaatcatcttagttgggtgagactctttaaagtgcatccatgaagaaacctgtccatctattgagccagcagctgttgtacctgttacacttgtgcagaaagattttaatgtggggggtgggagacttttacatttgagaggtaaaagtattttttttatgaagttgtgtatcttaataaaaaggactgaattagtttttattactatattaaagcatcaacatttcatgccacataaattatatttaataagaaccagattgaaatgagaacgtattggtgtttgtacagtgaacatgccaccttttttctcatggtttcagtagagcagctaccacatgtt

SEQ ID NO: 24708 - DNA, 6087 bp, Homo sapiens
  source 1..6087: mol_type = unassigned DNA
agaagcgcccggagcccgcggggcgacgtcacccccggctccgcccccgtccctccccgagcaaagtaactcttgactaacaggagcagcctccgccgagcatggagagctgccgccgcggccggccggcgacgctggcgacgctttcgcccctgaggtagtttggcgaccgcgaagaaggaaaaagggcgggcgggcggctgtcctctcaccgtcctcaccccgcgaggcccggcccgctcctccgtcgtggatttcgcggcgatccccccggcagctctttgcaaagctgcttgaaacttctcccaaactcggcatggatacgactgcggcggcggcgctgcctgcttttgtggcgctcttgctcctctctccttggcctctcctgggatcggcccaaggccagttctccgcaggtggctgtacttttgatgatggtccaggggcctgtgattaccaccaggatctgtatgatgactttgaatgggtgcatgttagtgctcaagagcctcattatctaccacccgagatgccccaaggttcctatatgatagtggactcttcagatcacgaccctggagaaaaagccagacttcagctgcctacaatgaaggagaacgacactcactgcattgatttcagttacctattatatagccagaaaggactgaatcctggcactttgaacatattagttagggtgaataaaggacctcttgccaatccaatttggaatgtgactggattcacgggtagagattggcttcgggctgagctagcagtgagcaccttttggcccaatgaatatcaggtaatatttgaagctgaagtctcaggagggagaagtggttatattgccattgatgacatccaagtactgagttatccttgtgataaatctcctcatttcctccgtctaggggatgtagaggtgaatgcagggcaaaacgctacatttcagtgcattgccacagggagagatgctgtgcataacaagttatggctccagagacgaaatggagaagatataccagtagcccagactaagaacatcaatcatagaaggtttgccgcttccttcagattgcaagaagtgacaaaaactgaccaggatttgtatcgctgtgtaactcagtcagaacgaggttccggtgtgtccaattttgctcaacttattgtgagagaaccgccaagacccattgctcctcctcagcttcttggtgttgggcctacatatttgctgatccaactaaatgccaactcgatcattggcgatggtcctatcatcctgaaagaagtagagtaccgaatgacatcaggatcctggacagaaacccatgcagtcaatgctccaacttacaaattatggcatttagatccagataccgaatatgagatccgagttctacttacaagacctggtgaaggtggaacggggctcccaggacctccactaatcaccagaacaaaatgtgcagaacctatgagaaccccaaagacattaaagattgctgaaatacaggcaagacggattgctgtggactgggaatccttgggttacaacattacgcgttgccacacttttaatgtcactatctgctaccattacttccgtggtcacaacgagagcaaggcagactgtttggacatggaccccaaagcccctcagcatgttgtgaaccatctgccaccttatacaaatgtcagcctcaagatgatcctaaccaatccagagggaaggaaggagagtgaagagacaattattcaaactgatgaagatgtgcctggtcccgtaccagtaaaatctcttcaaggaacatcctttgaaaataagatcttcttgaactggaaagaacctttggatccaaatggaatcatcactcaatatgagatcagctatagcagtataagatcatttgatcctgcagttccagtggctggacctccccagactgtatcaaatttatggaacagtacacaccatgtctttatgcatctccaccctggaaccacgtaccagtttttcataagagccagcacggtcaaaggctttggtccagccacagccatcaatgtcaccaccaatatctcagctccaactttacctgactatgaaggagttgatgcctctctcaatgaaactgccaccacaataactgtattgttgagaccagcacaagccaaaggtgctcctatcagtgcttatcagattgttgtggaagaactgcacccacaccgaaccaagagagaagccggagccatggaatgctaccaggttcctgtcacataccaaaatgccatgagtgggggtgcaccgtattactttgctgcagaactccccccgggaaacctacctgagcctgccccgttcactgtgggtgacaatcggacctaccaaggcttttggaaccctcctttggctccgcgcaaaggatacaacatctatttccaggcgatgagcagtgtggagaaggaaactaaaacccagtgcgtacgcattgctacaaaagcagcagcaacagaagaaccagaagtgatcccagatcccgccaagcagacagacagagtggtgaaaatagcaggaattagtgctggaattttggtgttcatcctccttctcctagttgtcatattaattgtaaaaaagagcaaacttgctaaaaaacgcaaagatgccatggggaatacccggcaggagatgactcacatggtgaatgcaatggatcgaagttatgctgatcagagcactctgcatgcagaagatcctctttccatcaccttcatggaccaacataactttagtccaagatatgagaaccacagtgctacagcagagtccagtcgccttctagacgtacctcgctacctctgtgaggggacggaatccccttaccagacaggacagctgcatccagccatcagggtagctgatttactgcagcacattaatctcatgaagacatcagacagctatgggttcaaagaggaatatgagagcttttttgaaggacagtcagcatcttgggatgtagctaaaaaagatcaaaatagagcaaaaaaccgatatggaaacattatagcatatgatcactccagagtgattttgcaacccgtagaggatgatccttcctcagattatattaatgccaactatattgatggctaccagagaccaagtcattacattgcaacccaaggtcccgttcatgaaacagtgtatgatttctggaggatgatttggcaagaacaatctgcttgcattgtgatggttacaaatttagttgaggttggccgggttaaatgctataaatattggcctgatgatactgaagtttatggtgacttcaaagtaacgtgtgtagaaatggaaccacttgctgaatatgtagttaggacattcaccctggaaaggagggggtacaatgaaatccgtgaagttaaacagttccatttcacgggctggcctgaccatggagtgccctaccatgctacagggctgctttcctttatccggcgagtcaagttatcaaaccctcccagtgctggccccatcgttgtacattgcagtgctggtgctggacgaactggctgctacattgtgattgacatcatgctagacatggctgaaagagagggtgttgttgatatttacaattgtgtcaaagccttaagatctcggcgtattaatatggtccagacagaggaacagtacatttttattcatgatgccattttagaagcctgcttatgtggagaaactgccatacctgtctgtgaatttaaagctgcatattttgatatgattagaatagactcccagactaactcttcacatctcaaggatgaatttcagactctgaattcagtcacccctcgactacaagctgaagactgcagtatagcgtgcctgccaaggaaccatgacaagaaccgtttcatggacatgctgccacctgacagatgtctgccttttttaattacaattgatggggagagcagtaactacatcaatgctgctcttatggacagctacaggcaaccagctgctttcatcgtcacacaataccctctgccaaacactgtaaaagacttctggagattagtgtatgattatggctgtacctccattgtgatgttaaacgaagtcgacttgtcccagggctgccctcagtactggccagaggaagggatgctacgatatggccccatccaagtggaatgtatgtcttgttcaatggactgtgatgtgatcaaccggatttttaggatatgcaatctaacaagaccacaggaaggttatctgatggtgcaacagtttcagtacctaggatgggcttctcatcgagaagtgcctggatccaaaaggtcattcttgaaactgatacttcaggtggaaaagtggcaggaggaatgcgaggaaggggaaggccggacgattatccactgcctaaatggtggcgggcgaagtggcatgttctgtgctataggcatcgttgttgaaatggtgaaacggcaaaatgttgtcgatgttttccatgcagtaaagacactgaggaacagcaagccaaacatggtggaagccccggagcaataccgtttctgctatgatgtagctttggagtacctggaatcatcttagttgggtgagactctttaaagtgcatccatgaagaaacctgtccatctattgagccagcagctgttgtacctgttacacttgtgcagaaagattttaatgtggggggtgggagacttttacatttgagaggtaaaagtattttttttatgaagttgtgtatcttaataaaaaggactgaattagtttttattactatattaaagcatcaacatttcatgccacataaattatatttaataagaaccagattgaaatgagaacgtattggtgtttgtacagtgaacatgccaccttttttctcatggtttcagtagagcagctaccacatgttgcatgagttcatactttctacgtggcatttttctccctttctaaaatgaaagctgatgaatcttaaaaggaagaagaaaagaaaagctgtgcaaattcatagtaaagttcgttttttatatgtttccagtgtagcagatctctatataaatatataaatatatataactggcttattttcttttaatgtgcaatgatggctggatcatttaaagttctttttagaaaataacataagccaaagactcaagtgtaaatatgtctatatggagaaagcacattatatttattggttacttacattccttttttgatggctaaaatactaccaccacacaatcatcttttttttcctgaagaaagctttttctttagctaaaatcaattgtaaacgatttttgtagattattttttgtatgttttagtgtaagtagaagataaactttttattcataaaccaggaagcaatgttctttatagtgattctcttgtgtacatgcttgtgaattaaatttgtgtaaaatcccttggcaattgggtcttttaatataggaccaaattaaaacattttgctgaatatgtatagtttttcacaatttcattaggtaaataatggtttggtgatcatacatgagaaatgtacacattaaaaggccttgctgacaacttgcacaatgttgaacatagcctttaagcatcatttaaattttaaaggaatggagtttttcagcctgtggcccagcactggtcaagaaaacaagatggcaacatatatgctttcagggtcaaatttgagcaaactgtaaactgtcagggtgataaaatgtttctcttgatgtttacatgcacaagctttgcgttctgactataaaaagtgtgaacaaatcaatgccagattcctgttttgcgcattgtcatgggattcttaagtgaacctttctaaatgtggtcttgttcacatgctccacgtagctgtaacttcacatcatcagcttgcagtttgtaattgactaaagcattccagtgtcctctttctagattgccagctcatgacatggtgcttataaagatttaattaaagtaagaatgaaataaagtttttataattataacagtta

SEQ ID NO: 24709 - DNA, 6188 bp, Homo sapiens
  source 1..6188: mol_type = unassigned DNA
gtctctccggcaggaggcggtggcggcgccgcgcccgagcccgcattcctcagaagcgcccggagcccgcggggcgacgtcacccccggctccgcccccgtccctccccgagcaaagtaactcttgactaacaggagcagcctccgccgagcatggagagctgccgccgcggccggccggcgacgctggcgacgctttcgcccctgaggtagtttggcgaccgcgaagaaggaaaaagggcgggcgggcggctgtcctctcaccgtcctcaccccgcgaggcccggcccgctcctccgtcgtggatttcgcggcgatccccccggcagctctttgcaaagctgcttgaaacttctcccaaactcggcatggatacgactgcggcggcggcgctgcctgcttttgtggcgctcttgctcctctctccttggcctctcctgggatcggcccaaggccagttctccgcaggtggctgtacttttgatgatggtccaggggcctgtgattaccaccaggatctgtatgatgactttgaatgggtgcatgttagtgctcaagagcctcattatctaccacccgagatgccccaaggttcctatatgatagtggactcttcagatcacgaccctggagaaaaagccagacttcagctgcctacaatgaaggagaacgacactcactgcattgatttcagttacctattatatagccagaaaggactgaatcctggcactttgaacatattagttagggtgaataaaggacctcttgccaatccaatttggaatgtgactggattcacgggtagagattggcttcgggctgagctagcagtgagcaccttttggcccaatgaatatcaggtaatatttgaagctgaagtctcaggagggagaagtggttatattgccattgatgacatccaagtactgagttatccttgtgataaatctcctcatttcctccgtctaggggatgtagaggtgaatgcagggcaaaacgctacatttcagtgcattgccacagggagagatgctgtgcataacaagttatggctccagagacgaaatggagaagatataccagtagcccagactaagaacatcaatcatagaaggtttgccgcttccttcagattgcaagaagtgacaaaaactgaccaggatttgtatcgctgtgtaactcagtcagaacgaggttccggtgtgtccaattttgctcaacttattgtgagagaaccgccaagacccattgctcctcctcagcttcttggtgttgggcctacatatttgctgatccaactaaatgccaactcgatcattggcgatggtcctatcatcctgaaagaagtagagtaccgaatgacatcaggatcctggacagaaacccatgcagtcaatgctccaacttacaaattatggcatttagatccagataccgaatatgagatccgagttctacttacaagacctggtgaaggtggaacggggctcccaggacctccactaatcaccagaacaaaatgtgcagaacctatgagaaccccaaagacattaaagattgctgaaatacaggcaagacggattgctgtggactgggaatccttgggttacaacattacgcgttgccacacttttaatgtcactatctgctaccattacttccgtggtcacaacgagagcaaggcagactgtttggacatggaccccaaagcccctcagcatgttgtgaaccatctgccaccttatacaaatgtcagcctcaagatgatcctaaccaatccagagggaaggaaggagagtgaagagacaattattcaaactgatgaagatgtgcctggtcccgtaccagtaaaatctcttcaaggaacatcctttgaaaataagatcttcttgaactggaaagaacctttggatccaaatggaatcatcactcaatatgagatcagctatagcagtataagatcatttgatcctgcagttccagtggctggacctccccagactgtatcaaatttatggaacagtacacaccatgtctttatgcatctccaccctggaaccacgtaccagtttttcataagagccagcacggtcaaaggctttggtccagccacagccatcaatgtcaccaccaatatctcagctccaactttacctgactatgaaggagttgatgcctctctcaatgaaactgccaccacaataactgtattgttgagaccagcacaagccaaaggtgctcctatcagtgcttatcagattgttgtggaagaactgcacccacaccgaaccaagagagaagccggagccatggaatgctaccaggttcctgtcacataccaaaatgccatgagtgggggtgcaccgtattactttgctgcagaactccccccgggaaacctacctgagcctgccccgttcactgtgggtgacaatcggacctaccaaggcttttggaaccctcctttggctccgcgcaaaggatacaacatctatttccaggcgatgagcagtgtggagaaggaaactaaaacccagtgcgtacgcattgctacaaaagcagcagcaacagaagaaccagaagtgatcccagatcccgccaagcagacagacagagtggtgaaaatagcaggaattagtgctggaattttggtgttcatcctccttctcctagttgtcatattaattgtaaaaaagagcaaacttgctaaaaaacgcaaagatgccatggggaatacccggcaggagatgactcacatggtgaatgcaatggatcgaagttatgctgatcagagcactctgcatgcagaagatcctctttccatcaccttcatggaccaacataactttagtccaagattgcccaatgatccacttgtaccgactgctgtgttagatgagaaccacagtgctacagcagagtccagtcgccttctagacgtacctcgctacctctgtgaggggacggaatccccttaccagacaggacagctgcatccagccatcagggtagctgatttactgcagcacattaatctcatgaagacatcagacagctatgggttcaaagaggaatatgagagcttttttgaaggacagtcagcatcttgggatgtagctaaaaaagatcaaaatagagcaaaaaaccgatatggaaacattatagcatatgatcactccagagtgattttgcaacccgtagaggatgatccttcctcagattatattaatgccaactatattgatgtaagtatttttataggctaccagagaccaagtcattacattgcaacccaaggtcccgttcatgaaacagtgtatgatttctggaggatgatttggcaagaacaatctgcttgcattgtgatggttacaaatttagttgaggttggccgggttaaatgctataaatattggcctgatgatactgaagtttatggtgacttcaaagtaacgtgtgtagaaatggaaccacttgctgaatatgtagttaggacattcaccctggaaaggagggggtacaatgaaatccgtgaagttaaacagttccatttcacgggctggcctgaccatggagtgccctaccatgctacagggctgctttcctttatccggcgagtcaagttatcaaaccctcccagtgctggccccatcgttgtacattgcagtgctggtgctggacgaactggctgctacattgtgattgacatcatgctagacatggctgaaagagagggtgttgttgatatttacaattgtgtcaaagccttaagatctcggcgtattaatatggtccagacagaggaacagtacatttttattcatgatgccattttagaagcctgcttatgtggagaaactgccatacctgtctgtgaatttaaagctgcatattttgatatgattagaatagactcccagactaactcttcacatctcaaggatgaatttcagactctgaattcagtcacccctcgactacaagctgaagactgcagtatagcgtgcctgccaaggaaccatgacaagaaccgtttcatggacatgctgccacctgacagatgtctgccttttttaattacaattgatggggagagcagtaactacatcaatgctgctcttatggacagctacaggcaaccagctgctttcatcgtcacacaataccctctgccaaacactgtaaaagacttctggagattagtgtatgattatggctgtacctccattgtgatgttaaacgaagtcgacttgtcccagggctgccctcagtactggccagaggaagggatgctacgatatggccccatccaagtggaatgtatgtcttgttcaatggactgtgatgtgatcaaccggatttttaggatatgcaatctaacaagaccacaggaaggttatctgatggtgcaacagtttcagtacctaggatgggcttctcatcgagaagtgcctggatccaaaaggtcattcttgaaactgatacttcaggtggaaaagtggcaggaggaatgcgaggaaggggaaggccggacgattatccactgcctaaatggtggcgggcgaagtggcatgttctgtgctataggcatcgttgttgaaatggtgaaacggcaaaatgttgtcgatgttttccatgcagtaaagacactgaggaacagcaagccaaacatggtggaagccccggagcaataccgtttctgctatgatgtagctttggagtacctggaatcatcttagttgggtgagactctttaaagtgcatccatgaagaaacctgtccatctattgagccagcagctgttgtacctgttacacttgtgcagaaagattttaatgtggggggtgggagacttttacatttgagaggtaaaagtattttttttatgaagttgtgtatcttaataaaaaggactgaattagtttttattactatattaaagcatcaacatttcatgccacataaattatatttaataagaaccagattgaaatgagaacgtattggtgtttgtacagtgaacatgccaccttttttctcatggtttcagtagagcagctaccacatgttgcatgagttcatactttctacgtggcatttttctccctttctaaaatgaaagctgatgaatcttaaaaggaagaagaaaagaaaagctgtgcaaattcatagtaaagttcgttttttatatgtttccagtgtagcagatctctatataaatatataaatatatataactggcttattttcttttaatgtgcaatgatggctggatcatttaaagttctttttagaaaataacataagccaaagactcaagtgtaaatatgtctatatggagaaagcacattatatttattggttacttacattccttttttgatggctaaaatactaccaccacacaatcatcttttttttcctgaagaaagctttttctttagctaaaatcaattgtaaacgatttttgtagattattttttgtatgttttagtgtaagtagaagataaactttttattcataaaccaggaagcaatgttctttatagtgattctcttgtgtacatgcttgtgaattaaatttgtgtaaaatcccttggcaattgggtcttttaatataggaccaaattaaaacattttgctgaatatgtatagtttttcacaatttcattaggtaaataatggtttggtgatcatacatgagaaatgtacacattaaaaggccttgctgacaacttgcacaatgttgaacatagcctttaagcatcatttaaattttaaaggaatggagtttttcagcctgtggcccagcactggtcaagaaaacaagatggcaacatatatgctttcagggtcaaatttgagcaaactgtaaactgtcagggtgataaaatgtttctcttgatgtttacatgcacaagctttgcgttctgactataaaaagtgtgaacaaatcaatgccagattcctgttttgcgcattgtcatgggattcttaagtgaacctttctaaatgtggtcttgttcacatgctccacgtagctgtaacttcacatcatcagcttgcagtttgtaattgactaaagcattccagtgtcctctttctagattgccagctcatgacatggtgcttataaagatttaattaaagtaagaatgaaataaagtttttataattataacagtt

SEQ ID NO: 24710 - DNA, 2768 bp, Homo sapiens
  source 1..2768: mol_type = unassigned DNA
gtctctccggcaggaggcggtggcggcgccgcgcccgagcccgcattcctcagaagcgcccggagcccgcggggcgacgtcacccccggctccgcccccgtccctccccgagcaaagtaactcttgactaacaggagcagcctccgccgagcatggagagctgccgccgcggccggccggcgacgctggcgacgctttcgcccctgaggtagtttggcgaccgcgaagaaggaaaaagggcgggcgggcggctgtcctctcaccgtcctcaccccgcgaggcccggcccgctcctccgtcgtggatttcgcggcgatccccccggcagctctttgcaaagctgcttgaaacttctcccaaactcggcatggatacgactgcggcggcggcgctgcctgcttttgtggcgctcttgctcctctctccttggcctctcctgggatcggcccaaggccagttctccgcaggtggctgtacttttgatgatggtccaggggcctgtgattaccaccaggatctgtatgatgactttgaatgggtgcatgttagtgctcaagagcctcattatctaccacccgagatgccccaaggtaatatttgaagctgaagtctcaggagggagaagtggttatattgccattgatgacatccaagtactgagttatccttgtgataaatctcctcatttcctccgtctaggggatgtagaggtgaatgcagggcaaaacgctacatttcagtgcattgccacagggagagatgctgtgcataacaagttatggctccagagacgaaatggagaagatataccagtagcccagactaagaacatcaatcatagaaggtttgccgcttccttcagattgcaagaagtgacaaaaactgaccaggatttgtatcgctgtgtaactcagtcagaacgaggttccggtgtgtccaattttgctcaacttattgtgagagaaccgccaagacccattgctcctcctcagcttcttggtgttgggcctacatatttgctgatccaactaaatgccaactcgatcattggcgatggtcctatcatcctgaaagaagtagagtaccgaatgacatcaggatcctggacagaaacccatgcagtcaatgctccaacttacaaattatggcatttagatccagataccgaatatgagatccgagttctacttacaagacctggtgaaggtggaacggggctcccaggacctccactaatcaccagaacaaaatgtgcagaacctatgagaaccccaaagacattaaagattgctgaaatacaggcaagacggattgctgtggactgggaatccttgggttacaacattacgcgttgccacacttttaatgtcactatctgctaccattacttccgtggtcacaacgagagcaaggcagactgtttggacatggaccccaaagcccctcagcatgttgtgaaccatctgccaccttatacaaatgtcagcctcaagatgatcctaaccaatccagagggaaggaaggagagtgaagagacaattattcaaactgatgaagatgtgcctggtcccgtaccagtaaaatctcttcaaggaacatcctttgaaaataagatcttcttgaactggaaagaacctttggatccaaatggaatcatcactcaatatgagatcagctatagcagtataagatcatttgatcctgcagttccagtggctggacctccccagactgtatcaaatttatggaacagtacacaccatgtctttatgcatctccaccctggaaccacgtaccagtttttcataagagccagcacggtcaaaggctttggtccagccacagccatcaatgtcaccaccaatatctcagctccaactttacctgactatgaaggagttgatgcctctctcaatgaaactgccaccacaataactgtattgttgagaccagcacaagccaaaggtgctcctatcagtgcttatcagattgttgtggaagaactgcacccacaccgaaccaagagagaagccggagccatggaatgctaccaggttcctgtcacataccaaaatgccatgagtgggggtgcaccgtattactttgctgcagaactccccccgggaaacctacctgagcctgccccgttcactgtgggtgacaatcggacctaccaaggcttttggaaccctcctttggctccgcgcaaaggatacaacatctatttccaggcgatgagcagtgtggagaaggaaactaaaacccagtgcgtacgcattgctacaaaagcagcagcaacagaagaaccagaagtgatcccagatcccgccaagcagacagacagagtggtgaaaatagcaggaattagtgctggaattttggtgttcatcctccttctcctagttgtcatattaattgtaaaaaagagatatatatgttggagaagacacatctgcattagaaacattaggaggagctactattcttactcctactacctcaaacttgctaaaaaacgcaaagatgccatggggaatacccggcaggagatgactcacatggtgaatgcaatggatcgaagttatgctgatcagagcactctgcatgcagaagatcctctttccatcaccttcatggaccaacataactttagtccaagattgcccaatgatccacttgtaccgactgctgtgttagtcccttctccaggaagaaaaaatgtttatcatggggacaacaattcattttttgctatatcctatttgtag

SEQ ID NO: 24711 - DNA, 5757 bp, Homo sapiens
  source 1..5757: mol_type = unassigned DNA
ggctgtcctctcaccgtcctcaccccgcgaggcccggcccgctcctccgtcgtggatttcgcggcgatccccccggcagctctttgcaaagctgcttgaaacttctcccaaactcggcatggatacgactgcggcggcggcgctgcctgcttttgtggcgctcttgctcctctctccttggcctctcctgggatcggcccaaggccagttctccgcaggtggctgtacttttgatgatggtccaggggcctgtgattaccaccaggatctgtatgatgactttgaatgggtgcatgttagtgctcaagagcctcattatctaccacccgagatgccccaaggttcctatatgatagtggactcttcagatcacgaccctggagaaaaagccagacttcagctgcctacaatgaaggagaacgacactcactgcattgatttcagttacctattatatagccagaaaggactgaatcctggcactttgaacatattagttagggtgaataaaggacctcttgccaatccaatttggaatgtgactggattcacgggtagagattggcttcgggctgagctagcagtgagcaccttttggcccaatgaatatcaggtaatatttgaagctgaagtctcaggagggagaagtggttatattgccattgatgacatccaagtactgagttatccttgtgataaatctcctcatttcctccgtctaggggatgtagaggtgaatgcagggcaaaacgctacatttcagtgcattgccacagggagagatgctgtgcataacaagttatggctccagagacgaaatggagaagatataccagtagcccagactaagaacatcaatcatagaaggtttgccgcttccttcagattgcaagaagtgacaaaaactgaccaggatttgtatcgctgtgtaactcagtcagaacgaggttccggtgtgtccaattttgctcaacttattgtgagagaaccgccaagacccattgctcctcctcagcttcttggtgttgggcctacatatttgctgatccaactaaatgccaactcgatcattggcgatggtcctatcatcctgaaagaagtagagtaccgaatgacatcaggatcctggacagaaacccatgcagtcaatgctccaacttacaaattatggcatttagatccagataccgaatatgagatccgagttctacttacaagacctggtgaaggtggaacggggctcccaggacctccactaatcaccagaacaaaatgtgcagaacctatgagaaccccaaagacattaaagattgctgaaatacaggcaagacggattgctgtggactgggaatccttgggttacaacattacgcgttgccacacttttaatgtcactatctgctaccattacttccgtggtcacaacgagagcaaggcagactgtttggacatggaccccaaagcccctcagcatgttgtgaaccatctgccaccttatacaaatgtcagcctcaagatgatcctaaccaatccagagggaaggaaggagagtgaagagacaattattcaaactgatgaagatgtgcctggtcccgtaccagtaaaatctcttcaaggaacatcctttgaaaataagatcttcttgaactggaaagaacctttggatccaaatggaatcatcactcaatatgagatcagctatagcagtataagatcatttgatcctgcagttccagtggctggacctccccagactgtatcaaatttatggaacagtacacaccatgtctttatgcatctccaccctggaaccacgtaccagtttttcataagagccagcacggtcaaaggctttggtccagccacagccatcaatgtcaccaccaatatctcagctccaactttacctgactatgaaggagttgatgcctctctcaatgaaactgccaccacaataactgtattgttgagaccagcacaagccaaaggtgctcctatcagtgcttatcagattgttgtggaagaactgcacccacaccgaaccaagagagaagccggagccatggaatgctaccaggttcctgtcacataccaaaatgccatgagtgggggtgcaccgtattactttgctgcagaactccccccgggaaacctacctgagcctgccccgttcactgtgggtgacaatcggacctaccaaggcttttggaaccctcctttggctccgcgcaaaggatacaacatctatttccaggcgatgagcagtgtggagaaggaaactaaaacccagtgcgtacgcattgctacaaaagcagcagcaacagaagaaccagaagtgatcccagatcccgccaagcagacagacagagtggtgaaaatagcaggaattagtgctggaattttggtgttcatcctccttctcctagttgtcatattaattgtaaaaaagagcaaacttgctaaaaaacgcaaagatgccatggggaatacccggcaggagatgactcacatggtgaatgcaatggatcgaagttatgctgatcagagcactctgcatgcagaagatcctctttccatcaccttcatggaccaacataactttagtccaagattgcccaatgatccacttgtaccgactgctgtgttagttcctataacagatgagaaccacagtgctacagcagagtccagtcgccttctagacgtacctcgctacctctgtgaggggacggaatccccttaccagacaggacagctgcatccagccatcagggtagctgatttactgcagcacattaatctcatgaagacatcagacagctatgggttcaaagaggaatatgagagcttttttgaaggacagtcagcatcttgggatgtagctaaaaaagatcaaaatagagcaaaaaaccgatatggaaacattatagcatatgatcactccagagtgattttgcaacccgtagaggatgatccttcctcagattatattaatgccaactatattgatatttggctgtacagggatggctaccagagaccaagtcattacattgcaacccaaggtcccgttcatgaaacagtgtatgatttctggaggatgatttggcaagaacaatctgcttgcattgtgatggttacaaatttagttgaggttggccgggttaaatgctataaatattggcctgatgatactgaagtttatggtgacttcaaagtaacgtgtgtagaaatggaaccacttgctgaatatgtagttaggacattcaccctggaaaggagggggtacaatgaaatccgtgaagttaaacagttccatttcacgggctggcctgaccatggagtgccctaccatgctacagggctgctttcctttatccggcgagtcaagttatcaaaccctcccagtgctggccccatcgttgtacattgcagtgctggtgctggacgaactggctgctacattgtgattgacatcatgctagacatggctgaaagagagggtgttgttgatatttacaattgtgtcaaagccttaagatctcggcgtattaatatggtccagacagaggaacagtacatttttattcatgatgccattttagaagcctgcttatgtggagaaactgccatacctgtctgtgaatttaaagctgcatattttgatatgattagaatagactcccagactaactcttcacatctcaaggatgaatttcagactctgaattcagtcacccctcgactacaagctgaagactgcagtatagcgtgcctgccaaggaaccatgacaagaaccgtttcatggacatgctgccacctgacagatgtctgccttttttaattacaattgatggggagagcagtaactacatcaatgctgctcttatggacagctacaggcaaccagctgctttcatcgtcacacaataccctctgccaaacactgtaaaagacttctggagattagtgtatgattatggctgtacctccattgtgatgttaaacgaagtcgacttgtcccagggctgccctcagtactggccagaggaagggatgctacgatatggccccatccaagtggaatgtatgtcttgttcaatggactgtgatgtgatcaaccggatttttaggatatgcaatctaacaagaccacaggaaggttatctgatggtgcaacagtttcagtacctaggatgggcttctcatcgagaagtgcctggatccaaaaggtcattcttgaaactgatacttcaggtggaaaagtggcaggaggaatgcgaggaaggggaaggccggacgattatccactgcctaaatggtggcgggcgaagtggcatgttctgtgctataggcatcgttgttgaaatggtgaaacggcaaaatgttgtcgatgttttccatgcagtaaagacactgaggaacagcaagccaaacatggtggaagccccggagcaataccgtttctgctatgatgtagctttggagtacctggaatcatcttagttgggtgagactctttaaagtgcatccatgaagaaacctgtccatctattgagccagcagctgttgtacctgttacacttgtgcagaaagattttaatgtggggggtgggagacttttacatttgagaggtaaaagtattttttttatgaagttgtgtatcttaataaaaaggactgaattagtttttattactatattaaagcatcaacatttcatgccacataaattatatttaataagaaccagattgaaatgagaacgtattggtgtttgtacagtgaacatgccaccttttttctcatggtttcagtagagcagctaccacatgttgcatgagttcatactttctacgtggcatttttctccctttctaaaatgaaagctgatgaatcttaaaaggaagaagaaaagaaaagctgtgcaaattcatagtaaagttcgttttttatatgtttccagtgtagcagatctctatataaatatataaatatatataactggcttattttcttttaatgtgcaatgatggctggatcatttaaagttctttttagaaaataacataagccaaagactcaagtgtaaatatgtctatatggagaaagcacattatatttattggttacttacattccttttttgatggctaaaatactaccaccacacaatcatcttttttttcctgaagaaagctttttctttagctaaaatcaattgtaaacgatttttgtagattattttttgtatgttttagtgtaagtagaagataaactttttattcataaaccaggaagcaatgttctttatagtgattctcttgtgtacatgcttgtgaattaaatttgtgtaaaatcccttggcaattgggtcttttaatataggaccaaattaaaacattttgctgaatatgtatagtttttcacaatttcattaggtaaataatggtttggtgatcatacatgagaaatgtacacattaaaaggccttgctgacaacttgcacaatgttgaacatagcctttaagcatcatttaaattttaaaggaatggagtttttcagcctgtggcccagcactggtcaagaaaacaagatggcaacatatatgctttcagggtcaaatttgagcaaactgtaaactgtcagggtgataaaatgtttctcttgatgtttacatgcacaagctttgcgttctgactataaaaagtgtgaacaaatcaatgccagattcctgttttgcgcattgtcatgg

SEQ ID NO: 24712 - DNA, 5058 bp, Homo sapiens
  source 1..5058: mol_type = unassigned DNA
atgaggggacttgggacttgcctggcgactttggccggacttttgctaactgcggcgggcgagacgttctcaggtggctgcctctttgatgagccgtatagcacatgtggatatagtcaatctgaaggtgatgacttcaattgggagcaagtgaacaccttgactaaaccgacttctgatccatggatgccatcaggttctttcatgctggtgaatgcctctgggagacctgaggggcagagagcccacctgctcttaccccaacttaaagaaaatgacacccactgcatcgattttcactattttgtgtccagcaagagtaattctcctccggggttactcaatgtctacgtgaaggtcaataacgggccactggggaatcctatctggaatatatctggagacccaacacgtacatggaacagggcagaactggccattagtactttctggcctaacttttatcaggtgatttttgaagtgataacttctggacatcaaggctatctcgctatcgatgaggtgaaggtgttaggacatccatgtaccaggactcctcacttcctgcggattcagaatgtggaagttaatgctggccagtttgctaccttccagtgcagtgccatcggcaggaccgtggcaggagacaggctctggttacagggcattgatgtgcgagatgctcctctgaaggaaatcaaggtgaccagctcccgacgcttcattgcttcatttaatgttgtgaataccaccaaacgagatgctggaaagtaccgctgcatgattcgcactgaaggaggtgttggaatatcaaactatgcagagttggtagttaaagaaccacccgttcctattgccccacctcagctcgcctctgtaggagccacctacctgtggatacagctcaacgccaactccatcaatggggatgggcccattgtggcccgagaggtggagtactgcacggccagtgggagctggaatgaccggcagccagtcgattccacgagctataaaattggacaccttgacccagatacagaatatgagattagtgtgctcctgaccaggccaggggagggtggcactggctctcctggtccagctctcaggacaagaacaaagtgtgctgatcccatgcgaggcccaagaaaactagaagtagtggaggtcaaatctcggcaaatcactatccgctgggagccatttggatataatgtaactcgttgccacagttataatctcactgtccactactgttaccaagttggaggacaagaacaagtgcgagaagaagtaagctgggatacagaaaactcacaccctcaacacacgatcactaacctgtcaccatacaccaatgtcagtgtgaaactgatcctcatgaacccagagggccggaaggaaagccaagaactcatagtgcagacagatgaagacctcccaggtgctgttcccactgaatccatacaaggaagtacctttgaagagaagatatttcttcagtggagagaaccaactcaaacatatggtgtaatcactttatatgagatcacctacaaagcagtcagttcctttgacccagaaatagatttatccaatcagagtggaagagtttcaaagctgggaaatgaaacccattttctgttttttggactgtatccggggaccacatactcctttaccatccgagctagcacagctaagggttttgggcctccagcaacaaaccagttcaccaccaaaatatcagcaccctctatgccagcttatgaacttgagacacctttgaatcaaactgacaataccgtgacagtcatgctgaaacctgcccacagcagaggagcacctgtcagtgtctatcaaatagttgttgaggaagaacgtcctcgaagaactaaaaagacgacagaaatcttaaagtgctacccagtgccaattcacttccagaatgcttctctgctgaactcacagtactactttgctgcagaatttcctgcagacagcctccaagctgcgcagccttttacaattggtgataataagacatataatggatactggaacactccccttctcccctataaaagctacagaatttatttccaagctgctagtagagccaatggggaaaccaaaatagactgtgtccaagtggccacaaaaggagctgccactccgaaaccagtcccagaacccgagaaacagacagaccatacagttaaaattgctggagtcatcgcgggcatcttgctgttcgtgattatatttcttggagttgtgttggtaatgaagaaaaggaaactggccaagaagcggaaagagaccatgagcagcacccgacaggagatgactgtgatggtgaactcaatggacaagagctatgctgagcagggcacaaactgcgacgaggctttctcattcatggacacgcacaatctgaatgggagatctgtgtcttcaccatcgtccttcacaatgaaaacaaatacactgagcacatcggtgcctaattcctattacccagatgaaacccacacaatggccagcgataccagcagcctggtgcagtcccatacttacaagaagcgagagccggccgacgtgccctatcagactgggcagctccaccccgccatccgggtggcagacctccttcagcacatcacacagatgaagtgtgcggagggctacggcttcaaggaggaatacgagagcttctttgaagggcagtctgcaccatgggactcggctaagaaagatgagaacagaatgaagaacagatacgggaatatcattgcatacgatcattcccgagtgaggctgcagacaatagaaggagacacaaactcagactatatcaatggcaattatatcgatggttatcatcgacccaatcattacattgctacccaagggccaatgcaggaaaccatctatgacttctggaggatggtgtggcacgaaaacactgcaagtatcatcatggtgaccaatcttgtggaagtgggaagggtcaaatgctgcaaatactggccagatgacacagagatatataaagacattaaagttaccctaatagaaacagaactactggcagaatatgtgataagaacatttgctgttgaaaagagaggtgtgcatgaaatccgagagatcagacagtttcacttcactggctggccggatcatggggtcccctaccatgccaccggcctgctgggattcgtgcggcaagtcaagtccaagagcccgcccagtgcaggcccactggtggtgcactgcagtgctggtgcagggaggactggctgtttcatcgtcattgatatcatgttggacatggccgaaagggaaggggtcgtagacatctacaactgcgtcagggagctgcggtcacggagggtgaacatggtgcaaacagaggagcagtatgtgtttatccacgatgcgatcctggaagcctgtctttgtggggacacctctgtgcctgcttcccaagttaggtctctgtattatgacatgaacaaactggatccacagacaaactcaagccagattaaagaggaattccggacgctaaacatggtgacaccaacgctgcgagtagaggactgcagcatcgcactgttgccccggaaccatgagaaaaaccggtgcatggacatcctgcccccagaccgctgcctgcccttcctcatcaccatcgatggggagagcagcaactacatcaatgctgccctcatggacagctataaacagccttcagcttttatagtcacccagcatcctttgccaaacacagtgaaagacttttggagactggtcctggattatcactgcacatccgtagttatgctaaatgatgtggatcctgcccagttgtgtccacagtactggccagaaaacggagtacacagacacggccccatccaggtggaatttgtctctgctgacctggaagaggacatcatcagcaggatattccgcatttacaatgccgccagaccccaagatggatatcggatggtgcagcaattccagttcctgggctggccgatgtacagggacacaccagtgtctaagcgctccttcttgaagctcattcgccaggtggacaagtggcaagaggagtacaatggcggggaaggccgcacggttgtgcactgcttgaacgggggaggccgcagtgggacgttctgcgccatcagcatcgtatgtgagatgctccggcaccagagaaccgtggatgtctttcacgctgtgaagacactgaggaacaacaagcccaacatggtcgacctcctggatcagtacaagttctgctacgaggtggccctggaatacttgaattctggctgatggtgtaaacagctctgcaaacaatccctttcataccacaaagccaagacgttccatggtatttgtgcaaaagagatgaagacttctcaatatgcttattttgctttgcataattggctctttttaagagcccaagaaagtgtttctaaaattgcttgcactgcccaatcccagtaatgctgctgcctgacagaaacacacacacagccacagttgccaaatcccgtactccttgccaccggcttcctagagcagcgtagacagctggtaaactgaagagcacaactatattcttatgaaggaatttgtacctttggggtattattttgtggcccgtgaccctcgttattgttacagctgagtgtatgtttttgttctgtggagaatgctatctggcattatggtaatatattattttaggtaatatttgtactttaacatgttgcataatatatgcttatgtagctttccaggactaacagataaatgtgtaatgaacaaagatatgttgtatgagtcgtcgtttctgtcagatttgtattgtttccaagggaaaagcttgggggaggactcagttcacaaaatgcaaaactcaacgatcagattcacggacccagagcttttccatgtgtttatattgtaaatatttttgatttcatcaaattatttattcattaaaagaaatttttgtgaagcaca

SEQ ID NO: 24713 - DNA, 5292 bp, Homo sapiens
  source 1..5292: mol_type = unassigned DNA
gtgctgtggcccaatcctgtgcgtgtctcctcttcaggctcctgccggagcatgcttctctaatcttaccatttatcactgacccttcggtgaaactctcttctgtttaaatttaccagggtacactttgtaatacttgggaccaagaatttgaagatagtaatcagacaaatcaaacaactagtagtagtggagagacacgtagccctacaggaaggggtagaattatcattaaaaacacagacaaaccagagactgcctgaaaaaaaaaaaaagatgaactggaaagattcaaagtaggctctattggaggtggctgcctctttgatgagccgtatagcacatgtggatatagtcaatctgaaggtgatgacttcaattgggagcaagtgaacaccttgactaaaccgacttctgatccatggatgccatcaggttctttcatgctggtgaatgcctctgggagacctgaggggcagagagcccacctgctcttaccccaacttaaagaaaatgacacccactgcatcgattttcactattttgtgtccagcaagagtaattctcctccggggttactcaatgtctacgtgaaggtcaataacgggccactggggaatcctatctggaatatatctggagacccaacacgtacatggaacagggcagaactggccattagtactttctggcctaacttttatcaggtgatttttgaagtgataacttctggacatcaaggctatctcgctatcgatgaggtgaaggtgttaggacatccatgtaccaggactcctcacttcctgcggattcagaatgtggaagttaatgctggccagtttgctaccttccagtgcagtgccatcggcaggaccgtggcaggagacaggctctggttacagggcattgatgtgcgagatgctcctctgaaggaaatcaaggtgaccagctcccgacgcttcattgcttcatttaatgttgtgaataccaccaaacgagatgctggaaagtaccgctgcatgattcgcactgaaggaggtgttggaatatcaaactatgcagagttggtagttaaagaaccacccgttcctattgccccacctcagctcgcctctgtaggagccacctacctgtggatacagctcaacgccaactccatcaatggggatgggcccattgtggcccgagaggtggagtactgcacggccagtgggagctggaatgaccggcagccagtcgattccacgagctataaaattggacaccttgacccagatacagaatatgagattagtgtgctcctgaccaggccaggggagggtggcactggctctcctggtccagctctcaggacaagaacaaagtgtgctgatcccatgcgaggcccaagaaaactagaagtagtggaggtcaaatctcggcaaatcactatccgctgggagccatttggatataatgtaactcgttgccacagttataatctcactgtccactactgttaccaagttggaggacaagaacaagtgcgagaagaagtaagctgggatacagaaaactcacaccctcaacacacgatcactaacctgtcaccatacaccaatgtcagtgtgaaactgatcctcatgaacccagagggccggaaggaaagccaagaactcatagtgcagacagatgaagacctcccaggtgctgttcccactgaatccatacaaggaagtacctttgaagagaagatatttcttcagtggagagaaccaactcaaacatatggtgtaatcactttatatgagatcacctacaaagcagtcagttcctttgacccagaaatagatttatccaatcagagtggaagagtttcaaagctgggaaatgaaacccattttctgttttttggactgtatccggggaccacatactcctttaccatccgagctagcacagctaagggttttgggcctccagcaacaaaccagttcaccaccaaaatatcagcaccctctatgccagcttatgaacttgagacacctttgaatcaaactgacaataccgtgacagtcatgctgaaacctgcccacagcagaggagcacctgtcagtgtctatcaaatagttgttgaggaagaacgtcctcgaagaactaaaaagacgacagaaatcttaaagtgctacccagtgccaattcacttccagaatgcttctctgctgaactcacagtactactttgctgcagaatttcctgcagacagcctccaagctgcgcagccttttacaattggtgataataagacatataatggatactggaacactccccttctcccctataaaagctacagaatttatttccaagctgctagtagagccaatggggaaaccaaaatagactgtgtccaagtggccacaaaaggagctgccactccgaaaccagtcccagaacccgagaaacagacagaccatacagttaaaattgctggagtcatcgcgggcatcttgctgttcgtgattatatttcttggagttgtgttggtaatgaagaaaaggaaactggccaagaagcggaaagagaccatgagcagcacccgacaggagatgactgtgatggtgaactcaatggacaagagctatgctgagcagggcacaaactgcgacgaggctttctcattcatggacacgcacaatctgaatgggagatctgtgtcttcaccatcgtccttcacaatgaaaacaaatacactgagcacatcggtgcctaattcctattacccagatgaaacccacacaatggccagcgataccagcagcctggtgcagtcccatacttacaagaagcgagagccggccgacgtgccctatcagactgggcagctccaccccgccatccgggtggcagacctccttcagcacatcacacagatgaagtgtgcggagggctacggcttcaaggaggaatacgagagcttctttgaagggcagtctgcaccatgggactcggctaagaaagatgagaacagaatgaagaacagatacgggaatatcattgcatacgatcattcccgagtgaggctgcagacaatagaaggagacacaaactcagactatatcaatggcaattatatcgatggttatcatcgacccaatcattacattgctacccaagggccaatgcaggaaaccatctatgacttctggaggatggtgtggcacgaaaacactgcaagtatcatcatggtgaccaatcttgtggaagtgggaagggtcaaatgctgcaaatactggccagatgacacagagatatataaagacattaaagttaccctaatagaaacagaactactggcagaatatgtgataagaacatttgctgttgaaaagagaggtgtgcatgaaatccgagagatcagacagtttcacttcactggctggccggatcatggggtcccctaccatgccaccggcctgctgggattcgtgcggcaagtcaagtccaagagcccgcccagtgcaggcccactggtggtgcactgcagtgctggtgcagggaggactggctgtttcatcgtcattgatatcatgttggacatggccgaaagggaaggggtcgtagacatctacaactgcgtcagggagctgcggtcacggagggtgaacatggtgcaaacagaggagcagtatgtgtttatccacgatgcgatcctggaagcctgtctttgtggggacacctctgtgcctgcttcccaagttaggtctctgtattatgacatgaacaaactggatccacagacaaactcaagccagattaaagaggaattccggacgctaaacatggtgacaccaacgctgcgagtagaggactgcagcatcgcactgttgccccggaaccatgagaaaaaccggtgcatggacatcctgcccccagaccgctgcctgcccttcctcatcaccatcgatggggagagcagcaactacatcaatgctgccctcatggacagctataaacagccttcagcttttatagtcacccagcatcctttgccaaacacagtgaaagacttttggagactggtcctggattatcactgcacatccgtagttatgctaaatgatgtggatcctgcccagttgtgtccacagtactggccagaaaacggagtacacagacacggccccatccaggtggaatttgtctctgctgacctggaagaggacatcatcagcaggatattccgcatttacaatgccgccagaccccaagatggatatcggatggtgcagcaattccagttcctgggctggccgatgtacagggacacaccagtgtctaagcgctccttcttgaagctcattcgccaggtggacaagtggcaagaggagtacaatggcggggaaggccgcacggttgtgcactgcttgaacgggggaggccgcagtgggacgttctgcgccatcagcatcgtatgtgagatgctccggcaccagagaaccgtggatgtctttcacgctgtgaagacactgaggaacaacaagcccaacatggtcgacctcctggatcagtacaagttctgctacgaggtggccctggaatacttgaattctggctgatggtgtaaacagctctgcaaacaatccctttcataccacaaagccaagacgttccatggtatttgtgcaaaagagatgaagacttctcaatatgcttattttgctttgcataattggctctttttaagagcccaagaaagtgtttctaaaattgcttgcactgcccaatcccagtaatgctgctgcctgacagaaacacacacacagccacagttgccaaatcccgtactccttgccaccggcttcctagagcagcgtagacagctggtaaactgaagagcacaactatattcttatgaaggaatttgtacctttggggtattattttgtggcccgtgaccctcgttattgttacagctgagtgtatgtttttgttctgtggagaatgctatctggcattatggtaatatattattttaggtaatatttgtactttaacatgttgcataatatatgcttatgtagctttccaggactaacagataaatgtgtaatgaacaaagatatgttgtatgagtcgtcgtttctgtcagatttgtattgtttccaagggaaaagcttgggggaggactcagttcacaaaatgcaaaactcaacgatcagattcacggacccagagcttttccatgtgtttatattgtaaatatttttgatttcatcaaattatttattcattaaaagaaatttttgtgaa

SEQ ID NO: 24714 - DNA, 4401 bp, Homo sapiens
  source 1..4401: mol_type = unassigned DNA
atgaggggacttgggacttgcctggcgactttggccggacttttgctaactgcggcgggcgagacgttctcaggtggctgcctctttgatgagccgtatagcacatgtggatatagtcaatctgaaggtgatgacttcaattgggagcaagtgaacaccttgactaaaccgacttctgatccatggatgccatcaggttctttcatgctggtgaatgcctctgggagacctgaggggcagagagcccacctgctcttaccccaacttaaagaaaatgacacccactgcatcgattttcactattttgtgtccagcaagagtaattctcctccggggttactcaatgtctacgtgaaggtcaataacgggccactggggaatcctatctggaatatatctggagacccaacacgtacatggaacagggcagaactggccattagtactttctggcctaacttttatcaggtgatttttgaagtgataacttctggacatcaaggctatctcgctatcgatgaggtgaaggtgttaggacatccatgtaccaggactcctcacttcctgcggattcagaatgtggaagttaatgctggccagtttgctaccttccagtgcagtgccatcggcaggaccgtggcaggagacaggctctggttacagggcattgatgtgcgagatgctcctctgaaggaaatcaaggtgaccagctcccgacgcttcattgcttcatttaatgttgtgaataccaccaaacgagatgctggaaagtaccgctgcatgattcgcactgaaggaggtgttggaatatcaaactatgcagagttggtagttaaagaaccacccgttcctattgccccacctcagctcgcctctgtaggagccacctacctgtggatacagctcaacgccaactccatcaatggggatgggcccattgtggcccgagaggtggagtactgcacggccagtgggagctggaatgaccggcagccagtcgattccacgagctataaaattggacaccttgacccagatacagaatatgagattagtgtgctcctgaccaggccaggggagggtggcactggctctcctggtccagctctcaggacaagaacaaagtgtgctgatcccatgcgaggcccaagaaaactagaagtagtggaggtcaaatctcggcaaatcactatccgctgggagccatttggatataatgtaactcgttgccacagttataatctcactgtccactactgttaccaagttggaggacaagaacaagtgcgagaagaagtaagctgggatacagaaaactcacaccctcaacacacgatcactaacctgtcaccatacaccaatgtcagtgtgaaactgatcctcatgaacccagagggccggaaggaaagccaagaactcatagtgcagacagatgaagacctcccaggtgctgttcccactgaatccatacaaggaagtacctttgaagagaagatatttcttcagtggagagaaccaactcaaacatatggtgtaatcactttatatgagatcacctacaaagcagtcagttcctttgacccagaaatagatttatccaatcagagtggaagagtttcaaagctgggaaatgaaacccattttctgttttttggactgtatccggggaccacatactcctttaccatccgagctagcacagctaagggttttgggcctccagcaacaaaccagttcaccaccaaaatatcagcaccctctatgccagcttatgaacttgagacacctttgaatcaaactgacaataccgtgacagtcatgctgaaacctgcccacagcagaggagcacctgtcagtgtctatcaaatagttgttgaggaagaacgtcctcgaagaactaaaaagacgacagaaatcttaaagtgctacccagtgccaattcacttccagaatgcttctctgctgaactcacagtactactttgctgcagaatttcctgcagacagcctccaagctgcgcagccttttacaattggtgataataagacatataatggatactggaacactccccttctcccctataaaagctacagaatttatttccaagctgctagtagagccaatggggaaaccaaaatagactgtgtccaagtggccacaaaaggagctgccactccgaaaccagtcccagaacccgagaaacagacagaccatacagttaaaattgctggagtcatcgcgggcatcttgctgttcgtgattatatttcttggagttgtgttggtaatgaagaaaaggaaactggccaagaagcggaaagagaccatgagcagcacccgacaggagatgactgtgatggtgaactcaatggacaagagctatgctgagcagggcacaaactgcgacgaggctttctcattcatggacacgcacaatctgaatgggagatctgtgtcttcaccatcgtccttcacaatgaaaacaaatacactgagcacatcggtgcctaattcctattacccagacccatttgtgccaactgcaattttagacttttctctaaacaatgaaacccacacaatggccagcgataccagcagcctggtgcagtcccatacttacaagaagcgagagccggccgacgtgccctatcagactgggcagctccaccccgccatccgggtggcagacctccttcagcacatcacacagatgaagtgtgcggagggctacggcttcaaggaggaatacgagagcttctttgaagggcagtctgcaccatgggactcggctaagaaagatgagaacagaatgaagaacagatacgggaatatcattgcatacgatcattcccgagtgaggctgcagacaatagaaggagacacaaactcagactatatcaatggcaattatatcgatggttatcatcgacccaatcattacattgctacccaagggccaatgcaggaaaccatctatgacttctggaggatggtgtggcacgaaaacactgcaagtatcatcatggtgaccaatcttgtggaagtgggaagggtcaaatgctgcaaatactggccagatgacacagagatatataaagacattaaagttaccctaatagaaacagaactactggcagaatatgtgataagaacatttgctgttgaaaagagaggtgtgcatgaaatccgagagatcagacagtttcacttcactggctggccggatcatggggtcccctaccatgccaccggcctgctgggattcgtgcggcaagtcaagtccaagagcccgcccagtgcaggcccactggtggtgcactgcagtgctggtgcagggaggactggctgtttcatcgtcattgatatcatgttggacatggccgaaagggaaggggtcgtagacatctacaactgcgtcagggagctgcggtcacggagggtgaacatggtgcaaacagaggagcagtatgtgtttatccacgatgcgatcctggaagcctgtctttgtggggacacctctgtgcctgcttcccaagttaggtctctgtattatgacatgaacaaactggatccacagacaaactcaagccagattaaagaggaattccggacgctaaacatggtgacaccaacgctgcgagtagaggactgcagcatcgcactgttgccccggaaccatgagaaaaaccggtgcatggacatcctgcccccagaccgctgcctgcccttcctcatcaccatcgatggggagagcagcaactacatcaatgctgccctcatggacagctataaacagccttcagcttttatagtcacccagcatcctttgccaaacacagtgaaagacttttggagactggtcctggattatcactgcacatccgtagttatgctaaatgatgtggatcctgcccagttgtgtccacagtactggccagaaaacggagtacacagacacggccccatccaggtggaatttgtctctgctgacctggaagaggacatcatcagcaggatattccgcatttacaatgccgccagaccccaagatggatatcggatggtgcagcaattccagttcctgggctggccgatgtacagggacacaccagtgtctaagcgctccttcttgaagctcattcgccaggtggacaagtggcaagaggagtacaatggcggggaaggccgcacggttgtgcactgcttgaacgggggaggccgcagtgggacgttctgcgccatcagcatcgtatgtgagatgctccggcaccagagaaccgtggatgtctttcacgctgtgaagacactgaggaacaacaagcccaacatggtcgacctcctggatcagtacaagttctgctacgaggtggccctggaatacttgaattctggctga

SEQ ID NO: 24715 - DNA, 4414 bp, Homo sapiens
  source 1..4414: mol_type = unassigned DNA
atgggaaccctctccctccatcctggcattgatgtgcgagatgctcctctgaaggaaatcaaggtgaccagctcccgacgcttcattgcttcatttaatgttgtgaataccaccaaacgagatgctggaaagtaccgctgcatgattcgcactgaaggaggtgttggaatatcaaactatgcagagttggtagttaaagaaccacccgttcctattgccccacctcagctcgcctctgtaggagccacctacctgtggatacagctcaacgccaactccatcaatggggatgggcccattgtggcccgagaggtggagtactgcacggccagtgggagctggaatgaccggcagccagtcgattccacgagctataaaattggacaccttgacccagatacagaatatgagattagtgtgctcctgaccaggccaggggagggtggcactggctctcctggtccagctctcaggacaagaacaaagtgtgctgatcccatgcgaggcccaagaaaactagaagtagtggaggtcaaatctcggcaaatcactatccgctgggagccatttggatataatgtaactcgttgccacagttataatctcactgtccactactgttaccaagttggaggacaagaacaagtgcgagaagaagtaagctgggatacagaaaactcacaccctcaacacacgatcactaacctgtcaccatacaccaatgtcagtgtgaaactgatcctcatgaacccagagggccggaaggaaagccaagaactcatagtgcagacagatgaagacctcccaggtgctgttcccactgaatccatacaaggaagtacctttgaagagaagatatttcttcagtggagagaaccaactcaaacatatggtgtaatcactttatatgagatcacctacaaagcagtcagttcctttgacccagaaatagatttatccaatcagagtggaagagtttcaaagctgggaaatgaaacccattttctgttttttggactgtatccggggaccacatactcctttaccatccgagctagcacagctaagggttttgggcctccagcaacaaaccagttcaccaccaaaatatcagcaccctctatgccagcttatgaacttgagacacctttgaatcaaactgacaataccgtgacagtcatgctgaaacctgcccacagcagaggagcacctgtcagtgtctatcaaatagttgttgaggaagaacgtcctcgaagaactaaaaagacgacagaaatcttaaagtgctacccagtgccaattcacttccagaatgcttctctgctgaactcacagtactactttgctgcagaatttcctgcagacagcctccaagctgcgcagccttttacaattggtgataataagacatataatggatactggaacactccccttctcccctataaaagctacagaatttatttccaagctgctagtagagccaatggggaaaccaaaatagactgtgtccaagtggccacaaaaggagctgccactccgaaaccagtcccagaacccgagaaacagacagaccatacagttaaaattgctggagtcatcgcgggcatcttgctgttcgtgattatatttcttggagttgtgttggtaatgaagaaaaggaaactggccaagaagcggaaagagaccatgagcagcacccgacaggagatgactgtgatggtgaactcaatggacaagagctatgctgagcagggcacaaactgcgacgaggctttctcattcatggacacgcacaatctgaatgggagatctgtgtcttcaccatcgtccttcacaatgaaaacaaatacactgagcacatcggtgcctaattcctattacccagatgaaacccacacaatggccagcgataccagcagcctggtgcagtcccatacttacaagaagcgagagccggccgacgtgccctatcagactgggcagctccaccccgccatccgggtggcagacctccttcagcacatcacacagatgaagtgtgcggagggctacggcttcaaggaggaatacgagagcttctttgaagggcagtctgcaccatgggactcggctaagaaagatgagaacagaatgaagaacagatacgggaatatcattgcatacgatcattcccgagtgaggctgcagacaatagaaggagacacaaactcagactatatcaatggcaattatatcgatggttatcatcgacccaatcattacattgctacccaagggccaatgcaggaaaccatctatgacttctggaggatggtgtggcacgaaaacactgcaagtatcatcatggtgaccaatcttgtggaagtgggaagggtcaaatgctgcaaatactggccagatgacacagagatatataaagacattaaagttaccctaatagaaacagaactactggcagaatatgtgataagaacatttgctgttgaaaagagaggtgtgcatgaaatccgagagatcagacagtttcacttcactggctggccggatcatggggtcccctaccatgccaccggcctgctgggattcgtgcggcaagtcaagtccaagagcccgcccagtgcaggcccactggtggtgcactgcagtgctggtgcagggaggactggctgtttcatcgtcattgatatcatgttggacatggccgaaagggaaggggtcgtagacatctacaactgcgtcagggagctgcggtcacggagggtgaacatggtgcaaacagaggagcagtatgtgtttatccacgatgcgatcctggaagcctgtctttgtggggacacctctgtgcctgcttcccaagttaggtctctgtattatgacatgaacaaactggatccacagacaaactcaagccagattaaagaggaattccggacgctaaacatggtgacaccaacgctgcgagtagaggactgcagcatcgcactgttgccccggaaccatgagaaaaaccggtgcatggacatcctgcccccagaccgctgcctgcccttcctcatcaccatcgatggggagagcagcaactacatcaatgctgccctcatggacagctataaacagccttcagcttttatagtcacccagcatcctttgccaaacacagtgaaagacttttggagactggtcctggattatcactgcacatccgtagttatgctaaatgatgtggatcctgcccagttgtgtccacagtactggccagaaaacggagtacacagacacggccccatccaggtggaatttgtctctgctgacctggaagaggacatcatcagcaggatattccgcatttacaatgccgccagaccccaagatggatatcggatggtgcagcaattccagttcctgggctggccgatgtacagggacacaccagtgtctaagcgctccttcttgaagctcattcgccaggtggacaagtggcaagaggagtacaatggcggggaaggccgcacggttgtgcactgcttgaacgggggaggccgcagtgggacgttctgcgccatcagcatcgtatgtgagatgctccggcaccagagaaccgtggatgtctttcacgctgtgaagacactgaggaacaacaagcccaacatggtcgacctcctggatcagtacaagttctgctacgaggtggccctggaatacttgaattctggctgatggtgtaaacagctctgcaaacaatccctttcataccacaaagccaagacgttccatggtatttgtgcaaaagagatgaagacttctcaatatgcttattttgctttgcataattggctctttttaagagcccaagaaagtgtttctaaaattgcttgcactgcccaatcccagtaatgctgctgcctgacagaaacacacacacagccacagttgccaaatcccgtactccttgccaccggcttcctagagcagcgtagacagctggtaaactgaagagcacaactatattcttatgaaggaatttgtacctttggggtattattttgtggcccgtgaccctcgttattgttacagctgagtgtatgtttttgttctgtggagaatgctatctggcattatggtaatatattattttaggtaatatttgtactttaacatgttgcataatatatgcttatgtagctttccaggactaacagataaatgtgtaatgaacaaagatatgttgtatgagtcgtcgtttctgtcagatttgtattgtttccaagggaaaagcttgggggaggactcagttcacaaaatgcaaaactcaacgatcagattcacggacccagagcttttccatgtgtttatattgtaaatatttttgatttcatcaaattatttattcattaaaagaaatttttgtgaa

SEQ ID NO: 24716 - DNA, 3784 bp, Homo sapiens
  source 1..3784: mol_type = unassigned DNA
aggtaggtcccccgctccgacagggctcttacgccatatgtgacgcaaattagcttacgagccgggggtggaggtgtcgtcagcacccgcctgcggttggccgcgttgcagcgagaggggcatgtagaccccgcctcgtagggaggtggggagcggcaagccccgcctcagcccctctggcaggctcccgccagcgtcgctgcggctccggcccgggagcgagcgcccggagctcggaaagatgcggcgcccgcggcggcctgggggtctcgggggatccgggggtctccggctgctcctctgcctcctgctgctgagcagccgcccggggggctgcagcgccgttagtgcccacggctgtctatttgaccgcaggctctgctctcacctggaagtctgtattcaggatggcttgtttgggcagtgccaggtgggagtggggcaggcccggccccttttgcaagtcacctccccagttctccaacgcttacaaggtgtgctccgacaactcatgtcccaaggattgtcctggcacgatgacctcacccagtatgtgatctctcaggagatggagcgcatccccaggcttcgccccccagagccccgtccaagggacaggtctggcttggcacccaagagacctggtcctgctggagagctgcttttacaggacatccccactggctccgcccctgctgcccagcatcggcttccacaaccaccagtgggcaaaggtggagctggggccagctcctctctgtcccctctgcaggctgagctgctcccgcctctcttggagcacctgctgctgcccccacagcctccccacccttcactgagttacgaacctgccttgctgcagccctacctgttccaccagtttggctcccgtgatggctccagggtctcagagggctccccagggatggtcagtgtcggccccctgcccaaggctgaagcccctgccctcttcagcagaactgcctccaagggcatatttggggaccaccctggccactcctacggggaccttccagggccttcacctgcccagctttttcaagactctgggctgctctatctggcccaggagttgccagcacccagcagggccagggtgccaaggctgccagagcaagggagcagcagccgggcagaggactccccagagggctatgagaaggaaggactaggggatcgtggagagaagcctgcttccccagctgtgcagccagatgcggctctgcagaggctggccgctgtgctggcgggctatggggtagagctgcgtcagctgacccctgagcagctctccacactcctgaccctgctgcagctactgcccaagggtgcaggaagaaatccgggaggggttgtaaatgttggagctgatatcaagaaaacaatggaggggccggtggagggcagagacacagcagagcttccagcccgcacatcccccatgcctggacaccccactgccagccctacctccagtgaagtccagcaggtgccaagccctgtctcctctgagcctcccaaagctgccagaccccctgtgacacctgtcctgctagagaagaaaagcccactgggccagagccagcccacggtggcaggacagccctcagcccgcccagcagcagaggaatatggctacatcgtcactgatcagaagcccctgagcctggctgcaggagtgaagctgctggagatcctggctgagcatgtgcacatgtcctcaggcagcttcatcaacatcagtgtggtgggaccagccctcaccttccgcatccggcacaatgagcagaacctgtctttggctgatgtgacccaacaagcagggctggtgaagtctgaactggaagcacagacagggctccaaatcttgcagacaggagtgggacagagggaggaggcagctgcagtccttccccaaactgcgcacagcacctcacccatgcgctcagtgctgctcactctggtggccctggcaggtgtggctgggctgctggtggctctggctgtggctctgtgtgtgcggcagcatgcgcggcagcaagacaaggagcgcctggcagccctggggcctgagggggcccatggtgacactacctttgagtaccaggacctgtgccgccagcacatggccacgaagtccttgttcaaccgggcagagggtccaccggagccttcacgggtgagcagtgtgtcctcccagttcagcgacgcagcccaggccagccccagctcccacagcagcaccccgtcctggtgcgaggagccggcccaagccaacatggacatctccacgggacacatgattctggcatacatggaggatcacctgcggaaccgggaccgccttgccaaggagtggcaggccctctgtgcctaccaagcagagccaaacacctgtgccaccgcgcagggggagggcaacatcaaaaagaaccggcatcctgacttcctgccctatgaccatgcccgcataaaactgaaggtggagagcagcccttctcggagcgattacatcaacgccagccccattattgagcatgaccctcggatgccagcctacatagccacgcagggcccgctgtcccataccatcgcagacttctggcagatggtgtgggagagcggctgcaccgtcatcgtcatgctgaccccgctggtggaggatggtgtcaagcagtgtgaccgctactggccagatgagggtgcctccctctaccacgtatatgaggtgaacctggtgtcggagcacatctggtgcgaggactttctggtgcggagcttctacctgaagaacgtgcagacccaggagacgcgcacgctcacgcagttccacttcctcagctggccggcagagggcacaccggcctccacgcggcccctgctggacttccgcaggaaggtgaacaagtgctaccggggccgctcctgccccatcatcgtgcactgcagtgatggtgcggggaggaccggcacctacatcctcatcgacatggtcctgaaccgcatggcaaaaggagtgaaggagattgacatcgctgccaccctggagcatgtccgtgaccagcggcctggccttgtccgctctaaggaccagtttgaatttgccctgacagccgtggcggaggaagtgaatgccatcctcaaggccctgccccagtgagaccctggggccccttggcgggcagcccagcctctgtccctctttgcctgtgtgagcatctctgtgtacccactcctcactgccccaccagccacctcttgggcatgctcagcccttcctagaagagtcaggaagggaaagccagaaggggcacgcctgcccagcctcgcatgccagagcctggggcatcccagagcccagggcatcccatgggggtgctgcagccaggaggagaggaaaggacatgggtagcaattctacccagagccttctcctgcctacattccctggcctggctctcctgtagctctcctggggttctgggagttccctgaacatctgtgtgtgtccccctatgctccagtatggaagaatggggtggagggtcgccacacccggctccccctgcttctcagccccgggcctgcctctgactcacacttgggcgctctgccctccctggcctcacgcccagcctcctcccaccaccctcccaccatgcgctgctcaacctctctccttctggcgcaagagaacatttctagaaaaaactacttttgtaccagtgtgaataaagttagtgtgttgtctgtgcagctgcaa

SEQ ID NO: 24717 - DNA, 3622 bp, Homo sapiens
  source 1..3622: mol_type = unassigned DNA
gtcgtcagcacccgcctgcggttggccgcgttgcagcgagaggggcatgtagaccccgcctcgtagggaggtggggagcggcaagccccgcctcagcccctctggcaggctcccgccagcgtcgctgcggctccggcccgggagcgagcgcccggagctcggaaagatgcggcgcccgcggcggcctgggggtctcgggggatccgggggtctccggctgctcctctgcctcctgctgctgagcagccgcccggggggctgcagcgccgttagtgcccacggctgtctatttgaccgcaggctctgctctcacctggaagtctgtattcaggatggcttgtttgggcagtgccaggtgggagtggggcaggcccggccccttttgcaagtcacctccccagttctccaacgcttacaaggtgtgctccgacaactcatgtcccaaggattgtcctggcacgatgacctcacccagtatgtgatctctcaggagatggagcgcatccccaggcttcgccccccagagccccgtccaagggacaggtctggcttggcacccaagagacctggtcctgctggagagctgcttttacaggacatccccactggctccgcccctgctgcccagcatcggcttccacaaccaccagtgggcaaaggtggagctggggccagctcctctctgtcccctctgcaggctgagctgctcccgcctctcttggagcacctgctgctgcccccacagcctccccacccttcactgagttacgaacctgccttgctgcagccctacctgttccaccagtttggctcccgtgatggctccagggtctcagagggctccccagggatggtcagtgtcggccccctgcccaaggctgaagcccctgccctcttcagcagaactgcctccaagggcatatttggggaccaccctggccactcctacggggaccttccagggccttcacctgcccagctttttcaagactctgggctgctctatctggcccaggagttgccagcacccagcagggccagggtgccaaggctgccagagcaagggagcagcagccgggcagaggactccccagagggctatgagaaggaaggactaggggatcgtggagagaagcctgcttccccagctgtgcagccagatgcggctctgcagaggctggccgctgtgctggcgggctatggggtagagctgcgtcagctgacccctgagcagctctccacactcctgaccctgctgcagctactgcccaagggtgcaggaagaaatccgggaggggttgtaaatgttggagctgatatcaagaaaacaatggaggggccggtggagggcagagacacagcagagcttccagcccgcacatcccccatgcctggacaccccactgccagccctacctccagtgaagtccagcaggtgccaagccctgtctcctctgagcctcccaaagctgccagaccccctgtgacacctgtcctgctagagaagaaaagcccactgggccagagccagcccacggtggcaggacagccctcagcccgcccagcagcagaggaatatggctacatcgtcactgatcagaatgtggtgggaccagccctcaccttccgcatccggcacaatgagcagaacctgtctttggctgatgtgacccaacaagcagggctggtgaagtctgaactggaagcacagacagggctccaaatcttgcagacaggagtgggacagagggaggaggcagctgcagtccttccccaaactgcgcacagcacctcacccatgcgctcagtgctgctcactctggtggccctggcaggtgtggctgggctgctggtggctctggctgtggctctgtgtgtgcggcagcatgcgcggcagcaagacaaggagcgcctggcagccctggggcctgagggggcccatggtgacactacctttgagtaccaggacctgtgccgccagcacatggccacgaagtccttgttcaaccgggcagagggtccaccggagccttcacgggtgagcagtgtgtcctcccagttcagcgacgcagcccaggccagccccagctcccacagcagcaccccgtcctggtgcgaggagccggcccaagccaacatggacatctccacgggacacatgattctggcatacatggaggatcacctgcggaaccgggaccgccttgccaaggagtggcaggccctctgtgcctaccaagcagagccaaacacctgtgccaccgcgcagggggagggcaacatcaaaaagaaccggcatcctgacttcctgccctatgaccatgcccgcataaaactgaaggtggagagcagcccttctcggagcgattacatcaacgccagccccattattgagcatgaccctcggatgccagcctacatagccacgcagggcccgctgtcccataccatcgcagacttctggcagatggtgtgggagagcggctgcaccgtcatcgtcatgctgaccccgctggtggaggatggtgtcaagcagtgtgaccgctactggccagatgagggtgcctccctctaccacgtatatgaggtgaacctggtgtcggagcacatctggtgcgaggactttctggtgcggagcttctacctgaagaacgtgcagacccaggagacgcgcacgctcacgcagttccacttcctcagctggccggcagagggcacaccggcctccacgcggcccctgctggacttccgcaggaaggtgaacaagtgctaccggggccgctcctgccccatcatcgtgcactgcagtgatggtgcggggaggaccggcacctacatcctcatcgacatggtcctgaaccgcatggcaaaaggagtgaaggagattgacatcgctgccaccctggagcatgtccgtgaccagcggcctggccttgtccgctctaaggaccagtttgaatttgccctgacagccgtggcggaggaagtgaatgccatcctcaaggccctgccccagtgagaccctggggccccttggcgggcagcccagcctctgtccctctttgcctgtgtgagcatctctgtgtacccactcctcactgccccaccagccacctcttgggcatgctcagcccttcctagaagagtcaggaagggaaagccagaaggggcacgcctgcccagcctcgcatgccagagcctggggcatcccagagcccagggcatcccatgggggtgctgcagccaggaggagaggaaaggacatgggtagcaattctacccagagccttctcctgcctacattccctggcctggctctcctgtagctctcctggggttctgggagttccctgaacatctgtgtgtgtccccctatgctccagtatggaagaatggggtggagggtcgccacacccggctccccctgcttctcagccccgggcctgcctctgactcacacttgggcgctctgccctccctggcctcacgcccagcctcctcccaccaccctcccaccatgcgctgctcaacctctctccttctggcgcaagagaacatttctagaaaaaactacttttgtaccagtgtgaataaagttagtgtgttgtctgtgcagctgcaa

SEQ ID NO: 24718 - DNA, 1076 bp, Homo sapiens
  source 1..1076: mol_type = unassigned DNA
agcgcccggagctcggaaagatgcggcgcccgcggcggcctgggggtctcgggggatccgggggtctccggctgctcctctgcctcctgctgctgagcagccgcccggggggctgcagcgccgttagtgcccacggctgtctatttgaccgcaggctctgctctcacctggaagtctgtattcaggatggcttgtttgggcagtgccaggtgggagtggggcaggcccggccccttttgcaagtcacctccccagttctccaacgcttacaaggtgtgctccgacaactcatgtcccaaggattgtcctggcacgatgacctcacccagtatgtgatctctcaggagatggagcgcatccccaggcttcgccccccagagccccgtccaagggacaggtctggcttggcacccaagagacctggtcctgctggagagctgcttttacaggacatccccactggctccgcccctgctgcccagctcctctctgtcccctctgcaggctgagctgctcccgcctctcttggagcacctgctgctgcccccacagcctccccacccttcactgagttacgaacctgccttgctgcagccctacctgttccaccagtttggctcccgtgatggctccagggtctcagagggctccccagggatggtcagtgtcggccccctgcccaaggctgaagcccctgccctcttcagcagaactgcctccaagggcatatttggggaccaccctggccactcctacggggaccttccagggccttcacctgcccagctttttcaagactctgggctgctctatctggcccaggagttgccagcacccagcagggccagggtgccaaggctgccagagcaagggagcagcagccgggcagaggactccccagagggctatgagaaggaaggactaggggatcgtggagagaagcctgcttccccagctgtgcagccagatgcggctctgcagaggctggccgctgtgctggcgggctatggggtagagctgcgtcagctgacccctgagcagctctccacactcctgaccctgctgcagctactgcc

SEQ ID NO: 24719 - DNA, 3313 bp, Homo sapiens
  source 1..3313: mol_type = unassigned DNA
attgcaggttcgggagaaggacacggggtgcatgtgggcagagggacttagagaccggctgcgagaccacaggagaagccacttgctccgaggcgcctgggaggctgtctatttgaccgcaggctctgctctcacctggaagtctgtattcaggatggcttgtttgggcagtgccaggtgggagtggggcaggcccggccccttttgcaagtcacctccccagttctccaacgcttacaaggtgtgctccgacaactcatgtcccaaggattgtcctggcacgatgacctcacccagtatgtgatctctcaggagatggagcgcatccccaggcttcgccccccagagccccgtccaagggacaggtctggcttggcacccaagagacctggtcctgctggagagctgcttttacaggacatccccactggctccgcccctgctgcccagcatcggcttccacaaccaccagtgggcaaaggtggagctggggccagctcctctctgtcccctctgcaggctgagctgctcccgcctctcttggagcacctgctgctgcccccacagcctccccacccttcactgagttacgaacctgccttgctgcagccctacctgttccaccagtttggctcccgtgatggctccagggtctcagagggctccccagggatggtcagtgtcggccccctgcccaaggctgaagcccctgccctcttcagcagaactgcctccaagggcatatttggggaccaccctggccactcctacggggaccttccagggccttcacctgcccagctttttcaagactctgggctgctctatctggcccaggagttgccagcacccagcagggccagggtgccaaggctgccagagcaagggagcagcagccgggcagaggactccccagagggctatgagaaggaaggactaggggatcgtggagagaagcctgcttccccagctgtgcagccagatgcggctctgcagaggctggccgctgtgctggcgggctatggggtagagctgcgtcagctgacccctgagcagctctccacactcctgaccctgctgcagctactgcccaagggtgcaggaagaaatccgggaggggttgtaaatgttggagctgatatcaagaaaacaatggaggggccggtggagggcagagacacagcagagcttccagcccgcacatcccccatgcctggacaccccactgccagccctacctccagtgaagtccagcaggtgccaagccctgtctcctctgagcctcccaaagctgccagaccccctgtgacacctgtcctgctagagaagaaaagcccactgggccagagccagcccacggtggcaggacagccctcagcccgcccagcagcagaggaatatggctacatcgtcactgatcagaagcccctgagcctggctgcaggagtgaagctgctggagatcctggctgagcatgtgcacatgtcctcaggcagcttcatcaacatcagtgtggtgggaccagccctcaccttccgcatccggcacaatgagcagaacctgtctttggctgatgtgacccaacaagcagggctggtgaagtctgaactggaagcacagacagggctccaaatcttgcagacaggagtgggacagagggaggaggcagctgcagtccttccccaaactgcgcacagcacctcacccatgcgctcagtgctgctcactctggtggccctggcaggtgtggctgggctgctggtggctctggctgtggctctgtgtgtgcggcagcatgcgcggcagcaagacaaggagcgcctggcagccctggggcctgagggggcccatggtgacactacctttgagtaccaggacctgtgccgccagcacatggccacgaagtccttgttcaaccgggcagagggtccaccggagccttcacgggtgagcagtgtgtcctcccagttcagcgacgcagcccaggccagccccagctcccacagcagcaccccgtcctggtgcgaggagccggcccaagccaacatggacatctccacgggacacatgattctggcatacatggaggatcacctgcggaaccgggaccgccttgccaaggagtggcaggccctctgtgcctaccaagcagagccaaacacctgtgccaccgcgcagggggagggcaacatcaaaaagaaccggcatcctgacttcctgccctatgaccatgcccgcataaaactgaaggtggagagcagcccttctcggagcgattacatcaacgccagccccattattgagcatgaccctcggatgccagcctacatagccacgcagggcccgctgtcccataccatcgcagacttctggcagatggtgtgggagagcggctgcaccgtcatcgtcatgctgaccccgctggtggaggatggtgtcaagcagtgtgaccgctactggccagatgagggtgcctccctctaccacgtatatgaggtgaacctggtgtcggagcacatctggtgcgaggactttctggtgcggagcttctacctgaagaacgtgcagacccaggagacgcgcacgctcacgcagttccacttcctcagctggccggcagagggcacaccggcctccacgcggcccctgctggacttccgcaggaaggtgaacaagtgctaccggggccgctcctgccccatcatcgtgcactgcagtgatggtgcggggaggaccggcacctacatcctcatcgacatggtcctgaaccgcatggcaaaaggagtgaaggagattgacatcgctgccaccctggagcatgtccgtgaccagcggcctggccttgtccgctctaaggaccagtttgaatttgccctgacagccgtggcggaggaagtgaatgccatcctcaaggccctgccccagtgagaccctggggccccttggcgggcagcccagcctctgtccctctttgcctgtgtgagcatctctgtgtacccactcctcactgccccaccagccacctcttgggcatgctcagcccttcctagaagagtcaggaagggaaagccagaaggggcacgcctgcccagcctcgcatgccagagcctggggcatcccagagcccagggcatcccatgggggtgctgcagccaggaggagaggaaaggacatgggtagcaattctacccagagccttctcctgcctacattccctggcctggctctcctgtagctctcctggggttctgggagttccctgaacatctgtgtgtgtccccctatgctccagtatggaagaatggggtggagg

SEQ ID NO: 24720 - DNA, 3281 bp, Homo sapiens
  source 1..3281: mol_type = unassigned DNA
gtcgtcagcacccgcctgcggttggccgcgttgcagcgagaggggcatgtagaccccgcctcgtagggaggtggggagcggcaagccccgcctcagcccctctggcaggctcccgccagcgtcgctgcggctccggcccgggagcgagcgcccggagctcggaaagatgcggcgcccgcggcggcctgggggtctcgggggatccgggggtctccggctgctcctctgcctcctgctgctgagcagccgcccggggggctgcagcgccgttagtgcccacggctgtctatttgaccgcaggctctgctctcacctggaagtctgtattcaggatggcttgtttgggcagtgccaggtgggagtggggcaggcccggccccttttgcaagtcacctccccagttctccaacgcttacaaggtgtgctccgacaactcatgtcccaaggattgtcctggcacgatgacctcacccagtatgtgatctctcaggagatggagcgcatccccaggcttcgccccccagagccccgtccaagggacaggtctggcttggcacccaagagacctggtcctgctggagagctgcttttacaggacatccccactggctccgcccctgctgcccagcatcggcttccacaaccaccagtgggcaaaggtggagctggggccagctcctctctgtcccctctgcaggctgagctgctcccgcctctcttggagcacctgctgctgcccccacagcctccccacccttcactgagttacgaacctgccttgctgcagccctacctgttccaccagtttggctcccgtgatggctccagggtctcagagggctccccagggatggtcagtgtcggccccctgcccaaggctgaagcccctgccctcttcagcagaactgcctccaagggcatatttggggaccaccctggccactcctacggggaccttccagggccttcacctgcccagctttttcaagactctgggctgctctatctggcccaggagttgccagcacccagcagggccagggtgccaaggctgccagagcaagggagcagcagccgggcagaggactccccagagggctatgagaaggaaggactaggggatcgtggagagaagcctgcttccccagctgtgcagccagatgcggctctgcagaggctggccgctgtgctggcgggctatggggtagagctgcgtcagctgacccctgagcagctctccacactcctgaccctgctgcagctactgcccaagggtgcaggaagaaatccgggaggggttgtaaatgttggagctgatatcaagaaaacaatggaggggccggtggagggcagagacacagcagagcttccagcccgcacatcccccatgcctggacaccccactgccagccctacctccagtgaagtccagcaggtgccaagccctgtctcctctgagcctcccaaagctgccagaccccctgtgacacctgtcctgctagagaagaaaagcccactgggccagagccagcccacggtggcaggacagccctcagcccgcccagcagcagaggaatatggctacatcgtcactgatcagaatgtggtgggaccagccctcaccttccgcatccggcacaatgagcagaacctgtctttggctgatgtgacccaacaagcagggctggtgaagtctgaactggaagcacagacagggctccaaatcttgcagacaggagtgggacagagggaggaggcagctgcagtccttccccaaactgcgcacagcacctcacccatgcgctcagtgctgctcactctggtggccctggcaggtgtggctgggctgctggtggctctggctgtggctctgtgtgtgcggcagcatgcgcggcagcaagacaaggagcgcctggcagccctggggcctgagggggcccatggtgacactacctttgagtaccaggacctgtgccgccagcacatggccacgaagtccttgttcaaccgggcagagggtccaccggagccttcacgggtgagcagtgtgtcctcccagttcagcgacgcagcccaggccagccccagctcccacagcagcaccccgtcctggtgcgaggagccggcccaagccaacatggacatctccacgggacacatgattctggcatacatggaggatcacctgcggaaccgggaccgccttgccaaggagtggcaggccctctgtgcctaccaagcagagccaaacacctgtgccaccgcgcagggggagggcaacatcaaaaagaaccggcatcctgacttcctgccctatgaccatgcccgcataaaactgaaggtggagagcagcccttctcggagcgattacatcaacgccagccccattattgagcatgaccctcggatgccagcctacatagccacgcagggcccgctgtcccataccatcgcagacttctggcagatggtgtgggagagcggctgcaccgtcatcgtcatgctgaccccgctggtggaggatggtgtcaagcagtgtgaccgctactggccagatgagggtgcctccctctaccacgtatatgaggtgaacctggtgtcggagcacatctggtgcgaggactttctggtgcggagcttctacctgaagaacgtgcagacccaggagacgcgcacgctcacgcagttccacttcctcagctggccggcagagggcacaccggcctccacgcggcccctgctggacttccgcaggaaggtgaacaagtgctaccggggccgctcctgccccatcatcgtgcactgcagtgatggtgcggggaggaccggcacctacatcctcatcgacatggtcctgaaccgcatggcaaaaggagtgaaggagattgacatcgctgccaccctggagcatgtccgtgaccagcggcctggccttgtccgctctaaggaccagtttgaatttgccctgacagccgtggcggaggaagtgaatgccatcctcaaggccctgccccagtgagaccctggggccccttggcgggcagcccagcctctgtccctctttgcctgtgtgagcatctctgtgtacccactcctcactgccccaccagccacctcttgggcatgctcagcccttcctagaagagtcaggaagggaaagccagaaggggcacgcctggcctgcctctgactcacacttgggcgctctgccctccctggcctcacgcccagcctcctcccaccaccctcccaccatgcgctgctcaacctctctccttctg

SEQ ID NO: 24721 - DNA, 4723 bp, Homo sapiens
  source 1..4723: mol_type = unassigned DNA
ggcgggaggagccggcggcgcgcgcctccctgggcccggactcggccgcctcccgccgcctcccgcgcggccatggactgagcgccgccggccaggccgcggggatggggccgccgctcccgctgctgctgctgctactgctgctgctgccgccacgcgtcctgcctgccgccccttcgtccgtcccccgcggccggcagctcccggggcgtctgggctgcctgctcgaggagggcctctgcggagcgtccgaggcctgtgtgaacgatggagtgtttggaaggtgccagaaggttccggcaatggacttttaccgctacgaggtgtcgcccgtggccctgcagcgcctgcgcgtggcgttgcagaagctttccggcacaggtttcacgtggcaggatgactatactcagtatgtgatggaccaggaacttgcagacctcccgaaaacctacctgaggcgtcctgaagcatccagcccagccaggccctcaaaacacagcgttggcagcgagaggaggtacagtcgggagggcggtgctgccctggccaacgccctccgacgccacctgcccttcctggaggccctgtcccaggccccagcctcagacgtgctcgccaggacccatacggcgcaggacagaccccccgctgagggtgatgaccgcttctccgagagcatcctgacctatgtggcccacacgtctgcgctgacctaccctcccgggtcccggacccagctccgcgaggacctcctgccgcggaccctcggccagctccagccagatgagctcagccctaaggtggacagtggtgtggacagacaccatctgatggcggccctcagtgcctatgctgcccagaggcccccagctccccccggggagggcagcctggagccacagtaccttctgcgtgcaccctcaagaatgcccaggcctttgctggcaccagccgccccccagaagtggccttcacctctgggagattccgaagacccctccagcacaggcgatggagcacggattcataccctcctgaaggacctgcagaggcagccggctgaggtgaggggcctgagtggcctggagctggacggcatggctgagctgatggctggcctgatgcaaggcgtggaccatggagtagctcgaggcagccctgggagagcggccctgggagagtctggagaacaggcggatggccccaaggccaccctccgtggagacagctttccagatgacggagtgcaggacgacgatgatagactttaccaagaggtccatcgtctgagtgccacactcgggggcctcctgcaggaccacgggtctcgactcttacctggagccctcccctttgcaaggcccctcgacatggagaggaagaagtccgagcaccctgagtcttccctgtcttcagaagaggagactgccggagtggagaacgtcaagagccagacgtattccaaagatctgctggggcagcagccgcattcggagcccggggccgctgcgtttggggagctccaaaaccagatgcctgggccctcgaaggaggagcagagccttccagcgggtgctcaggaggccctcagcgacggcctgcaattggaggtccagccttccgaggaagaggcgcggggctacatcgtgacagacagagaggttctcggaccagcagtgaccttcaaagtgagcgccaatgtccaaaacgtgaccactgaggatgtggagaaggccacagttgacaacaaagacaaactggaggaaacctctggactgaaaattcttcaaaccggagtcgggtcgaaaagcaaactcaagttcctgcctcctcaggcggagcaagaagactccaccaagttcatcgcgctcaccctggtctccctcgcctgcatcctgggcgtcctcctggcctctggcctcatctactgcctccgccatagctctcagcacaggctgaaggagaagctctcgggactagggggcgacccaggtgcagatgccactgccgcctaccaggagctgtgccgccagcgtatggccacgcggccaccagaccgacctgagggcccgcacacgtcacgcatcagcagcgtctcatcccagttcagcgacgggccgatccccagcccctccgcacgcagcagcgcctcatcctggtccgaggagcctgtgcagtccaacatggacatctccaccggccacatgatcctgtcctacatggaggaccacctgaagaacaagaaccggctggagaaggagtgggaagcgctgtgcgcctaccaggcggagcccaacagctcgttcgtggcccagagggaggagaacgtgcccaagaaccgctccctggccgtgctgacctatgaccactcccgggtcctgctgaaggcggagaacagccacagccactcagactacatcaacgctagccccatcatggatcacgacccgaggaaccccgcgtacatcgccacccagggaccgctgcccgccaccgtggctgacttttggcagatggtgtgggagagcggctgcgtggtgatcgtcatgctgacacccctcgcggagaacggcgtccggcagtgctaccactactggccggatgaaggctccaatctctaccacatctatgaggtgaacctggtctccgagcacatctggtgtgaggacttcctggtgaggagcttctatctgaagaacctgcagaccaacgagacgcgcaccgtgacgcagttccacttcctgagttggtatgaccgaggagtcccttcctcctcaaggtccctcctggacttccgcagaaaagtaaacaagtgctacaggggccgttcttgtccaataattgttcattgcagtgacggtgcaggccggagcggcacctacgtcctgatcgacatggttctcaacaagatggccaaaggtgctaaagagattgatatcgcagcgaccctggagcacttgagggaccagagacccggcatggtccagacgaaggagcagtttgagttcgcgctgacagccgtggctgaggaggtgaacgccatcctcaaggcccttccccagtgagcggcagcctcaggggcctcaggggagcccccaccccacggatgttgtcaggaatcatgatctgactttaattgtgtgtcttctattataactgcatagtaatagggcccttagctctcccgtagtcagcgcagtttagcagttaaaagtgtatttttgtttaatcaaacaataataaagagagatttgtggaaaaatccagttacgggtggaggggaatcggttcatcaattttcacttgcttaaaaaaaatactttttcttaaagcacccgttcaccttcttggttgaagttgtgttaacaatgcagtagccagcacgttcgaggcggtttccaggaagagtgtgcttgtcatctgccactttcgggagggtggatccactgtgcaggagtggccggggaagctggcagcactcagtgaggccgcccggcacacaaggcacgtttggcatttctctttgagagagtttatcattgggagaagccgcagggacagaactgaacgtcctgcagcttcggggcaagtgagacaatcacagctcctcgctgcgtctccatcaacactgcgccgggtaccatggacggccccgtcagccacacctgtcagcccaagcagagtgattcaggggctccccgggggcagacacctgtgcaccccatgagtagtgcccacttgaggctggcactcccctgacctcacctttgcaaagttacagatgcaccccaacattgagatgtgtttttaatgttaaaatattgatttctacgttatgaaaacagatgcccccgtgaatgcttacctgtgagataaccacaaccaggaagaacaaatctgggcattgagcaagctatgagggtccccgggagcacacgaaccctgccaggcccccgctggctcctccaggcacgtcccggacctgtggggccccagagaggggacatttccctcctgggagagaaggagatcagggcaactcggagagggctgcgagcatttccctcccgggagaggagatcagggcgacctgcacgcactgcgtagagcctggaagggaagtgagaaaccagccgaccggccctgcccctcttcccgggatcacttaatgaaccacgtgttttgacatcatgtaaacctaagcacgtagagatgattcggatttgacaaaataacatttgagtatccgattcgccatcaccccctaccccagaaataggacaattcacttcattgaccaagatgatcacatggaaggcggcacagaggcagctgtgtgggctgcagatttcctgtgtggggttcagcgtagaaaacgcacctccatcccgcccttcccacagcattcctccatcttagatagatggtactctccaaaggccctaccagagggaacacggcctactgagcggacagaatgatgccaaaatattgcttatgtctctacatggtattgtaatgaatatctgctttaatatagctatcatttcttttccaaaattacttctctctatctggaatttaattaatcgaaatgaatttatctgaatataggaagcatatgcctacttgtaatttctaactccttatgtttgaagagaaacctccggtgtgagatatacaaatatatttaattgtgtcatattaaacttctgatttcaca

SEQ ID NO: 24722 - DNA, 4692 bp, Homo sapiens
  source 1..4692: mol_type = unassigned DNA
ccgcgcggccatggactgagcgccgccggccaggccgcggggatggggccgccgctcccgctgctgctgctgctactgctgctgctgccgccacgcgtcctgcctgccgccccttcgtccgtcccccgcggccggcagctcccggggcgtctggatggagtgtttggaaggtgccagaaggttccggcaatggacttttaccgctacgaggtgtcgcccgtggccctgcagcgcctgcgcgtggcgttgcagaagctttccggcacaggtttcacgtggcaggatgactatactcagtatgtgatggaccaggaacttgcagacctcccgaaaacctacctgaggcgtcctgaagcatccagcccagccaggccctcaaaacacagcgttggcagcgagaggaggtacagtcgggagggcggtgctgccctggccaacgccctccgacgccacctgcccttcctggaggccctgtcccaggccccagcctcagacgtgctcgccaggacccatacggcgcaggacagaccccccgctgagggtgatgaccgcttctccgagagcatcctgacctatgtggcccacacgtctgcgctgacctaccctcccgggtcccggacccagctccgcgaggacctcctgccgcggaccctcggccagctccagccagatgagctcagccctaaggtggacagtggtgtggacagacaccatctgatggcggccctcagtgcctatgctgcccagaggcccccagctccccccggggagggcagcctggagccacagtaccttctgcgtgcaccctcaagaatgcccaggcctttgctggcaccagccgccccccagaagtggccttcacctctgggagattccgaagacccctccagcacaggcgatggagcacggattcataccctcctgaaggacctgcagaggcagccggctgaggtgaggggcctgagtggcctggagctggacggcatggctgagctgatggctggcctgatgcaaggcgtggaccatggagtagctcgaggcagccctgggagagcggccctgggagagtctggagaacaggcggatggccccaaggccaccctccgtggagacagctttccagatgacggagtgcaggacgacgatgatagactttaccaagaggtccatcgtctgagtgccacactcgggggcctcctgcaggaccacgggtctcgactcttacctggagccctcccctttgcaaggcccctcgacatggagaggaagaagtccgagcaccctgagtcttccctgtcttcagaagaggagactgccggagtggagaacgtcaagagccagacgtattccaaagatctgctggggcagcagccgcattcggagcccggggccgctgcgtttggggagctccaaaaccagatgcctgggccctcgaaggaggagcagagccttccagcgggtgctcaggaggccctcagcgacggcctgcaattggaggtccagccttccgaggaagaggcgcggggctacatcgtgacagacagagaccccctgcgccccgaggaaggaaggcggctggtggaggacgtcgcccgcctcctgcaggtgcccagcagtgcgttcgctgacgtggaggttctcggaccagcagtgaccttcaaagtgagcgccaatgtccaaaacgtgaccactgaggatgtggagaaggccacagttgacaacaaagacaaactggaggaaacctctggactgaaaattcttcaaaccggagtcgggtcgaaaagcaaactcaagttcctgcctcctcaggcggagcaagaagactccaccaagttcatcgcgctcaccctggtctccctcgcctgcatcctgggcgtcctcctggcctctggcctcatctactgcctccgccatagctctcagcacaggctgaaggagaagctctcgggactagggggcgacccaggtgcagatgccactgccgcctaccaggagctgtgccgccagcgtatggccacgcggccaccagaccgacctgagggcccgcacacgtcacgcatcagcagcgtctcatcccagttcagcgacgggccgatccccagcccctccgcacgcagcagcgcctcatcctggtccgaggagcctgtgcagtccaacatggacatctccaccggccacatgatcctgtcctacatggaggaccacctgaagaacaagaaccggctggagaaggagtgggaagcgctgtgcgcctaccaggcggagcccaacagctcgttcgtggcccagagggaggagaacgtgcccaagaaccgctccctggccgtgctgacctatgaccactcccgggtcctgctgaaggcggagaacagccacagccactcagactacatcaacgctagccccatcatggatcacgacccgaggaaccccgcgtacatcgccacccagggaccgctgcccgccaccgtggctgacttttggcagatggtgtgggagagcggctgcgtggtgatcgtcatgctgacacccctcgcggagaacggcgtccggcagtgctaccactactggccggatgaaggctccaatctctaccacatctatgaggtgaacctggtctccgagcacatctggtgtgaggacttcctggtgaggagcttctatctgaagaacctgcagaccaacgagacgcgcaccgtgacgcagttccacttcctgagttggtatgaccgaggagtcccttcctcctcaaggtccctcctggacttccgcagaaaagtaaacaagtgctacaggggccgttcttgtccaataattgttcattgcagtgacggtgcaggccggagcggcacctacgtcctgatcgacatggttctcaacaagatggccaaaggtgctaaagagattgatatcgcagcgaccctggagcacttgagggaccagagacccggcatggtccagacgaaggagcagtttgagttcgcgctgacagccgtggctgaggaggtgaacgccatcctcaaggcccttccccagtgagcggcagcctcaggggcctcaggggagcccccaccccacggatgttgtcaggaatcatgatctgactttaattgtgtgtcttctattataactgcatagtaatagggcccttagctctcccgtagtcagcgcagtttagcagttaaaagtgtatttttgtttaatcaaacaataataaagagagatttgtggaaaaatccagttacgggtggaggggaatcggttcatcaattttcacttgcttaaaaaaaatactttttcttaaagcacccgttcaccttcttggttgaagttgtgttaacaatgcagtagccagcacgttcgaggcggtttccaggaagagtgtgcttgtcatctgccactttcgggagggtggatccactgtgcaggagtggccggggaagctggcagcactcagtgaggccgcccggcacacaaggcacgtttggcatttctctttgagagagtttatcattgggagaagccgcagggacagaactgaacgtcctgcagcttcggggcaagtgagacaatcacagctcctcgctgcgtctccatcaacactgcgccgggtaccatggacggccccgtcagccacacctgtcagcccaagcagagtgattcaggggctccccgggggcagacacctgtgcaccccatgagtagtgcccacttgaggctggcactcccctgacctcacctttgcaaagttacagatgcaccccaacattgagatgtgtttttaatgttaaaatattgatttctacgttatgaaaacagatgcccccgtgaatgcttacctgtgagataaccacaaccaggaagaacaaatctgggcattgagcaagctatgagggtccccgggagcacacgaaccctgccaggcccccgctggctcctccaggcacgtcccggacctgtggggccccagagaggggacatttccctcctgggagagaaggagatcagggcaactcggagagggctgcgagcatttccctcccgggagaggagatcagggcgacctgcacgcactgcgtagagcctggaagggaagtgagaaaccagccgaccggccctgcccctcttcccgggatcacttaatgaaccacgtgttttgacatcatgtaaacctaagcacgtagagatgattcggatttgacaaaataacatttgagtatccgattcgccatcaccccctaccccagaaataggacaattcacttcattgaccaagatgatcacatggaaggcggcacagaggcagctgtgtgggctgcagatttcctgtgtggggttcagcgtagaaaacgcacctccatcccgcccttcccacagcattcctccatcttagatagatggtactctccaaaggccctaccagagggaacacggcctactgagcggacagaatgatgccaaaatattgcttatgtctctacatggtattgtaatgaatatctgctttaatatagctatcatttcttttccaaaattacttctctctatctggaatttaattaatcgaaatgaatttatctgaatataggaagcatatgcctacttgtaatttctaactccttatgtttgaagagaaacctccggtgtgagatatacaaatatatttaattgtgtcatattaaacttctgatt

SEQ ID NO: 24723 - DNA, 4706 bp, Homo sapiens
  source 1..4706: mol_type = unassigned DNA
ggccgcggggatggggccgccgctcccgctgctgctgctgctactgctgctgctgccgccacgcgtcctgcctgccgccccttcgtccgtcccccgcggccggcagctcccggggcgtctgggctgcctgctcgaggagggcctctgcggagcgtccgaggcctgtgtgaacgatggagtgtttggaaggtgccagaaggttccggcaatggacttttaccgctacgaggtgtcgcccgtggccctgcagcgcctgcgcgtggcgttgcagaagctttccggcacaggtttcacgtggcaggatgactatactcagtatgtgatggaccaggaacttgcagacctcccgaaaacctacctgaggcgtcctgaagcatccagcccagccaggccctcaaaacacagcgttggcagcgagaggaggtacagtcgggagggcggtgctgccctggccaacgccctccgacgccacctgcccttcctggaggccctgtcccaggccccagcctcagacgtgctcgccaggacccatacggcgcaggacagaccccccgctgagggtgatgaccgcttctccgagagcatcctgacctatgtggcccacacgtctgcgctgacctaccctcccgggtcccggacccagctccgcgaggacctcctgccgcggaccctcggccagctccagccagatgagctcagccctaaggtggacagtggtgtggacagacaccatctgatggcggccctcagtgcctatgctgcccagaggcccccagctccccccggggagggcagcctggagccacagtaccttctgcgtgcaccctcaagaatgcccaggcctttgctggcaccagccgccccccagaagtggccttcacctctgggagattccgaagacccctccagcacaggcgatggagcacggattcataccctcctgaaggacctgcagaggcagccggctgaggtgaggggcctgagtggcctggagctggacggcatggctgagctgatggctggcctgatgcaaggcgtggaccatggagtagctcgaggcagccctgggagagcggccctgggagagtctggagaacaggcggatggccccaaggccaccctccgtggagacagctttccagatgacggagtgcaggacgacgatgatagactttaccaagaggtccatcgtctgagtgccacactcgggggcctcctgcaggaccacgggtctcgactcttacctggagccctcccctttgcaaggcccctcgacatggagaggaagaagtccgagcaccctgagtcttccctgtcttcagaagaggagactgccggagtggagaacgtcaagagccagacgtattccaaagatctgctggggcagcagccgcattcggagcccggggccgctgcgtttggggagctccaaaaccagatgcctgggccctcgaaggaggagcagagccttccagcgggtgctcaggaggccctcagcgacggcctgcaattggaggtccagccttccgaggaagaggcgcggggctacatcgtgacagacagagaccccctgcgccccgaggaaggaaggcggctggtggaggacgtcgcccgcctcctgcaggtgcccagcagtgcgttcgctgacgtggaggttctcggaccagcagtgaccttcaaagtgagcgccaatgtccaaaacgtgaccactgaggatgtggagaaggccacagttgacaacaaagacaaactggaggaaacctctggactgaaaattcttcaaaccggagtcgggtcgaaaagcaaactcaagttcctgcctcctcaggcggagcaagaagactccaccaagttcatcgcgctcaccctggtctccctcgcctgcatcctgggcgtcctcctggcctctggcctcatctactgcctccgccatagctctcagcacaggctgaaggagaagctctcgggactagggggcgacccaggtgcagatgccactgccgcctaccaggagctgtgccgccagcgtatggccacgcggccaccagaccgacctgagggcccgcacacgtcacgcatcagcagcgtctcatcccagttcagcgacgggccgatccccagcccctccgcacgcagcagcgcctcatcctggtccgaggagcctgtgcagtccaacatggacatctccaccggccacatgatcctgtcctacatggaggaccacctgaagaacaagaaccggctggagaaggagtgggaagcgctgtgcgcctaccaggcggagcccaacagctcgttcgtggcccagagggaggagaacgtgcccaagaaccgctccctggccgtgctgacctatgaccactcccgggtcctgctgaaggcggagaacagccacagccactcagactacatcaacgctagccccatcatggatcacgacccgaggaaccccgcgtacatcgccacccagggaccgctgcccgccaccgtggctgacttttggcagatggtgtgggagagcggctgcgtggtgatcgtcatgctgacacccctcgcggagaacggcgtccggcagtgctaccactactggccggatgaaggctccaatctctaccacatctatgaggtgaacctggtctccgagcacatctggtgtgaggacttcctggtgaggagcttctatctgaagaacctgcagaccaacgagacgcgcaccgtgacgcagttccacttcctgagttggtatgaccgaggagtcccttcctcctcaaggtccctcctggacttccgcagaaaagtaaacaagtgctacaggggccgttcttgtccaataattgttcattgcagtgacggtgcaggccggagcggcacctacgtcctgatcgacatggttctcaacaagatggccaaaggtgctaaagagattgatatcgcagcgaccctggagcacttgagggaccagagacccggcatggtccagacgaaggagcagtttgagttcgcgctgacagccgtggctgaggaggtgaacgccatcctcaaggcccttccccagtgagcggcagcctcaggggcctcaggggagcccccaccccacggatgttgtcaggaatcatgatctgactttaattgtgtgtcttctattataactgcatagtaatagggcccttagctctcccgtagtcagcgcagtttagcagttaaaagtgtatttttgtttaatcaaacaataataaagagagatttgtggaaaaatccagttacgggtggaggggaatcggttcatcaattttcacttgcttaaaaaaaatactttttcttaaagcacccgttcaccttcttggttgaagttgtgttaacaatgcagtagccagcacgttcgaggcggtttccaggaagagtgtgcttgtcatctgccactttcgggagggtggatccactgtgcaggagtggccggggaagctggcagcactcagtgaggccgcccggcacacaaggcacgtttggcatttctctttgagagagtttatcattgggagaagccgcagggacagaactgaacgtcctgcagcttcggggcaagtgagacaatcacagctcctcgctgcgtctccatcaacactgcgccgggtaccatggacggccccgtcagccacacctgtcagcccaagcagagtgattcaggggctccccgggggcagacacctgtgcaccccatgagtagtgcccacttgaggctggcactcccctgacctcacctttgcaaagttacagatgcaccccaacattgagatgtgtttttaatgttaaaatattgatttctacgttatgaaaacagatgcccccgtgaatgcttacctgtgagataaccacaaccaggaagaacaaatctgggcattgagcaagctatgagggtccccgggagcacacgaaccctgccaggcccccgctggctcctccaggcacgtcccggacctgtggggccccagagaggggacatttccctcctgggagagaaggagatcagggcaactcggagagggctgcgagcatttccctcccgggagaggagatcagggcgacctgcacgcactgcgtagagcctggaagggaagtgagaaaccagccgaccggccctgcccctcttcccgggatcacttaatgaaccacgtgttttgacatcatgtaaacctaagcacgtagagatgattcggatttgacaaaataacatttgagtatccgattcgccatcaccccctaccccagaaataggacaattcacttcattgaccaagatgatcacatggaaggcggcacagaggcagctgtgtgggctgcagatttcctgtgtggggttcagcgtagaaaacgcacctccatcccgcccttcccacagcattcctccatcttagatagatggtactctccaaaggccctaccagagggaacacggcctactgagcggacagaatgatgccaaaatattgcttatgtctctacatggtattgtaatgaatatctgctttaatatagctatcatttcttttccaaaattacttctctctatctggaatttaattaatcgaaatgaatttatctgaatataggaagcatatgcctacttgtaatttctaactccttatgtttgaagagaaacctccggtgtgagatatacaaatatatttaattgtgtcatattaaacttc

SEQ ID NO: 24724 - DNA, 3117 bp, Homo sapiens
  source 1..3117: mol_type = unassigned DNA
atggctgtggaatctgaatattcactgctgagaaccgaagccagctttcctactatgaagatgttctgtgtgagccacaccttgcccagggtggaagtgatgtttgtttcaggtccacagacgagggagaggacggagccagtggaccctcggtggcagtgtctggtgcagatgtgggcaggctgcctgctcgaggagggcctctgcggagcgtccgaggcctgtgtgaacgatggagtgtttggaaggtgccagaaggttccggcaatggacttttaccgctacgaggtgtcgcccgtggccctgcagcgcctgcgcgtggcgttgcagaagctttccggcacaggtttcacgtggcaggatgactatactcagtatgtgatggaccaggaacttgcagacctcccgaaaacctacctgaggcgtcctgaagcatccagcccagccaggccctcaaaacacagcgttggcagcgagaggaggtacagtcgggagggcggtgctgccctggccaacgccctccgacgccacctgcccttcctggaggccctgtcccaggccccagcctcagacgtgctcgccaggacccatacggcgcaggacagaccccccgctgagggtgatgaccgcttctccgagagcatcctgacctatgtggcccacacgtctgcgctgacctaccctcccgggtcccggacccagctccgcgaggacctcctgccgcggaccctcggccagctccagccagatgagctcagccctaaggtggacagtggtgtggacagacaccatctgatggcggccctcagtgcctatgctgcccagaggcccccagctccccccggggagggcagcctggagccacagtaccttctgcgtgcaccctcaagaatgcccaggcctttgctggcaccagccgccccccagaagtggccttcacctctgggagattccgaagacccctccagcacaggcgatggagcacggattcataccctcctgaaggacctgcagaggcagccggctgaggtgaggggcctgagtggcctggagctggacggcatggctgagctgatggctggcctgatgcaaggcgtggaccatggagtagctcgaggcagccctgggagagcggccctgggagagtctggagaacaggcggatggccccaaggccaccctccgtggagacagctttccagatgacggagtgcaggacgacgatgatagactttaccaagaggtccatcgtctgagtgccacactcgggggcctcctgcaggaccacgggtctcgactcttacctggagccctcccctttgcaaggcccctcgacatggagaggaagaagtccgagcaccctgagtcttccctgtcttcagaagaggagactgccggagtggagaacgtcaagagccagacgtattccaaagatctgctggggcagcagccgcattcggagcccggggccgctgcgtttggggagctccaaaaccagatgcctgggccctcgaaggaggagcagagccttccagcgggtgctcaggaggccctcagcgacggcctgcaattggaggtccagccttccgaggaagaggcgcggggctacatcgtgacagacagagaccccctgcgccccgaggaaggaaggcggctggtggaggacgtcgcccgcctcctgcaggtgcccagcagtgcgttcgctgacgtggaggttctcggaccagcagtgaccttcaaagtgagcgccaatgtccaaaacgtgaccactgaggatgtggagaaggccacagttgacaacaaagacaaactggaggaaacctctggactgaaaattcttcaaaccggagtcgggtcgaaaagcaaactcaagttcctgcctcctcaggcggagcaagaagactccaccaagttcatcgcgctcaccctggtctccctcgcctgcatcctgggcgtcctcctggcctctggcctcatctactgcctccgccatagctctcagcacaggctgaaggagaagctctcgggactagggggcgacccaggtgcagatgccactgccgcctaccaggagctgtgccgccagcgtatggccacgcggccaccagaccgacctgagggcccgcacacgtcacgcatcagcagcgtctcatcccagttcagcgacgggccgatccccagcccctccgcacgcagcagcgcctcatcctggtccgaggagcctgtgcagtccaacatggacatctccaccggccacatgatcctgtcctacatggaggaccacctgaagaacaagaaccggctggagaaggagtgggaagcgctgtgcgcctaccaggcggagcccaacagctcgttcgtggcccagagggaggagaacgtgcccaagaaccgctccctggccgtgctgacctatgaccactcccgggtcctgctgaaggcggagaacagccacagccactcagactacatcaacgctagccccatcatggatcacgacccgaggaaccccgcgtacatcgccacccagggaccgctgcccgccaccgtggctgacttttggcagatggtgtgggagagcggctgcgtggtgatcgtcatgctgacacccctcgcggagaacggcgtccggcagtgctaccactactggccggatgaaggctccaatctctaccacatctatgaggtgaacctggtctccgagcacatctggtgtgaggacttcctggtgaggagcttctatctgaagaacctgcagaccaacgagacgcgcaccgtgacgcagttccacttcctgagttggtatgaccgaggagtcccttcctcctcaaggtccctcctggacttccgcagaaaagtaaacaagtgctacaggggccgttcttgtccaataattgttcattgcagtgacggtgcaggccggagcggcacctacgtcctgatcgacatggttctcaacaagatggccaaaggtgctaaagagattgatatcgcagcgaccctggagcacttgagggaccagagacccggcatggtccagacgaaggagcagtttgagttcgcgctgacagccgtggctgaggaggtgaacgccatcctcaaggcccttccccagtga

SEQ ID NO: 24725 - DNA, 4711 bp, Homo sapiens
  source 1..4711: mol_type = unassigned DNA
gagcgcgagaggcgcggcgggaggagccggcggcgcgcgcctccctgggcccggactcggccgcctcccgccgcctcccgcgcggccatggactgagcgccgccggccaggccgcggggatggggccgccgctcccgctgctgctgctgctactgctgctgctgccgccacgcgtcctgcctgccgccccttcgtccgtcccccgcggccggcagctcccggggcgtctgggctgcctgctcgaggagggcctctgcggagcgtccgaggcctgtgtgaacggtttcacgtggcaggatgactatactcagtatgtgatggaccaggaacttgcagacctcccgaaaacctacctgaggcgtcctgaagcatccagcccagccaggccctcaaaacacagcgttggcagcgagaggaggtacagtcgggagggcggtgctgccctggccaacgccctccgacgccacctgcccttcctggaggccctgtcccaggccccagcctcagacgtgctcgccaggacccatacggcgcaggacagaccccccgctgagggtgatgaccgcttctccgagagcatcctgacctatgtggcccacacgtctgcgctgacctaccctcccgggtcccggacccagctccgcgaggacctcctgccgcggaccctcggccagctccagccagatgagctcagccctaaggtggacagtggtgtggacagacaccatctgatggcggccctcagtgcctatgctgcccagaggcccccagctccccccggggagggcagcctggagccacagtaccttctgcgtgcaccctcaagaatgcccaggcctttgctggcaccagccgccccccagaagtggccttcacctctgggagattccgaagacccctccagcacaggcgatggagcacggattcataccctcctgaaggacctgcagaggcagccggctgaggtgaggggcctgagtggcctggagctggacggcatggctgagctgatggctggcctgatgcaaggcgtggaccatggagtagctcgaggcagccctgggagagcggccctgggagagtctggagaacaggcggatggccccaaggccaccctccgtggagacagctttccagatgacggagtgcaggacgacgatgatagactttaccaagaggtccatcgtctgagtgccacactcgggggcctcctgcaggaccacgggtctcgactcttacctggagccctcccctttgcaaggcccctcgacatggagaggaagaagtccgagcaccctgagtcttccctgtcttcagaagaggagactgccggagtggagaacgtcaagagccagacgtattccaaagatctgctggggcagcagccgcattcggagcccggggccgctgcgtttggggagctccaaaaccagatgcctgggccctcgaaggaggagcagagccttccagcgggtgctcaggaggccctcagcgacggcctgcaattggaggtccagccttccgaggaagaggcgcggggctacatcgtgacagacagagaccccctgcgccccgaggaaggaaggcggctggtggaggacgtcgcccgcctcctgcaggtgcccagcagtgcgttcgctgacgtggaggttctcggaccagcagtgaccttcaaagtgagcgccaatgtccaaaacgtgaccactgaggatgtggagaaggccacagttgacaacaaagacaaactggaggaaacctctggactgaaaattcttcaaaccggagtcgggtcgaaaagcaaactcaagttcctgcctcctcaggcggagcaagaagactccaccaagttcatcgcgctcaccctggtctccctcgcctgcatcctgggcgtcctcctggcctctggcctcatctactgcctccgccatagctctcagcacaggctgaaggagaagctctcgggactagggggcgacccaggtgcagatgccactgccgcctaccaggagctgtgccgccagcgtatggccacgcggccaccagaccgacctgagggcccgcacacgtcacgcatcagcagcgtctcatcccagttcagcgacgggccgatccccagcccctccgcacgcagcagcgcctcatcctggtccgaggagcctgtgcagtccaacatggacatctccaccggccacatgatcctgtcctacatggaggaccacctgaagaacaagaaccggctggagaaggagtgggaagcgctgtgcgcctaccaggcggagcccaacagctcgttcgtggcccagagggaggagaacgtgcccaagaaccgctccctggccgtgctgacctatgaccactcccgggtcctgctgaaggcggagaacagccacagccactcagactacatcaacgctagccccatcatggatcacgacccgaggaaccccgcgtacatcgccacccagggaccgctgcccgccaccgtggctgacttttggcagatggtgtgggagagcggctgcgtggtgatcgtcatgctgacacccctcgcggagaacggcgtccggcagtgctaccactactggccggatgaaggctccaatctctaccacatctatgaggtgaacctggtctccgagcacatctggtgtgaggacttcctggtgaggagcttctatctgaagaacctgcagaccaacgagacgcgcaccgtgacgcagttccacttcctgagttggtatgaccgaggagtcccttcctcctcaaggtccctcctggacttccgcagaaaagtaaacaagtgctacaggggccgttcttgtccaataattgttcattgcagtgacggtgcaggccggagcggcacctacgtcctgatcgacatggttctcaacaagatggccaaaggtgctaaagagattgatatcgcagcgaccctggagcacttgagggaccagagacccggcatggtccagacgaaggagcagtttgagttcgcgctgacagccgtggctgaggaggtgaacgccatcctcaaggcccttccccagtgagcggcagcctcaggggcctcaggggagcccccaccccacggatgttgtcaggaatcatgatctgactttaattgtgtgtcttctattataactgcatagtaatagggcccttagctctcccgtagtcagcgcagtttagcagttaaaagtgtatttttgtttaatcaaacaataataaagagagatttgtggaaaaatccagttacgggtggaggggaatcggttcatcaattttcacttgcttaaaaaaaatactttttcttaaagcacccgttcaccttcttggttgaagttgtgttaacaatgcagtagccagcacgttcgaggcggtttccaggaagagtgtgcttgtcatctgccactttcgggagggtggatccactgtgcaggagtggccggggaagctggcagcactcagtgaggccgcccggcacacaaggcacgtttggcatttctctttgagagagtttatcattgggagaagccgcagggacagaactgaacgtcctgcagcttcggggcaagtgagacaatcacagctcctcgctgcgtctccatcaacactgcgccgggtaccatggacggccccgtcagccacacctgtcagcccaagcagagtgattcaggggctccccgggggcagacacctgtgcaccccatgagtagtgcccacttgaggctggcactcccctgacctcacctttgcaaagttacagatgcaccccaacattgagatgtgtttttaatgttaaaatattgatttctacgttatgaaaacagatgcccccgtgaatgcttacctgtgagataaccacaaccaggaagaacaaatctgggcattgagcaagctatgagggtccccgggagcacacgaaccctgccaggcccccgctggctcctccaggcacgtcccggacctgtggggccccagagaggggacatttccctcctgggagagaaggagatcagggcaactcggagagggctgcgagcatttccctcccgggagaggagatcagggcgacctgcacgcactgcgtagagcctggaagggaagtgagaaaccagccgaccggccctgcccctcttcccgggatcacttaatgaaccacgtgttttgacatcatgtaaacctaagcacgtagagatgattcggatttgacaaaataacatttgagtatccgattcgccatcaccccctaccccagaaataggacaattcacttcattgaccaagatgatcacatggaaggcggcacagaggcagctgtgtgggctgcagatttcctgtgtggggttcagcgtagaaaacgcacctccatcccgcccttcccacagcattcctccatcttagatagatggtactctccaaaggccctaccagagggaacacggcctactgagcggacagaatgatgccaaaatattgcttatgtctctacatggtattgtaatgaatatctgctttaatatagctatcatttcttttccaaaattacttctctctatctggaatttaattaatcgaaatgaatttatctgaatataggaagcatatgcctacttgtaatttctaactccttatgtttgaagagaaacctccggtgtgagatatacaaatatatttaattgtgtcatattaaacttctgatttcaca

SEQ ID NO: 24726 - DNA, 5301 bp, Homo sapiens
  source 1..5301: mol_type = unassigned DNA
cgcggggtccccgcctctcgctcaccacacagaccccgcgcctcctctggcagccgcggtggtggcggcggcagagcctcgcccactccaatccccaccctctccatccttagtcattaaagaacagcagcgcctggcacgttcttggaggaccccgggcgcagaggaggaaagggagcaggcgcagggggactggaaaggcagcatgcgctcgccaggagcaacctcggcgcccagggtctgaggctgcagccccagttcgccattgtgagccgccgccgggggagtccgctagcgcagccgtgcccccgagtccccgtccgcgcagcgatggggcacctgcccacggggatacacggcgcccgccgcctcctgcctctgctctggctctttgtgctgttcaagaatgctacagctttccatgtaactgtccaagatgataataacatcgttgtctcattagaagcttcagacgtcatcagtccagcatctgtgtatgttgtgaagataactggtgaatccaaaaattatttcttcgaatttgaggaattcaacagcactttgcctcctcctgttattttcaaggccagttatcatggcctttattatataatcactctggtagtggtaaatggaaatgtggtgaccaagccatccagatcaatcactgtgttaacaaaacctctacctgtaaccagtgtttccatatatgactataaaccttctcctgaaacaggagtcctgtttgaaatacattatccagaaaaatataacgttttcacaagagtgaacattagctactgggaaggtaaagacttccggacaatgctatataaagatttctttaagggaaaaacagtatttaatcactggctgccaggaatgtgttatagtaatatcacctttcagctggtatctgaggcaacttttaataaaagtacccttgttgagtacagtggtgtcagtcacgaacccaaacagcacagaactgccccttatccacctcaaaatatttccgttcgtatcgtaaacttgaacaaaaacaactgggaagaacagagtggcaatttcccagaagaatccttcatgagatcacaagatacaataggaaaagaaaaactcttccattttacagaagaaacccctgaaattccctcgggcaacatttcttccggttggcctgattttaatagcagtgactatgaaactacgtctcagccatattggtgggacagtgcatctgcagctcctgaaagtgaagatgaatttgtcagcgtacttcccatggaatacgaaaataacagtacactcagtgagacagagaagtcaacatcaggctctttctcctttttccctgtgcaaatgatattgacctggttaccacccaaaccacccactgcttttgatgggttccatatccatattgaacgagaagagaactttactgaatatttgatggtggatgaagaagcacatgaatttgttgcagaactgaaggaacctgggaaatataagttatctgtgacaacctttagttcctcaggatcttgtgaaactcgaaaaagtcagtcagcaaaatcactcagcttttatatcagtccttcaggagagtggattgaagaactgaccgagaagccgcagcacgtgagtgtccacgttttaagctcaaccactgccttgatgtcctggacatcttcccaagagaactacaacagcaccattgtgtctgtggtgtcgctgacctgccagaaacaaaaggagagccagaggcttgaaaagcagtactgcactcaggtgaactcaagcaaacctattattgaaaatctggttcctggtgcccagtaccaggttgtaatatacctaaggaaaggccctttgattggaccaccttcagatcctgtgacatttgctattgttcccacaggaataaaggatttaatgctctatcctttgggtcctacggccgtggttctgagctggaccagaccttatttaggcgtgttcagaaaatacgtggttgaaatgttttatttcaaccctgctacaatgacatcagagtggaccacctactatgaaatagcagcaactgtttccttaactgcatccgtgagaatagctaatctgctgccagcatggtactacaacttccgggttaccatggtgacgtggggagatccagaattgagctgctgtgacagctctaccatcagcttcataacagccccagtggctccggaaatcacttctgtggaatatttcaacagtctgttatatatcagttggacatatggggatgatacaacggacttgtcccattctagaatgcttcactggatggtggttgcagaaggaaaaaagaaaattaaaaagagtgtaacacgcaatgtcatgactgcaattctcagcttgcctccaggcgacatctataacctctcagtaactgcttgtactgaaagaggaagtaatacctccatgctccgccttgtcaagctagaaccagctccacccaaatcactcttcgcagtgaacaaaacccagacttcagtgactttgctgtgggtggaagagggagtagctgatttctttgaagttttctgtcaacaagttggctccagtcagaaaaccaaacttcaggaaccagttgctgtttcttcccatgtcgtgaccatctccagccttcttcctgccactgcctacaattgtagtgtcaccagctttagccatgacagccccagtgtccctacgttcatagccgtctcaacaatggttacagagatgaatcccaatgtggtagtgatctccgtgctggccatccttagcacacttttaattggactgttgcttgttaccctcattattcttaggaaaaagcatctgcagatggctagggagtgtggagctggtacatttgtcaattttgcatccttagagagggatggaaagcttccatacaactggcgtaggagtatatttgctttcttaaccctgctaccctcatgtctttggactgattatcttttggcattttatattaatccttggagtaaaaatggtttaaagaagaggaaactgacaaacccggttcaactggatgactttgatgcctatattaaggatatggccaaagactctgactataaattttctcttcagtttgaggagttgaaattgattggactggatatcccacactttgctgcagatcttccactgaatcgatgtaaaaaccgttacacaaacatcctaccatatgacttcagccgtgtgagattagtctccatgaatgaagaggaaggtgcagactacatcaatgccaactatattcctggatacaactcaccccaggagtatattgccacccaggggccactgcctgaaaccagaaatgacttctggaagatggtcctgcaacaaaagtctcagattattgtcatgctcactcagtgtaatgagaaaaggagggtgaaatgtgaccattactggccattcacggaagaacctatagcctatggagacatcactgtggagatgatttcagaggaagagcaggacgactgggcctgtagacacttccggatcaactatgctgacgagatgcaggatgtgatgcattttaactacactgcatggcctgatcatggtgtgcccacagcaaatgctgcagaaagtatcctgcagtttgtacacatggtccgacagcaagctaccaagagcaaaggtcccatgatcattcactgcagtgctggcgtgggacggacaggaacattcattgccctggacaggctcttgcagcacattcgggatcatgagtttgttgacatcttagggctggtgtcagaaatgaggtcataccggatgtctatggtacagacagaggagcagtacatttttatccatcagtgtgtgcaactgatgtggatgaagaagaagcagcagttctgcatcagtgatgtcatatacgagaatgttagcaagtcctagttcagaatccggagcagagaggacatgatgtgcgcccatcctcccttgcttccagattgttttagtgggccctgatggtcatttttctaaacagaggccctgctttgtaatatgtggccaaggagataatttatctcacagaagcaccgggaagacttagccttaaagagcctacagtgtccttttggactctttcacttcgggacatttaataatggaccaaattcaacagaacaccaggaaggtcaagacgctctccaaagggcaggaagtacagcacttccgaagagtttagttggccctttgctggttgggctgagttttttatttttaagtgtttgtttttcagtgcaataatttttgtgtgtgtgtgattcttatcagaaagttgaattgttttctgcctacaccgttcatcagccccataacccaggaaggaacaggcattgttagcatcagattatacctcattattaaaaggaggcatggccacacatgaagaaatggtcattctacttcaaagaaattgagccagcactatctgtactccaacattaccggatctggattggggaggttggtcagggaagagaggggttctacccacagatcaactgtgtaatcttttactattcaagctataattcagcttcaaagtagagtagaaaaaaaattgtcttaactgttctagttcttgatggttttcttccttattaacagttggtgtttcttccttggcccttttggactaatgttactgtccaagttctttctcaagaaaccacatctggttcagaagagtgtcaagttggactctttgaactctgttgctgtctgagcaatcgtggtgcctagactttgcattccttgttctgttgacctgcatacatgtgagagctatttctttaagaactatataggctgtgaaaacgcactttctttcccccaaagagctgggaatttatgaagttatggcaatgaactgcagcatgctgggacaattatttgactacttttttttgtaatattgtcaaatgtctctatggattctgacagagatttctttttgttttgttattcttttggttgtcagtttcattttaacgagtgtaactagtaacattttattctttggattttgtataattacagtacatgattgtgtattgtgacatgaatgctgtcaaaatgacattgatggcattgtgaagcctgttactttgtgtcacttcctgataaataagaggtgatgacatggatatacaacagaaaacactttgagttgaaagtaaacacaagctggctgcttccctgtggcaa

SEQ ID NO: 24727 - DNA, 5061 bp, Homo sapiens
  source 1..5061: mol_type = unassigned DNA
gggcgcagaggaggaaagggagcaggcgcagggggactggaaaggcagcatgcgctcgccaggagcaacctcggcgcccagggtctgaggctgcagccccagttcgccattgtgagccgccgccgggggagtccgctagcgcagccgtgcccccgagtccccgtccgcgcagcgatggggcacctgcccacggggatacacggcgcccgccgcctcctgcctctgctctggctctttgtgctgttcaagaatgctacagctttccatgtaactgtccaagatgataataacatcgttgtctcattagaagcttcagacgtcatcagtccagcatctgtgtatgttgtgaagataactggtgaatccaaaaattatttcttcgaatttgaggaattcaacagcactttgcctcctcctgttattttcaaggccagttatcatggcctttattatataatcactctggtagtggtaaatggaaatgtggtgaccaagccatccagatcaatcactgtgttaacaaaacctctacctgtaaccagtgtttccatatatgactataaaccttctcctgaaacaggagtcctgtttgaaatacattatccagaaaaatataacgttttcacaagagtgaacattagctactgggaaggtaaagacttccggacaatgctatataaagatttctttaagggaaaaacagtatttaatcactggctgccaggaatgtgttatagtaatatcacctttcagctggtatctgaggcaacttttaataaaagtacccttgttgagtacagtggtgtcagtcacgaacccaaacagcacagaactgccccttatccacctcaaaatatttccgttcgtatcgtaaacttgaacaaaaacaactgggaagaacagagtggcaatttcccagaagaatccttcatgagatcacaagatacaataggaaaagaaaaactcttccattttacagaagaaacccctgaaattccctcgggcaacatttcttccggttggcctgattttaatagcagtgactatgaaactacgtctcagccatattggtgggacagtgcatctgcagctcctgaaagtgaagatgaatttgtcagcgtacttcccatggaatacgaaaataacagtacactcagtgagacagagaagtcaacatcaggctctttctcctttttccctgtgcaaatgatattgacctggttaccacccaaaccacccactgcttttgatgggttccatatccatattgaacgagaagagaactttactgaatatttgatggtggatgaagaagcacatgaatttgttgcagaactgaaggaacctgggaaatataagttatctgtgacaacctttagttcctcaggatcttgtgaaactcgaaaaagtcagtcagcaaaatcactcagcttttatatcagtccttcaggagagtggattgaagaactgaccgagaagccgcagcacgtgagtgtccacgttttaagctcaaccactgccttgatgtcctggacatcttcccaagagaactacaacagcaccattgtgtctgtggtgtcgctgacctgccagaaacaaaaggagagccagaggcttgaaaagcagtactgcactcaggtgaactcaagcaaacctattattgaaaatctggttcctggtgcccagtaccaggttgtaatatacctaaggaaaggccctttgattggaccaccttcagatcctgtgacatttgctattgttcccacaggaataaaggatttaatgctctatcctttgggtcctacggccgtggttctgagctggaccagaccttatttaggcgtgttcagaaaatacgtggttgaaatgttttatttcaaccctgctacaatgacatcagagtggaccacctactatgaaatagcagcaactgtttccttaactgcatccgtgagaatagctaatctgctgccagcatggtactacaacttccgggttaccatggtgacgtggggagatccagaattgagctgctgtgacagctctaccatcagcttcataacagccccagtggctccggaaatcacttctgtggaatatttcaacagtctgttatatatcagttggacatatggggatgatacaacggacttgtcccattctagaatgcttcactggatggtggttgcagaaggaaaaaagaaaattaaaaagagtgtaacacgcaatgtcatgactgcaattctcagcttgcctccaggcgacatctataacctctcagtaactgcttgtactgaaagaggaagtaatacctccatgctccgccttgtcaagctagaaccagctccacccaaatcactcttcgcagtgaacaaaacccagacttcagtgactttgctgtgggtggaagagggagtagctgatttctttgaagttttctgtcaacaagttggctccagtcagaaaaccaaacttcaggaaccagttgctgtttcttcccatgtcgtgaccatctccagccttcttcctgccactgcctacaattgtagtgtcaccagctttagccatgacagccccagtgtccctacgttcatagccgtctcaacaatggttacagagatgaatcccaatgtggtagtgatctccgtgctggccatccttagcacacttttaattggactgttgcttgttaccctcattattcttaggaaaaagcatctgcagatggctagggagtgtggagctggtacatttgtcaattttgcatccttagagagggatggaaagcttccatacaactggagtaaaaatggtttaaagaagaggaaactgacaaacccggttcaactggatgactttgatgcctatattaaggatatggccaaagactctgactataaattttctcttcagtttgaggagttgaaattgattggactggatatcccacactttgctgcagatcttccactgaatcgatgtaaaaaccgttacacaaacatcctaccatatgacttcagccgtgtgagattagtctccatgaatgaagaggaaggtgcagactacatcaatgccaactatattcctggatacaactcaccccaggagtatattgccacccaggggccactgcctgaaaccagaaatgacttctggaagatggtcctgcaacaaaagtctcagattattgtcatgctcactcagtgtaatgagaaaaggagggtgaaatgtgaccattactggccattcacggaagaacctatagcctatggagacatcactgtggagatgatttcagaggaagagcaggacgactgggcctgtagacacttccggatcaactatgctgacgagatgcaggatgtgatgcattttaactacactgcatggcctgatcatggtgtgcccacagcaaatgctgcagaaagtatcctgcagtttgtacacatggtccgacagcaagctaccaagagcaaaggtcccatgatcattcactgcagtgctggcgtgggacggacaggaacattcattgccctggacaggctcttgcagcacattcgggatcatgagtttgttgacatcttagggctggtgtcagaaatgaggtcataccggatgtctatggtacagacagaggagcagtacatttttatccatcagtgtgtgcaactgatgtggatgaagaagaagcagcagttctgcatcagtgatgtcatatacgagaatgttagcaagtcctagttcagaatccggagcagagaggacatgatgtgcgcccatcctcccttgcttccagattgttttagtgggccctgatggtcatttttctaaacagaggccctgctttgtaatatgtggccaaggagataatttatctcacagaagcaccgggaagacttagccttaaagagcctacagtgtccttttggactctttcacttcgggacatttaataatggaccaaattcaacagaacaccaggaaggtcaagacgctctccaaagggcaggaagtacagcacttccgaagagtttagttggccctttgctggttgggctgagttttttatttttaagtgtttgtttttcagtgcaataatttttgtgtgtgtgtgattcttatcagaaagttgaattgttttctgcctacaccgttcatcagccccataacccaggaaggaacaggcattgttagcatcagattatacctcattattaaaaggaggcatggccacacatgaagaaatggtcattctacttcaaagaaattgagccagcactatctgtactccaacattaccggatctggattggggaggttggtcagggaagagaggggttctacccacagatcaactgtgtaatcttttactattcaagctataattcagcttcaaagtagagtagaaaaaaaattgtcttaactgttctagttcttgatggttttcttccttattaacagttggtgtttcttccttggcccttttggactaatgttactgtccaagttctttctcaagaaaccacatctggttcagaagagtgtcaagttggactctttgaactctgttgctgtctgagcaatcgtggtgcctagactttgcattccttgttctgttgacctgcatacatgtgagagctatttctttaagaactatataggctgtgaaaacgcactttctttcccccaaagagctgggaatttatgaagttatggcaatgaactgcagcatgctgggacaattatttgactacttttttttgtaatattgtcaaatgtctctatggattctgacagagatttctttttgttttgttattcttttggttgtcagtttcattttaacgagtgtaactagtaacattttattctttggattttgtataattacagtacatgattgtgtattgtgacatgaatgctgtcaaaatgacattgatggcattgtgaagcctgttactttgtgtcacttcctgataaataagaggtgatgacatggatatacaacagaaaacactttgagttgaaagtaaacacaagctggctgcttccctgtggcaa

SEQ ID NO: 24728 - DNA, 3030 bp, Homo sapiens
  source 1..3030: mol_type = unassigned DNA
aagtaaaaaaatggaagggggaaaaggcaaagtattctgccttccaagttagatagctatctttatgaaaggacatatttcaaaggcaatataaagtctttatggtgctcttacctacctatatttgaattgggggatgcttcacctgcttattagtgaaagaagaaagaatacacttagtaaattaaattttttttaaaactttgtctttgctcagaaccagctccacccaaatcactcttcgcagtgaacaaaacccagacttcagtgactttgctgtgggtggaagagggagtagctgatttctttgaagttttctgtcaacaagttggctccagtcagaaaaccaaacttcaggaaccagttgctgtttcttcccatgtcgtgaccatctccagccttcttcctgccactgcctacaattgtagtgtcaccagctttagccatgacagccccagtgtccctacgttcatagccgtctcaacaatggttacagagatgaatcccaatgtggtagtgatctccgtgctggccatccttagcacacttttaattggactgttgcttgttaccctcattattcttaggaaaaagcatctgcagatggctagggagtgtggagctggtacatttgtcaattttgcatccttagagagggatggaaagcttccatacaactggcgtaggagtatatttgctttcttaaccctgctaccctcatgtctttggactgattatcttttggcattttatattaatccttggagtaaaaatggtttaaagaagaggaaactgacaaacccggttcaactggatgactttgatgcctatattaaggatatggccaaagactctgactataaattttctcttcagtttgaggagttgaaattgattggactggatatcccacactttgctgcagatcttccactgaatcgatgtaaaaaccgttacacaaacatcctaccatatgacttcagccgtgtgagattagtctccatgaatgaagaggaaggtgcagactacatcaatgccaactatattcctggatacaactcaccccaggagtatattgccacccaggggccactgcctgaaaccagaaatgacttctggaagatggtcctgcaacaaaagtctcagattattgtcatgctcactcagtgtaatgagaaaaggagggtgaaatgtgaccattactggccattcacggaagaacctatagcctatggagacatcactgtggagatgatttcagaggaagagcaggacgactgggcctgtagacacttccggatcaactatgctgacgagatgcaggatgtgatgcattttaactacactgcatggcctgatcatggtgtgcccacagcaaatgctgcagaaagtatcctgcagtttgtacacatggtccgacagcaagctaccaagagcaaaggtcccatgatcattcactgcagtgctggcgtgggacggacaggaacattcattgccctggacaggctcttgcagcacattcgggatcatgagtttgttgacatcttagggctggtgtcagaaatgaggtcataccggatgtctatggtacagacagaggagcagtacatttttatccatcagtgtgtgcaactgatgtggatgaagaagaagcagcagttctgcatcagtgatgtcatatacgagaatgttagcaagtcctagttcagaatccggagcagagaggacatgatgtgcgcccatcctcccttgcttccagattgttttagtgggccctgatggtcatttttctaaacagaggccctgctttgtaatatgtggccaaggagataatttatctcacagaagcaccgggaagacttagccttaaagagcctacagtgtccttttggactctttcacttcgggacatttaataatggaccaaattcaacagaacaccaggaaggtcaagacgctctccaaagggcaggaagtacagcacttccgaagagtttagttggccctttgctggttgggctgagttttttatttttaagtgtttgtttttcagtgcaataatttttgtgtgtgtgtgattcttatcagaaagttgaattgttttctgcctacaccgttcatcagccccataacccaggaaggaacaggcattgttagcatcagattatacctcattattaaaaggaggcatggccacacatgaagaaatggtcattctacttcaaagaaattgagccagcactatctgtactccaacattaccggatctggattggggaggttggtcagggaagagaggggttctacccacagatcaactgtgtaatcttttactattcaagctataattcagcttcaaagtagagtagaaaaaaaattgtcttaactgttctagttcttgatggttttcttccttattaacagttggtgtttcttccttggcccttttggactaatgttactgtccaagttctttctcaagaaaccacatctggttcagaagagtgtcaagttggactctttgaactctgttgctgtctgagcaatcgtggtgcctagactttgcattccttgttctgttgacctgcatacatgtgagagctatttctttaagaactatataggctgtgaaaacgcactttctttcccccaaagagctgggaatttatgaagttatggcaatgaactgcagcatgctgggacaattatttgactacttttttttgtaatattgtcaaatgtctctatggattctgacagagatttctttttgttttgttattcttttggttgtcagtttcattttaacgagtgtaactagtaacattttattctttggattttgtataattacagtacatgattgtgtattgtgacatgaatgctgtcaaaatgacattgatggcattgtgaagcctgttactttgtgtcacttcctgataaataagaggtgatgacatggatatacaacagaaaacactttgagttgaaagtaaacacaagctggctgcttccctgtggcaactgtgg

SEQ ID NO: 24729 - DNA, 4062 bp, Homo sapiens
  source 1..4062: mol_type = unassigned DNA
aagtaaaaaaatggaagggggaaaaggcaaagtattctgccttccaagttagatagctatctttatgaaaggacatatttcaaaggcaatataaagtctttatggtgctcttacctacctatatttgaattgggggatgcttcacctgcttattagtgaaagaagaaagaatacacttagtaaattaaattttttttaaaactttgtctttgctcagaaccagctccacccaaatcactcttcgcagtgaacaaaacccagacttcagtgactttgctgtgggtggaagagggagtagctgatttctttgaagttttctgtcaacaagttggctccagtcagaaaaccaaacttcaggaaccagttgctgtttcttcccatgtcgtgaccatctccagccttcttcctgccactgcctacaattgtagtgtcaccagctttagccatgacagccccagtgtccctacgttcatagccgtctcaacaatggttacagagatgaatcccaatgtggtagtgatctccgtgctggccatccttagcacacttttaattggactgttgcttgttaccctcattattcttaggaaaaagcatctgcagatggctagggagtgtggagctggtacatttgtcaattttgcatccttagagagggatggaaagcttccatacaactggcgtaggagtatatttgctttcttaaccctgctaccctcatgtctttggactgattatcttttggcattttatattaatccttggagtaaaaatggtttaaagaagaggaaactgacaaacccggttcaactggatgactttgatgcctatattaaggatatggccaaagactctgactataaattttctcttcagtttgaggagttgaaattgattggactggatatcccacactttgctgcagatcttccactgaatcgatgtaaaaaccgttacacaaacatcctaccatatgacttcagccgtgtgagattagtctccatgaatgaagaggaaggtgcagactacatcaatgccaactatattcctggatacaactcaccccaggagtatattgccacccaggggccactgcctgaaaccagaaatgacttctggaagatggtcctgcaacaaaagtctcagattattgtcatgctcactcagtgtaatgagaaaaggagggtgaaatgtgaccattactggccattcacggaagaacctatagcctatggagacatcactgtggagatgatttcagaggaagagcaggacgactgggcctgtagacacttccggatcaactatgctgacgagatgcaggatgtgatgcattttaactacactgcatggcctgatcatggtgtgcccacagcaaatgctgcagaaagtatcctgcagtttgtacacatggtccgacagcaagctaccaagagcaaaggtcccatgatcattcactgcagtgctggcgtgggacggacaggaacattcattgccctggacaggctcttgcagcacattcgggatcatgagtttgttgacatcttagggctggtgtcagaaatgaggtcataccggatgtctatggtacagacagaggagcagtacatttttatccatcagtgtgtgcaactgatgtggatgaagaagaagcagcagttctgcatcagtgatgtcatatacgagaatgttagcaagtcctagttcagaatccggagcagtaagtggagaagagctctccacgagtgctcagtcttagaactattagagggggatgtgatggatgggacaaaagacagcagtagccatttgtattgactctgacttcacatgagtatttcttcccagctcctggcctcacatgggtggtcacagggagaaacaagtactgtagcagatctttgagtttcaatgcaccttggttggtgttggcaacaaacaggagcttctgcacatcatgatgactttacctccattccctctacccagaaccctaaattattctgttattggatctgtgcctgtaatatcaggatactaccatccaaatctatctagatatcttgtgcaaatattttattgattacaagggctgtatacggggttacaaaaagacatgagctggattggacactcctaaaaccaaaaacaacagtgacaatagagtctcaggatagcagagtctgaaaataccttggtctcccccattatgtgagcccttacttgagagcttcatgaagacacttgtaacatattcaacgtcctgtactccagttttgactacgagatcagattttggaggtgtaagtaaacttggctgaggtaacagtaatctgcccatttagttcagtaaacagactgtagagtgtctgactatactgggggaagaggagccaatgacagggtagggagatgacagtggtgcatgatgggagaatcatgaaagtctgggaagcatatggaccagtgggaaggataggattagcactgcacctctacatccatcaagagagacagagcgcacaatggagcaggaaggataaaaaataaagaaagacagagagaaacaaatttgctgggagagggaaagacattcagacccacagaaaggaggcagcacacagagaaagatgcacagatcaacccacatctgcatgggttgtgagactgagcatagtgagagcagtggtggagcaatagaagattgctgtgacaccaggctgcttactgtctttctttgtctcattcacaggagaggacatgatgtgcgcccatcctcccttgcttccagattgttttagtgggccctgatggtcatttttctaaacagaggccctgctttgtaatatgtggccaaggagataatttatctcacagaagcaccgggaagacttagccttaaagagcctacagtgtccttttggactctttcacttcgggacatttaataatggaccaaattcaacagaacaccaggaaggtcaagacgctctccaaagggcaggaagtacagcacttccgaagagtttagttggccctttgctggttgggctgagttttttatttttaagtgtttgtttttcagtgcaataatttttgtgtgtgtgtgattcttatcagaaagttgaattgttttctgcctacaccgttcatcagccccataacccaggaaggaacaggcattgttagcatcagattatacctcattattaaaaggaggcatggccacacatgaagaaatggtcattctacttcaaagaaattgagccagcactatctgtactccaacattaccggatctggattggggaggttggtcagggaagagaggggttctacccacagatcaactgtgtaatcttttactattcaagctataattcagcttcaaagtagagtagaaaaaaaattgtcttaactgttctagttcttgatggttttcttccttattaacagttggtgtttcttccttggcccttttggactaatgttactgtccaagttctttctcaagaaaccacatctggttcagaagagtgtcaagttggactctttgaactctgttgctgtctgagcaatcgtggtgcctagactttgcattccttgttctgttgacctgcatacatgtgagagctatttctttaagaactatataggctgtgaaaacgcactttctttcccccaaagagctgggaatttatgaagttatggcaatgaactgcagcatgctgggacaattatttgactacttttttttgtaatattgtcaaatgtctctatggattctgacagagatttctttttgttttgttattcttttggttgtcagtttcattttaacgagtgtaactagtaacattttattctttggattttgtataattacagtacatgattgtgtattgtgacatgaatgctgtcaaaatgacattgatggcattgtgaagcctgttactttgtgtcacttcctgataaataagaggtgatgacatggatatacaacagaaaacactttgagttgaaagtaaacacaagctggctgcttccctgtggcaactgtgg

SEQ ID NO: 24730 - DNA, 2946 bp, Homo sapiens
  source 1..2946: mol_type = unassigned DNA
aagtaaaaaaatggaagggggaaaaggcaaagtattctgccttccaagttagatagctatctttatgaaaggacatatttcaaaggcaatataaagtctttatggtgctcttacctacctatatttgaattgggggatgcttcacctgcttattagtgaaagaagaaagaatacacttagtaaattaaattttttttaaaactttgtctttgctcagaaccagctccacccaaatcactcttcgcagtgaacaaaacccagacttcagtgactttgctgtgggtggaagagggagtagctgatttctttgaagttttctgtcaacaagttggctccagtcagaaaaccaaacttcaggaaccagttgctgtttcttcccatgtcgtgaccatctccagccttcttcctgccactgcctacaattgtagtgtcaccagctttagccatgacagccccagtgtccctacgttcatagccgtctcaacaatggttacagagatgaatcccaatgtggtagtgatctccgtgctggccatccttagcacacttttaattggactgttgcttgttaccctcattattcttaggaaaaagcatctgcagatggctagggagtgtggagctggtacatttgtcaattttgcatccttagagagggatggaaagcttccatacaactggagtaaaaatggtttaaagaagaggaaactgacaaacccggttcaactggatgactttgatgcctatattaaggatatggccaaagactctgactataaattttctcttcagtttgaggagttgaaattgattggactggatatcccacactttgctgcagatcttccactgaatcgatgtaaaaaccgttacacaaacatcctaccatatgacttcagccgtgtgagattagtctccatgaatgaagaggaaggtgcagactacatcaatgccaactatattcctggatacaactcaccccaggagtatattgccacccaggggccactgcctgaaaccagaaatgacttctggaagatggtcctgcaacaaaagtctcagattattgtcatgctcactcagtgtaatgagaaaaggagggtgaaatgtgaccattactggccattcacggaagaacctatagcctatggagacatcactgtggagatgatttcagaggaagagcaggacgactgggcctgtagacacttccggatcaactatgctgacgagatgcaggatgtgatgcattttaactacactgcatggcctgatcatggtgtgcccacagcaaatgctgcagaaagtatcctgcagtttgtacacatggtccgacagcaagctaccaagagcaaaggtcccatgatcattcactgcagtgctggcgtgggacggacaggaacattcattgccctggacaggctcttgcagcacattcgggatcatgagtttgttgacatcttagggctggtgtcagaaatgaggtcataccggatgtctatggtacagacagaggagcagtacatttttatccatcagtgtgtgcaactgatgtggatgaagaagaagcagcagttctgcatcagtgatgtcatatacgagaatgttagcaagtcctagttcagaatccggagcagagaggacatgatgtgcgcccatcctcccttgcttccagattgttttagtgggccctgatggtcatttttctaaacagaggccctgctttgtaatatgtggccaaggagataatttatctcacagaagcaccgggaagacttagccttaaagagcctacagtgtccttttggactctttcacttcgggacatttaataatggaccaaattcaacagaacaccaggaaggtcaagacgctctccaaagggcaggaagtacagcacttccgaagagtttagttggccctttgctggttgggctgagttttttatttttaagtgtttgtttttcagtgcaataatttttgtgtgtgtgtgattcttatcagaaagttgaattgttttctgcctacaccgttcatcagccccataacccaggaaggaacaggcattgttagcatcagattatacctcattattaaaaggaggcatggccacacatgaagaaatggtcattctacttcaaagaaattgagccagcactatctgtactccaacattaccggatctggattggggaggttggtcagggaagagaggggttctacccacagatcaactgtgtaatcttttactattcaagctataattcagcttcaaagtagagtagaaaaaaaattgtcttaactgttctagttcttgatggttttcttccttattaacagttggtgtttcttccttggcccttttggactaatgttactgtccaagttctttctcaagaaaccacatctggttcagaagagtgtcaagttggactctttgaactctgttgctgtctgagcaatcgtggtgcctagactttgcattccttgttctgttgacctgcatacatgtgagagctatttctttaagaactatataggctgtgaaaacgcactttctttcccccaaagagctgggaatttatgaagttatggcaatgaactgcagcatgctgggacaattatttgactacttttttttgtaatattgtcaaatgtctctatggattctgacagagatttctttttgttttgttattcttttggttgtcagtttcattttaacgagtgtaactagtaacattttattctttggattttgtataattacagtacatgattgtgtattgtgacatgaatgctgtcaaaatgacattgatggcattgtgaagcctgttactttgtgtcacttcctgataaataagaggtgatgacatggatatacaacagaaaacactttgagttgaaagtaaacacaagctggctgcttccctgtggcaactgtgg

SEQ ID NO: 24731 - DNA, 3978 bp, Homo sapiens
  source 1..3978: mol_type = unassigned DNA
aagtaaaaaaatggaagggggaaaaggcaaagtattctgccttccaagttagatagctatctttatgaaaggacatatttcaaaggcaatataaagtctttatggtgctcttacctacctatatttgaattgggggatgcttcacctgcttattagtgaaagaagaaagaatacacttagtaaattaaattttttttaaaactttgtctttgctcagaaccagctccacccaaatcactcttcgcagtgaacaaaacccagacttcagtgactttgctgtgggtggaagagggagtagctgatttctttgaagttttctgtcaacaagttggctccagtcagaaaaccaaacttcaggaaccagttgctgtttcttcccatgtcgtgaccatctccagccttcttcctgccactgcctacaattgtagtgtcaccagctttagccatgacagccccagtgtccctacgttcatagccgtctcaacaatggttacagagatgaatcccaatgtggtagtgatctccgtgctggccatccttagcacacttttaattggactgttgcttgttaccctcattattcttaggaaaaagcatctgcagatggctagggagtgtggagctggtacatttgtcaattttgcatccttagagagggatggaaagcttccatacaactggagtaaaaatggtttaaagaagaggaaactgacaaacccggttcaactggatgactttgatgcctatattaaggatatggccaaagactctgactataaattttctcttcagtttgaggagttgaaattgattggactggatatcccacactttgctgcagatcttccactgaatcgatgtaaaaaccgttacacaaacatcctaccatatgacttcagccgtgtgagattagtctccatgaatgaagaggaaggtgcagactacatcaatgccaactatattcctggatacaactcaccccaggagtatattgccacccaggggccactgcctgaaaccagaaatgacttctggaagatggtcctgcaacaaaagtctcagattattgtcatgctcactcagtgtaatgagaaaaggagggtgaaatgtgaccattactggccattcacggaagaacctatagcctatggagacatcactgtggagatgatttcagaggaagagcaggacgactgggcctgtagacacttccggatcaactatgctgacgagatgcaggatgtgatgcattttaactacactgcatggcctgatcatggtgtgcccacagcaaatgctgcagaaagtatcctgcagtttgtacacatggtccgacagcaagctaccaagagcaaaggtcccatgatcattcactgcagtgctggcgtgggacggacaggaacattcattgccctggacaggctcttgcagcacattcgggatcatgagtttgttgacatcttagggctggtgtcagaaatgaggtcataccggatgtctatggtacagacagaggagcagtacatttttatccatcagtgtgtgcaactgatgtggatgaagaagaagcagcagttctgcatcagtgatgtcatatacgagaatgttagcaagtcctagttcagaatccggagcagtaagtggagaagagctctccacgagtgctcagtcttagaactattagagggggatgtgatggatgggacaaaagacagcagtagccatttgtattgactctgacttcacatgagtatttcttcccagctcctggcctcacatgggtggtcacagggagaaacaagtactgtagcagatctttgagtttcaatgcaccttggttggtgttggcaacaaacaggagcttctgcacatcatgatgactttacctccattccctctacccagaaccctaaattattctgttattggatctgtgcctgtaatatcaggatactaccatccaaatctatctagatatcttgtgcaaatattttattgattacaagggctgtatacggggttacaaaaagacatgagctggattggacactcctaaaaccaaaaacaacagtgacaatagagtctcaggatagcagagtctgaaaataccttggtctcccccattatgtgagcccttacttgagagcttcatgaagacacttgtaacatattcaacgtcctgtactccagttttgactacgagatcagattttggaggtgtaagtaaacttggctgaggtaacagtaatctgcccatttagttcagtaaacagactgtagagtgtctgactatactgggggaagaggagccaatgacagggtagggagatgacagtggtgcatgatgggagaatcatgaaagtctgggaagcatatggaccagtgggaaggataggattagcactgcacctctacatccatcaagagagacagagcgcacaatggagcaggaaggataaaaaataaagaaagacagagagaaacaaatttgctgggagagggaaagacattcagacccacagaaaggaggcagcacacagagaaagatgcacagatcaacccacatctgcatgggttgtgagactgagcatagtgagagcagtggtggagcaatagaagattgctgtgacaccaggctgcttactgtctttctttgtctcattcacaggagaggacatgatgtgcgcccatcctcccttgcttccagattgttttagtgggccctgatggtcatttttctaaacagaggccctgctttgtaatatgtggccaaggagataatttatctcacagaagcaccgggaagacttagccttaaagagcctacagtgtccttttggactctttcacttcgggacatttaataatggaccaaattcaacagaacaccaggaaggtcaagacgctctccaaagggcaggaagtacagcacttccgaagagtttagttggccctttgctggttgggctgagttttttatttttaagtgtttgtttttcagtgcaataatttttgtgtgtgtgtgattcttatcagaaagttgaattgttttctgcctacaccgttcatcagccccataacccaggaaggaacaggcattgttagcatcagattatacctcattattaaaaggaggcatggccacacatgaagaaatggtcattctacttcaaagaaattgagccagcactatctgtactccaacattaccggatctggattggggaggttggtcagggaagagaggggttctacccacagatcaactgtgtaatcttttactattcaagctataattcagcttcaaagtagagtagaaaaaaaattgtcttaactgttctagttcttgatggttttcttccttattaacagttggtgtttcttccttggcccttttggactaatgttactgtccaagttctttctcaagaaaccacatctggttcagaagagtgtcaagttggactctttgaactctgttgctgtctgagcaatcgtggtgcctagactttgcattccttgttctgttgacctgcatacatgtgagagctatttctttaagaactatataggctgtgaaaacgcactttctttcccccaaagagctgggaatttatgaagttatggcaatgaactgcagcatgctgggacaattatttgactacttttttttgtaatattgtcaaatgtctctatggattctgacagagatttctttttgttttgttattcttttggttgtcagtttcattttaacgagtgtaactagtaacattttattctttggattttgtataattacagtacatgattgtgtattgtgacatgaatgctgtcaaaatgacattgatggcattgtgaagcctgttactttgtgtcacttcctgataaataagaggtgatgacatggatatacaacagaaaacactttgagttgaaagtaaacacaagctggctgcttccctgtggcaactgtgg

SEQ ID NO: 24732 - DNA, 6888 bp, Homo sapiens
  source 1..6888: mol_type = unassigned DNA
atggattttcttatcatttttcttttactttttattgggacttcagagacacaggttgatgtttccaatgtcgttcctggtactaggtacgatataaccatctcttcaatttctacaacatacacctcacctgttactagaatagtgacaacaaatgtaacaaaaccagggcctccagtcttcctagccggggaaagagtcggatctgctgggattcttctgtcttggaatacaccacctaatccaaatggaaggattatatcttacattgtcaaatataaggaagtttgtccgtggatgcaaacagtatatacacaagtcagatcaaagccagacagtctggaagttcttcttactaatcttaatcctggaacaacatatgaaattaaggtaattattttaaatgcaacaaaagtaggatgtctactctcaccaatcctattgaacacagtactggaaggcctagccagagcgatcaatctcactagggagtgccagacagtggatgcaggtcagtgcgtgcagtgcgccgtgagagagccgaagcagggctccacctctgggggcagggcacagacaaacaaaaagacagcagtaacctctgcagacttaaatcacacagctggagatctgagaacgggcagactgcctcctcaacccctgaccgccgagcagcctaactgggaggcaccccccagtagaggcagactgacacctcacaaggccgggtactcctctgccaccgctgctggtacccaggctaacagggtctggagtagacctctagcaaaaatacaaactaccatcagagaatactacaaacacctctatgcaaaaaaagagggaatcctccctaactcattttatgaggccagcatcatcctgataccaaagccggtgcctgaaggaccaccacaaaactgcgtaacaggcaacatcacaggaaagtccttttcaattttatgggacccaccaactatagtaacagggaaatttagttatagagttgaattatatggaccatcaggtcgcattttggataacagcacaaaagacctcaagtttgcattcactaacctaacaccatttacaatgtatgatgtctatattgcggctgaaaccagtgcagggactgggcccaagtcaaatatttcagtattcactccaccagatgttccaggggcagtgtttgatttacaacttgcagaggtagaatccacgcaagtaagaattacttggaagaaaccacgacaaccaaatggaattattaaccaataccgagtgaaagtgctagttccagagacaggaataattttggaaaatactttgctcactggaaataatgagtatataaatgaccccatggctccagaaattgtgaacatagtagagccaatggtaggattatatgagggttcagcagagatgtcgtctgaccttcactcacttgctacatttatatataacagccatccagataaaaactttcctgcaaggaatagagctgaagaccagacttcaccagttgtaactacaaggaatcagtatattactgacattgcagctgaacagctgtcttatgttatcaggagacttgtacctttcactgagcacatgattagtgtatctgctttcaccatcatgggagaaggaccaccaacagttctcagtgttaggacacgtcagcaagtgccaagctccattaaaattataaactataaaaatattagttcttcatctattttgttatattgggatcctccagaatatcccaatggaaaaataactcactatacgatttatgcaatggaattggatacaaacagagcattccagataactaccatagataacagctttctcataacagggttaaagaaatacacaaaatacaaaatgagagtggcagcctcaacccacgttggagaaagttctttgtctgaagaaaatgacatctttgtgagaacttcagaagatgaaccggaatcatcacctcaagatgtcgaagtaattgatgttaccgcagatgaaataaggttgaagtggtcaccacccgaaaagcccaatgggatcattattgcttatgaagtgctatataaaaatatagatactttatatatgaagaacacatcaacaacagacataatattaaggaacttaagacctcacaccctctataacatttctgtaaggtcttacaccagatttggtcatggcaatcaggtatcttctttactctctgtaaggacttcggagactgtgcctgatagtgcaccagaaaatatcacttacaaaaatatttcttctggagagattgagctatcattccttcccccaagtagtcccaatggaatcatacaaaaatatacaatttatctcaagagaagtaatggaaatgaggaaagaactataaatacaacctctttaacccaaaacattaaagtactgaagaaatatacccaatatatcattgaggtgtctgctagtacactcaaaggtgaaggagttcggagtgctcccataagtatactgacggaggaagatgctcctgattctccccctcaagacttctctgtaaaacagttgtctggtgtcacggtgaagttgtcatggcaaccacccctggagccaaatggaattatcctttattacacagtttatgtctggaatagatcatcattaaaaactattaatgtcactgaaacatcattggagttatcagatttggattataatgttgaatacagtgcttatgtaacagctagcaccagatttggtgatgggaaaacaagaagcaatatcattagctttcaaacaccagagggagcaccaagcgatcctcccaaagatgtttattatgcaaacctcagttcttcatcaataattcttttctggacacctccttcaaaacctaatgggattatacaatattactctgtttattacagaaatacttcaggtacttttatgcagaattttacactccatgaagtaaccaatgactttgacaatatgactgtatccacaattatagataaactgacaatattcagctactatacattttggttaacagcaagtacttcagttggaaatgggaataaaagcagtgacatcattgaagtatacacagatcaagacatacctgaagggtttgttggaaacctgacttacgaatccatttcgtcaactgcaataaatgtaagctgggtcccaccggctcaaccaaacggtctagtcttctactatgtttcactgatcttacagcagactcctcgccatgtgagaccacctcttgttacatatgagagaagcatatattttgataatctggaaaaatacactgattatatattaaaaattactccatcaacagaaaagggattctctgatacctatactgcccagctatacatcaagactgaagaagatgtcccagaaacttcaccaataatcaacacttttaaaaacctttcctctacctcagttctcttatcatgggatcccccagtaaagccaaatggtgcaataataagttatgatttaactttacaaggaccaaatgaaaattattctttcattacttctgataattacataatattggaagagctttcaccatttacattatatagcttttttgctgccgcaagaactagaaaaggacttggtccttccagtattcttttcttttacacagatgagtcagtgccgttagcacctccacaaaatttgactttaatcaactgtacttcagactttgtatggctgaaatggagcccaagtcctcttccaggtggtattgttaaagtatatagttttaaaattcatgaacatgaaactgacactatatattataagaatatatcaggatttaaaactgaagccaaacttgttggactggaaccagtcagcacctactctatccgtgtatctgcgttcaccaaagttggaaatggcaatcaatttagtaatgtagtaaaattcacaacccaagaatcagttccagatgtcgtgcagaatatgcagtgcatggcaactagctggcagtcagttttagtgaaatgggatccacccaaaaaggcaaatggaataataacgcagtatatggtaacagttgaaaggaattctacaaaagtttctccccaagatcacatgtacactttcataaagcttcttgccaatacctcatatgtctttaaagtaagagcttcaacctcagctggtgaaggtgatgaaagcacatgccatgtcagcacactacctgaaacagttcccagtgttcccacaaatattgctttttctgatgttcagtcaactagtgcaacattgacatggataagacctgacactatccttggctactttcaaaattacaaaattaccactcaacttcgtgctcaaaaatgcaaagaatgggaatccgaagaatgtgttgaatatcaaaaaattcaatacctctatgaagctcacttaactgaagagacagtatatggattaaagaaatttagatggtatagattccaagtggctgccagcaccaatgctggctatggcaatgcttcaaactggatttctacaaaaactctgcctggccctccagatggtcctcctgaaaatgttcatgtagtagcaacatcaccttttagcatcagcataagctggagtgaacctgctgtcattactggaccaacatgttatctgattgatgtcaaatcggtagataatgatgaatttaatatatccttcatcaagtcaaatgaagaaaataaaaccatagaaattaaagatttagaaatattcacaaggtattctgtagtgatcactgcatttactgggaacattagtgctgcatatgtagaagggaagtcaagtgctgaaatgattgttactactttagaatcagccccaaaggacccacctaacaacatgacatttcagaagataccagatgaagttacaaaatttcaattaacgttccttcctccttctcaacctaatggaaatatccaagtatatcaagctctggtttaccgagaagatgatcctactgctgtccagattcacaacctcagtattatacagaaaaccaacacattcgtcattgcaatgctagaaggactaaaaggtggacatacatacaatatcagtgtttacgcagtcaatagtgctggtgcaggtccaaaggttccgatgagaataaccatggatatcaaagctccagcacgaccaaaaaccaaaccaacccctatttatgatgccacaggaaaactgcttgtgacttcaacaacaattacaatcagaatgccaatatgttactacagtgatgatcatggaccaataaaaaatgtacaagtgcttgtgacagaaacaggagctcagcatgatggaaatgtaacaaagtggtatgatgcatattttaataaagcaaggccatattttacaaatgaaggctttcctaaccctccatgtacagaaggaaagacaaagtttagtggcaatgaagaaatctacatcataggtgctgataatgcatgcatgattcctggcaatgaagacaaaatttgcaatggaccactgaaaccaaaaaagcaatacttatttaaatttagagctacaaatattatgggacaatttactgactctgattattctgaccctgttaagactttaggggaaggactttcagaaagaaccgtagagatcattctttccgtcactttgtgtatcctttcaataattctccttggaacagctatttttgcatttgcaagaattcgacagaagcagaaagaaggtggcacatactctcctcaggatgcagaaattattgacactaaattgaagctggatcagctcatcacagtggcagacctggaactgaaggacgagagattaacgcggttacttagttatagaaaatccatcaagccaataagcaagaaatccttcctgcaacatgttgaagagctttgcacaaacaacaacctaaagtttcaagaagaattttcggaattaccaaaatttcttcaggatctttcttcaactgatgctgatctgccttggaatagagcaaaaaaccgcttcccaaacataaaaccatataataataacagagtaaagctgatagctgacgctagtgttccaggttcggattatattaatgccagctatatttctggttatttatgtccaaatgaatttattgctactcaaggtccactaccaggaacagttggagatttttggagaatggtgtgggaaaccagagcaaaaacattagtaatgctaacacagtgttttgaaaaaggacggatcagatgccatcagtattggccagaggacaacaagccagttactgtctttggagatatagtgattacaaagctaatggaggatgttcaaatagattggactatcagggatctgaaaattgaaaggcatggggattgcatgactgttcgacagtgtaactttactgcctggccagagcatggggttcctgagaacagcgcccctctaattcactttgtgaagttggttcgagcaagcagggcacatgacaccacacctatgattgttcactgcagtgctggagttggaagaactggagtttttattgctctggaccatttaacacaacatataaatgaccatgattttgtggatatatatggactagtagctgaactgagaagtgaaagaatgtgcatggtgcagaatctggcacagtatatctttttacaccagtgcattctggatctcttatcaaataagggaagtaatcagcccatctgttttgttaactattcagcacttcagaagatggactctttggacgccatggaaggtgatgttgagcttgaatgggaagaaaccactatgtaa

SEQ ID NO: 24733 - DNA, 7287 bp, Homo sapiens
  source 1..7287: mol_type = unassigned DNA
cctcgcgccgcccgcccggcagcccggccggcgcgcgcacgccgcgagccgctggcgctcgggctccgctcggatcccatgcaacagccacgatgtgaagcggggcagagccgggggagcccagcccagccagcctccagacgttgccccatctgacgctcggctcgaggcctctctgtgagggaccggggggccatccccctccagggcggagatcggaggtcgctgccaagcatggcgcccacctggggccctggcatggtgtctgtggttggtcccatgggcctccttgtggtcctgctcgttggaggctgtgcagcagaagagccccccaggtttatcaaagaacccaaggaccagatcggcgtgtcggggggtgtggcctctttcgtgtgtcaggccacgggtgaccccaagccacgagtgacctggaacaagaagggcaagaaggtcaactctcagcgctttgagacgattgagtttgatgagagtgcaggggcagtgctgaggatccagccgctgaggacaccgcgggatgaaaacgtgtacgagtgtgtggcccagaactcggttggggagatcacagtccatgccaagcttactgtcctccgagaggaccagctgccctctggcttccccaacatcgacatgggcccacagttgaaggtggtggagcggacacggacagccaccatgctctgtgcagccagcggcaaccctgaccctgagatcacctggttcaaggacttcctgcctgtggatcctagtgccagcaatggacgcatcaaacagctgcgatcagaccaagctttttcccatcttcccacaggagccctgcagattgaaagcagtgaggaaaccgaccagggcaaatatgagtgtgtggccaccaacagcgccggcgtgcgctactcctcacctgccaacctctacgtgcgagtccgccgcgtggccccgcgcttctccatcctgcccatgagccacgagatcatgccagggggcaacgtgaacatcacctgcgtggccgtgggctcgcccatgccatacgtgaagtggatgcagggggccgaggacctgacccccgaggatgacatgcccgtgggtcggaacgtgctggaactcacagatgtcaaggactcggccaactacacctgcgtggccatgtccagcctgggcgtcattgaggcggttgctcagatcacggtgaaatctctccccaaagctcccgggactcccatggtgactgagaacacagccaccagcatcaccatcacgtgggactcgggcaacccagatcctgtgtcctattacgtcatcgaatataaatccaagagccaagacgggccgtatcagattaaagaggacatcaccaccacacgttacagcatcggcggcctgagccccaactcggagtacgagatctgggtgtcggccgtcaactccatcggccaggggccccccagcgagtccgtggtcacccgcacaggcgagcaggccccggccagcgcgccgcggaacgtgcaagcccggatgctcagcgcgaccaccatgattgtgcagtgggaggagccggtggagcccaacggcctgatccgcggctaccgcgtctactacaccatggaaccggagcaccccgtgggcaactggcagaagcacaacgtggacgacagcctgctgaccaccgtgggcagcctgctggaggacgagacctacaccgtgcgggtgctcgccttcacctccgtcggcgacgggcccctctcggaccccatccaggtcaagacgcagcagggagtgccgggccagcccatgaacctgcgggccgaggccaggtcggagaccagcatcacgctgtcctggagccccccgcggcaggagagtatcatcaagtacgagctcctcttccgggaaggcgaccatggccgggaggtgggaaggaccttcgacccgacgacttcctacgtggtggaggacctgaagcccaacacggagtacgccttccgcctggcggcccgctcgccgcagggcctgggcgccttcacccccgtggtgcggcagcgcacgctgcagtccaaaccgtcagccccccctcaagacgttaaatgtgtcagcgtgcgctccacggccattttggtaagttggcgcccgccgccgccggaaacgcacaacggggccctggtgggctacagcgtccgctaccgaccgctgggctcagaggacccggaacccaaggaggtgaacggcatccccccgaccaccactcagatcctgctggaggccttggagaagtggacccagtaccgcatcacgactgtcgctcacacagaggtgggaccagggcccgagagctcgcccgtggtcgtccgcaccgacgaggatgtgcccagcgcgccgccgcggaaggtggaggcggaggcgctcaacgccacggccatccgcgtgctgtggcgctcgcccgcgcccggccggcagcacggccagatccgcggctaccaggtccactacgtgcgcatggagggcgccgaggcccgcgggccgccgcgcatcaaggacgtcatgctggccgatgcccagtgggagacggatgacacggccgaatatgagatggtcatcacaaacttgcagcctgagaccgcgtactccatcacggtagccgcctacaccatgaagggcgatggcgctcgcagcaaacccaaggtggttgtgaccaagggagcagtgctgggccgcccaaccctgtcggtgcagcagacccccgagggcagcctgctggcacgctgggagcccccggctggcaccgcggaggaccaggtgctgggctaccgcctgcagtttggccgtgaggactcgacgcccctggccaccctggagttcccgccctccgaggaccgctacacggcatcaggcgtgcacaagggggccacgtatgtgttccggcttgcggcccggagccgcggcggcctgggcgaggaggcagccgaggtcctgagcatcccggaggacacgccccgtggccacccgcagattctggaggcggccggcaacgcctcggccgggaccgtccttctccgctggctgccacccgtgcccgccgagcgcaacggggccatcgtcaaatacacggtggccgtgcgggaggccggtgccctgggccctgcccgagagactgagctgccggcagcggctgagccgggcgcggagaacgcgctcacgctgcagggcctgaagcccgacacggcctatgacctccaagtgcgagcccacacgcgccggggccctggccccttcagcccccccgtccgctaccggacgttcctgcgggaccaagtctcgcccaagaacttcaaggtgaaaatgatcatgaagacatcagttctgctcagctgggagttccctgacaactacaactcacccacaccctacaagatccagtacaatgggctcacactggatgtggatggccgtaccaccaagaagctcatcacgcacctcaagccccacaccttctacaactttgtgctgaccaatcgcggcagcagcctgggcggcctccagcagacggtcaccgcctggactgccttcaacctgctcaacggcaagcccagcgtcgcccccaagcctgatgctgacggcttcatcatggtgtatcttcctgacggccagagccccgtgcctgtccagagctatttcattgtgatggtgccactgcgcaagtctcgtggaggccaattcctgaccccgctgggtagcccagaggacatggatctggaagagctcatccaggacatctcacggctacagaggcgcagcctgcggcactcgcgtcagctggaggtgccccggccctatattgcagctcgcttctctgtgctgccacccacgttccatcccggcgaccagaagcagtatggcggcttcgataaccggggcctggagcccggccaccgctatgtcctcttcgtgcttgccgtgcttcagaagagcgagcctacctttgcagccagtcccttctcagaccccttccagctggataacccggacccccagcccatcgtggatggcgaggaggggcttatctgggtgatcgggcctgtgctggccgtggtcttcataatctgcattgtcattgctatcctgctctacaagaacaaacccgacagtaaacgcaaggactcagaaccccgcaccaaatgcctcctgaacaatgccgacctcgcccctcaccaccccaaggaccctgtggaaatgagacgcattaacttccagactccaggcatgcttagccacccgccaattcccatcgcagacatggcggagcacacggagcggctcaaggccaacgacagcctcaagctctcccaggagtatgagtccatcgaccctggacagcagttcacatgggaacattccaacctggaagtgaacaagccgaagaaccgctatgccaacgtcatcgcctatgaccactcccgtgtcatcctccagcccattgaaggcatcatgggcagtgattacatcaatgccaactacgtggacggctaccggtgtcagaacgcgtacattgccacgcaggggccgctgcctgagacctttggggacttctggcgtatggtgtgggagcagcggtcggcgaccatcgtcatgatgacgcggctggaggagaagtcacggatcaagtgtgatcagtattggcccaacagaggcacggagacctacggcttcatccaggtcacgttgctagataccatcgagctggccacattctgcgtcaggacattctctctgcacaagaatggctccagtgagaaacgcgaggtccgccagttccagtttacggcgtggccggaccatggcgtgcccgaatacccaacgcccttcctggctttcctgcggagagtcaagacctgcaacccgccagatgccggccccatcgtggttcactgcagtgccggtgtgggccgcacaggctgctttatcgtcatcgacgccatgcttgagcggatcaagccagagaagacagtcgatgtctatggccacgtgacgctcatgaggtcccagcgcaactacatggtgcagacggaggaccagtacagcttcatccacgaggccctgctggaggccgtgggctgtggcaacacagaagtgcccgcacgcagcctctatgcctacatccagaagctggcccaggtggagcctggcgaacacgtcactggcatggaactcgagttcaagcggctggctaactccaaggcccacacgtcacgcttcatcagtgccaatctgccttgtaacaagttcaagaaccgcctggtgaacatcatgccctatgagagcacacgggtctgtctgcaacccatccggggtgtggagggctctgactacatcaacgccagcttcattgatggctacaggcagcagaaggcctacatcgcgacacaggggccgctggcggagaccacggaagacttctggcgcatgctgtgggagaacaattcgacgatcgtggtgatgctgaccaagctgcgggagatgggccgggagaagtgtcaccagtactggccggccgagcgctctgcccgctaccagtactttgtggtagatccgatggcagaatacaacatgcctcagtatatcctgcgagagttcaaggtcacagatgcccgggatggccagtcccggactgtccggcagttccagttcacagactggccggaacagggtgtgccaaagtcgggggagggcttcatcgacttcattggccaagtgcataagactaaggagcagtttggccaggacggccccatctctgtccactgcagtgccggcgtgggcaggacgggcgtcttcatcacgcttagcatcgtgctggagcggatgcggtatgaaggcgtggtggacatctttcagacggtgaagatgctacgaacccagcggccggccatggtgcagacagaggatgagtaccagttctgttaccaggcggcactggagtacctcggaagctttgaccactatgcaacctaaagccatggttccccccaggcccgacaccactggccccggatgcctctgcccctcccgggcggacctcctgaggcctggacccccagtgggcagggcaggaggtggcagcggcagcagctgtgtttctgcaccatttccgaggacgacgcagcccctcgagcccccccaccggccccggccgccccagcgacctccctggcaccggccgccgccttcaaatacttggcacattcctcctttccttccaattccaaaaccagattccggggtggggggtggggggatggtgagcaaataggagtgctccccagaaccagaggagggtggggcacagaccatagacggacccctcgtcctcccccagcggtggtagggggacccggggggctcctccccgctctgcagcctggggacactgggctgggaccagaatccagctttcttttaaaactctcagtgtaactgtatcccgtgacatttcattttttttaaatagtgtatttttttttccatttttttttttaagagaaacaaacaaaagactcgccagtcaatgactttcaaagagaactaactttggcttattcatattctgttcaaagacagtctattttttcactgtagaaagcgtccttgtgtgatagttacgttcgcaaacgcgcacgccaggcccatggctgtaccttggcttttttttttttttttttttttttaatttttcctaccatcagaaagtgtgctttgctcacagaagaatgggatgtccttttttctttcttggctttttttttccccctttttgtttcatttttataaattaaattttcagacatatcaaatacagttctgagggtaaggtcatgggggagctcggacccagtggcgttgggtgcggttgagggggacgctgctgtaagaggagagagatgacagtggtcctcctctgagagcctgagctgtctccccgtctcccgcccccaaggagacagagaggatcctacttcttcggggacagtggctgtatggctgtgctgccccacatcagggaccctttccccctgggactgtggggcagtttgggagcaaaaccagaaggacaggcccccctctacccgcctaccctgagcaagcgagttgttcctctttgtacaagggcaggtctgcggttactttcaacactgtttattccagcggaagcagccgggtggttttcccacccccgtgtatgtagatatatcgactttgtattaaaggaagatcgtctga

SEQ ID NO: 24734 - DNA, 7233 bp, Homo sapiens
  source 1..7233: mol_type = unassigned DNA
cctcgcgccgcccgcccggcagcccggccggcgcgcgcacgccgcgagccgctggcgctcgggctccgctcggatcccatgcaacagccacgatgtgaagcggggcagagccgggggagcccagcccagccagcctccagacgttgccccatctgacgctcggctcgaggcctctctgtgagggaccggggggccatccccctccagggcggagatcggaggtcgctgccaagcatggcgcccacctggggccctggcatggtgtctgtggttggtcccatgggcctccttgtggtcctgctcgttggaggctgtgcagcagaagagccccccaggtttatcaaagaacccaaggaccagatcggcgtgtcggggggtgtggcctctttcgtgtgtcaggccacgggtgaccccaagccacgagtgacctggaacaagaagggcaagaaggtcaactctcagcgctttgagacgattgagtttgatgagagtgcaggggcagtgctgaggatccagccgctgaggacaccgcgggatgaaaacgtgtacgagtgtgtggcccagaactcggttggggagatcacagtccatgccaagcttactgtcctccgagaggaccagctgccctctggcttccccaacatcgacatgggcccacagttgaaggtggtggagcggacacggacagccaccatgctctgtgcagccagcggcaaccctgaccctgagatcacctggttcaaggacttcctgcctgtggatcctagtgccagcaatggacgcatcaaacagctgcgatcaggagccctgcagattgaaagcagtgaggaaaccgaccagggcaaatatgagtgtgtggccaccaacagcgccggcgtgcgctactcctcacctgccaacctctacgtgcgagtccgccgcgtggccccgcgcttctccatcctgcccatgagccacgagatcatgccagggggcaacgtgaacatcacctgcgtggccgtgggctcgcccatgccatacgtgaagtggatgcagggggccgaggacctgacccccgaggatgacatgcccgtgggtcggaacgtgctggaactcacagatgtcaaggactcggccaactacacctgcgtggccatgtccagcctgggcgtcattgaggcggttgctcagatcacggtgaaatctctccccaaagctcccgggactcccatggtgactgagaacacagccaccagcatcaccatcacgtgggactcgggcaacccagatcctgtgtcctattacgtcatcgaatataaatccaagagccaagacgggccgtatcagattaaagaggacatcaccaccacacgttacagcatcggcggcctgagccccaactcggagtacgagatctgggtgtcggccgtcaactccatcggccaggggccccccagcgagtccgtggtcacccgcacaggcgagcaggccccggccagcgcgccgcggaacgtgcaagcccggatgctcagcgcgaccaccatgattgtgcagtgggaggagccggtggagcccaacggcctgatccgcggctaccgcgtctactacaccatggaaccggagcaccccgtgggcaactggcagaagcacaacgtggacgacagcctgctgaccaccgtgggcagcctgctggaggacgagacctacaccgtgcgggtgctcgccttcacctccgtcggcgacgggcccctctcggaccccatccaggtcaagacgcagcagggagtgccgggccagcccatgaacctgcgggccgaggccaggtcggagaccagcatcacgctgtcctggagccccccgcggcaggagagtatcatcaagtacgagctcctcttccgggaaggcgaccatggccgggaggtgggaaggaccttcgacccgacgacttcctacgtggtggaggacctgaagcccaacacggagtacgccttccgcctggcggcccgctcgccgcagggcctgggcgccttcacccccgtggtgcggcagcgcacgctgcagtccaaaccgtcagccccccctcaagacgttaaatgtgtcagcgtgcgctccacggccattttggtaagttggcgcccgccgccgccggaaacgcacaacggggccctggtgggctacagcgtccgctaccgaccgctgggctcagaggacccggaacccaaggaggtgaacggcatccccccgaccaccactcagatcctgctggaggccttggagaagtggacccagtaccgcatcacgactgtcgctcacacagaggtgggaccagggcccgagagctcgcccgtggtcgtccgcaccgacgaggatgtgcccagcgcgccgccgcggaaggtggaggcggaggcgctcaacgccacggccatccgcgtgctgtggcgctcgcccgcgcccggccggcagcacggccagatccgcggctaccaggtccactacgtgcgcatggagggcgccgaggcccgcgggccgccgcgcatcaaggacgtcatgctggccgatgcccaggagatggtcatcacaaacttgcagcctgagaccgcgtactccatcacggtagccgcctacaccatgaagggcgatggcgctcgcagcaaacccaaggtggttgtgaccaagggagcagtgctgggccgcccaaccctgtcggtgcagcagacccccgagggcagcctgctggcacgctgggagcccccggctggcaccgcggaggaccaggtgctgggctaccgcctgcagtttggccgtgaggactcgacgcccctggccaccctggagttcccgccctccgaggaccgctacacggcatcaggcgtgcacaagggggccacgtatgtgttccggcttgcggcccggagccgcggcggcctgggcgaggaggcagccgaggtcctgagcatcccggaggacacgccccgtggccacccgcagattctggaggcggccggcaacgcctcggccgggaccgtccttctccgctggctgccacccgtgcccgccgagcgcaacggggccatcgtcaaatacacggtggccgtgcgggaggccggtgccctgggccctgcccgagagactgagctgccggcagcggctgagccgggcgcggagaacgcgctcacgctgcagggcctgaagcccgacacggcctatgacctccaagtgcgagcccacacgcgccggggccctggccccttcagcccccccgtccgctaccggacgttcctgcgggaccaagtctcgcccaagaacttcaaggtgaaaatgatcatgaagacatcagttctgctcagctgggagttccctgacaactacaactcacccacaccctacaagatccagtacaatgggctcacactggatgtggatggccgtaccaccaagaagctcatcacgcacctcaagccccacaccttctacaactttgtgctgaccaatcgcggcagcagcctgggcggcctccagcagacggtcaccgcctggactgccttcaacctgctcaacggcaagcccagcgtcgcccccaagcctgatgctgacggcttcatcatggtgtatcttcctgacggccagagccccgtgcctgtccagagctatttcattgtgatggtgccactgcgcaagtctcgtggaggccaattcctgaccccgctgggtagcccagaggacatggatctggaagagctcatccaggacatctcacggctacagaggcgcagcctgcggcactcgcgtcagctggaggtgccccggccctatattgcagctcgcttctctgtgctgccacccacgttccatcccggcgaccagaagcagtatggcggcttcgataaccggggcctggagcccggccaccgctatgtcctcttcgtgcttgccgtgcttcagaagagcgagcctacctttgcagccagtcccttctcagaccccttccagctggataacccggacccccagcccatcgtggatggcgaggaggggcttatctgggtgatcgggcctgtgctggccgtggtcttcataatctgcattgtcattgctatcctgctctacaagaacaaacccgacagtaaacgcaaggactcagaaccccgcaccaaatgcctcctgaacaatgccgacctcgcccctcaccaccccaaggaccctgtggaaatgagacgcattaacttccagactccaggcatgcttagccacccgccaattcccatcgcagacatggcggagcacacggagcggctcaaggccaacgacagcctcaagctctcccaggagtatgagtccatcgaccctggacagcagttcacatgggaacattccaacctggaagtgaacaagccgaagaaccgctatgccaacgtcatcgcctatgaccactcccgtgtcatcctccagcccattgaaggcatcatgggcagtgattacatcaatgccaactacgtggacggctaccggtgtcagaacgcgtacattgccacgcaggggccgctgcctgagacctttggggacttctggcgtatggtgtgggagcagcggtcggcgaccatcgtcatgatgacgcggctggaggagaagtcacggatcaagtgtgatcagtattggcccaacagaggcacggagacctacggcttcatccaggtcacgttgctagataccatcgagctggccacattctgcgtcaggacattctctctgcacaagaatggctccagtgagaaacgcgaggtccgccagttccagtttacggcgtggccggaccatggcgtgcccgaatacccaacgcccttcctggctttcctgcggagagtcaagacctgcaacccgccagatgccggccccatcgtggttcactgcagtgccggtgtgggccgcacaggctgctttatcgtcatcgacgccatgcttgagcggatcaagccagagaagacagtcgatgtctatggccacgtgacgctcatgaggtcccagcgcaactacatggtgcagacggaggaccagtacagcttcatccacgaggccctgctggaggccgtgggctgtggcaacacagaagtgcccgcacgcagcctctatgcctacatccagaagctggcccaggtggagcctggcgaacacgtcactggcatggaactcgagttcaagcggctggctaactccaaggcccacacgtcacgcttcatcagtgccaatctgccttgtaacaagttcaagaaccgcctggtgaacatcatgccctatgagagcacacgggtctgtctgcaacccatccggggtgtggagggctctgactacatcaacgccagcttcattgatggctacaggcagcagaaggcctacatcgcgacacaggggccgctggcggagaccacggaagacttctggcgcatgctgtgggagaacaattcgacgatcgtggtgatgctgaccaagctgcgggagatgggccgggagaagtgtcaccagtactggccggccgagcgctctgcccgctaccagtactttgtggtagatccgatggcagaatacaacatgcctcagtatatcctgcgagagttcaaggtcacagatgcccgggatggccagtcccggactgtccggcagttccagttcacagactggccggaacagggtgtgccaaagtcgggggagggcttcatcgacttcattggccaagtgcataagactaaggagcagtttggccaggacggccccatctctgtccactgcagtgccggcgtgggcaggacgggcgtcttcatcacgcttagcatcgtgctggagcggatgcggtatgaaggcgtggtggacatctttcagacggtgaagatgctacgaacccagcggccggccatggtgcagacagaggatgagtaccagttctgttaccaggcggcactggagtacctcggaagctttgaccactatgcaacctaaagccatggttccccccaggcccgacaccactggccccggatgcctctgcccctcccgggcggacctcctgaggcctggacccccagtgggcagggcaggaggtggcagcggcagcagctgtgtttctgcaccatttccgaggacgacgcagcccctcgagcccccccaccggccccggccgccccagcgacctccctggcaccggccgccgccttcaaatacttggcacattcctcctttccttccaattccaaaaccagattccggggtggggggtggggggatggtgagcaaataggagtgctccccagaaccagaggagggtggggcacagaccatagacggacccctcgtcctcccccagcggtggtagggggacccggggggctcctccccgctctgcagcctggggacactgggctgggaccagaatccagctttcttttaaaactctcagtgtaactgtatcccgtgacatttcattttttttaaatagtgtatttttttttccatttttttttttaagagaaacaaacaaaagactcgccagtcaatgactttcaaagagaactaactttggcttattcatattctgttcaaagacagtctattttttcactgtagaaagcgtccttgtgtgatagttacgttcgcaaacgcgcacgccaggcccatggctgtaccttggcttttttttttttttttttttttttaatttttcctaccatcagaaagtgtgctttgctcacagaagaatgggatgtccttttttctttcttggctttttttttccccctttttgtttcatttttataaattaaattttcagacatatcaaatacagttctgagggtaaggtcatgggggagctcggacccagtggcgttgggtgcggttgagggggacgctgctgtaagaggagagagatgacagtggtcctcctctgagagcctgagctgtctccccgtctcccgcccccaaggagacagagaggatcctacttcttcggggacagtggctgtatggctgtgctgccccacatcagggaccctttccccctgggactgtggggcagtttgggagcaaaaccagaaggacaggcccccctctacccgcctaccctgagcaagcgagttgttcctctttgtacaagggcaggtctgcggttactttcaacactgtttattccagcggaagcagccgggtggttttcccacccccgtgtatgtagatatatcgactttgtattaaaggaagatcgtctga

SEQ ID NO: 24735 - DNA, 6006 bp, Homo sapiens
  source 1..6006: mol_type = unassigned DNA
cctcgcgccgcccgcccggcagcccggccggcgcgcgcacgccgcgagccgctggcgctcgggctccgctcggatcccatgcaacagccacgatgtgaagcggggcagagccgggggagcccagcccagccagcctccagacgttgccccatctgacgctcggctcgaggcctctctgtgagggaccggggggccatccccctccagggcggagatcggaggtcgctgccaagcatggcgcccacctggggccctggcatggtgtctgtggttggtcccatgggcctccttgtggtcctgctcgttggaggctgtgcagcagaagagccccccaggtttatcaaagaacccaaggaccagatcggcgtgtcggggggtgtggcctctttcgtgtgtcaggccacgggtgaccccaagccacgagtgacctggaacaagaagggcaagaaggtcaactctcagcgctttgagacgattgagtttgatgagagtgcaggggcagtgctgaggatccagccgctgaggacaccgcgggatgaaaacgtgtacgagtgtgtggcccagaactcggttggggagatcacagtccatgccaagcttactgtcctccgagaggaccagctgccctctggcttccccaacatcgacatgggcccacagttgaaggtggtggagcggacacggacagccaccatgctctgtgcagccagcggcaaccctgaccctgagatcacctggttcaaggacttcctgcctgtggatcctagtgccagcaatggacgcatcaaacagctgcgatcaggagccctgcagattgaaagcagtgaggaaaccgaccagggcaaatatgagtgtgtggccaccaacagcgccggcgtgcgctactcctcacctgccaacctctacgtgcgagtccgccgcgtggccccgcgcttctccatcctgcccatgagccacgagatcatgccagggggcaacgtgaacatcacctgcgtggccgtgggctcgcccatgccatacgtgaagtggatgcagggggccgaggacctgacccccgaggatgacatgcccgtgggtcggaacgtgctggaactcacagatgtcaaggactcggccaactacacctgcgtggccatgtccagcctgggcgtcattgaggcggttgctcagatcacggtgaaatctctccccaaagctcccgggactcccatggtgactgagaacacagccaccagcatcaccatcacgtgggactcgggcaacccagatcctgtgtcctattacgtcatcgaatataaatccaagagccaagacgggccgtatcagattaaagaggacatcaccaccacacgttacagcatcggcggcctgagccccaactcggagtacgagatctgggtgtcggccgtcaactccatcggccaggggccccccagcgagtccgtggtcacccgcacaggcgagcaggccccggccagcgcgccgcggaacgtgcaagcccggatgctcagcgcgaccaccatgattgtgcagtgggaggagccggtggagcccaacggcctgatccgcggctaccgcgtctactacaccatggaaccggagcaccccgtgggcaactggcagaagcacaacgtggacgacagcctgctgaccaccgtgggcagcctgctggaggacgagacctacaccgtgcgggtgctcgccttcacctccgtcggcgacgggcccctctcggaccccatccaggtcaagacgcagcagggagtgccgggccagcccatgaacctgcgggccgaggccaggtcggagaccagcatcacgctgtcctggagccccccgcggcaggagagtatcatcaagtacgagctcctcttccgggaaggcgaccatggccgggaggtgggaaggaccttcgacccgacgacttcctacgtggtggaggacctgaagcccaacacggagtacgccttccgcctggcggcccgctcgccgcagggcctgggcgccttcacccccgtggtgcggcagcgcacgctgcagtccatctcgcccaagaacttcaaggtgaaaatgatcatgaagacatcagttctgctcagctgggagttccctgacaactacaactcacccacaccctacaagatccagtacaatgggctcacactggatgtggatggccgtaccaccaagaagctcatcacgcacctcaagccccacaccttctacaactttgtgctgaccaatcgcggcagcagcctgggcggcctccagcagacggtcaccgcctggactgccttcaacctgctcaacggcaagcccagcgtcgcccccaagcctgatgctgacggcttcatcatggtgtatcttcctgacggccagagccccgtgcctgtccagagctatttcattgtgatggtgccactgcgcaagtctcgtggaggccaattcctgaccccgctgggtagcccagaggacatggatctggaagagctcatccaggacatctcacggctacagaggcgcagcctgcggcactcgcgtcagctggaggtgccccggccctatattgcagctcgcttctctgtgctgccacccacgttccatcccggcgaccagaagcagtatggcggcttcgataaccggggcctggagcccggccaccgctatgtcctcttcgtgcttgccgtgcttcagaagagcgagcctacctttgcagccagtcccttctcagaccccttccagctggataacccggacccccagcccatcgtggatggcgaggaggggcttatctgggtgatcgggcctgtgctggccgtggtcttcataatctgcattgtcattgctatcctgctctacaagaacaaacccgacagtaaacgcaaggactcagaaccccgcaccaaatgcctcctgaacaatgccgacctcgcccctcaccaccccaaggaccctgtggaaatgagacgcattaacttccagactccaggcatgcttagccacccgccaattcccatcgcagacatggcggagcacacggagcggctcaaggccaacgacagcctcaagctctcccaggagtatgagtccatcgaccctggacagcagttcacatgggaacattccaacctggaagtgaacaagccgaagaaccgctatgccaacgtcatcgcctatgaccactcccgtgtcatcctccagcccattgaaggcatcatgggcagtgattacatcaatgccaactacgtggacggctaccggtgtcagaacgcgtacattgccacgcaggggccgctgcctgagacctttggggacttctggcgtatggtgtgggagcagcggtcggcgaccatcgtcatgatgacgcggctggaggagaagtcacggatcaagtgtgatcagtattggcccaacagaggcacggagacctacggcttcatccaggtcacgttgctagataccatcgagctggccacattctgcgtcaggacattctctctgcacaagaatggctccagtgagaaacgcgaggtccgccagttccagtttacggcgtggccggaccatggcgtgcccgaatacccaacgcccttcctggctttcctgcggagagtcaagacctgcaacccgccagatgccggccccatcgtggttcactgcagtgccggtgtgggccgcacaggctgctttatcgtcatcgacgccatgcttgagcggatcaagccagagaagacagtcgatgtctatggccacgtgacgctcatgaggtcccagcgcaactacatggtgcagacggaggaccagtacagcttcatccacgaggccctgctggaggccgtgggctgtggcaacacagaagtgcccgcacgcagcctctatgcctacatccagaagctggcccaggtggagcctggcgaacacgtcactggcatggaactcgagttcaagcggctggctaactccaaggcccacacgtcacgcttcatcagtgccaatctgccttgtaacaagttcaagaaccgcctggtgaacatcatgccctatgagagcacacgggtctgtctgcaacccatccggggtgtggagggctctgactacatcaacgccagcttcattgatggctacaggcagcagaaggcctacatcgcgacacaggggccgctggcggagaccacggaagacttctggcgcatgctgtgggagaacaattcgacgatcgtggtgatgctgaccaagctgcgggagatgggccgggagaagtgtcaccagtactggccggccgagcgctctgcccgctaccagtactttgtggtagatccgatggcagaatacaacatgcctcagtatatcctgcgagagttcaaggtcacagatgcccgggatggccagtcccggactgtccggcagttccagttcacagactggccggaacagggtgtgccaaagtcgggggagggcttcatcgacttcattggccaagtgcataagactaaggagcagtttggccaggacggccccatctctgtccactgcagtgccggcgtgggcaggacgggcgtcttcatcacgcttagcatcgtgctggagcggatgcggtatgaaggcgtggtggacatctttcagacggtgaagatgctacgaacccagcggccggccatggtgcagacagaggatgagtaccagttctgttaccaggcggcactggagtacctcggaagctttgaccactatgcaacctaaagccatggttccccccaggcccgacaccactggccccggatgcctctgcccctcccgggcggacctcctgaggcctggacccccagtgggcagggcaggaggtggcagcggcagcagctgtgtttctgcaccatttccgaggacgacgcagcccctcgagcccccccaccggccccggccgccccagcgacctccctggcaccggccgccgccttcaaatacttggcacattcctcctttccttccaattccaaaaccagattccggggtggggggtggggggatggtgagcaaataggagtgctccccagaaccagaggagggtggggcacagaccatagacggacccctcgtcctcccccagcggtggtagggggacccggggggctcctccccgctctgcagcctggggacactgggctgggaccagaatccagctttcttttaaaactctcagtgtaactgtatcccgtgacatttcattttttttaaatagtgtatttttttttccatttttttttttaagagaaacaaacaaaagactcgccagtcaatgactttcaaagagaactaactttggcttattcatattctgttcaaagacagtctattttttcactgtagaaagcgtccttgtgtgatagttacgttcgcaaacgcgcacgccaggcccatggctgtaccttggcttttttttttttttttttttttttaatttttcctaccatcagaaagtgtgctttgctcacagaagaatgggatgtccttttttctttcttggctttttttttccccctttttgtttcatttttataaattaaattttcagacatatcaaatacagttctgagggtaaggtcatgggggagctcggacccagtggcgttgggtgcggttgagggggacgctgctgtaagaggagagagatgacagtggtcctcctctgagagcctgagctgtctccccgtctcccgcccccaaggagacagagaggatcctacttcttcggggacagtggctgtatggctgtgctgccccacatcagggaccctttccccctgggactgtggggcagtttgggagcaaaaccagaaggacaggcccccctctacccgcctaccctgagcaagcgagttgttcctctttgtacaagggcaggtctgcggttactttcaacactgtttattccagcggaagcagccgggtggttttcccacccccgtgtatgtagatatatcgactttgtattaaaggaagatcgtctga

SEQ ID NO: 24736 - DNA, 7347 bp, Homo sapiens
  source 1..7347: mol_type = unassigned DNA
cctcgcgccgcccgcccggcagcccggccggcgcgcgcacgccgcgagccgctggcgctcgggctccgctcggatcccatgcaacagccacgatgtgaagcggggcagagccgggggagcccagcccagccagcctccagacgttgccccatctgacgctcggctcgaggcctctctgtgagggaccggggggccatccccctccagggcggagatcggaggtcgctgccaagcatggcgcccacctggggccctggcatggtgtctgtggttggtcccatgggcctccttgtggtcctgctcgttggaggctgtgcagcagaagagccccccaggtttatcaaagaacccaaggaccagatcggcgtgtcggggggtgtggcctctttcgtgtgtcaggccacgggtgaccccaagccacgagtgacctggaacaagaagggcaagaaggtcaactctcagcgctttgagacgattgagtttgatgagagtgcaggggcagtgctgaggatccagccgctgaggacaccgcgggatgaaaacgtgtacgagtgtgtggcccagaactcggttggggagatcacagtccatgccaagcttactgtcctccgagaggaccagctgccctctggcttccccaacatcgacatgggcccacagttgaaggtggtggagcggacacggacagccaccatgctctgtgcagccagcggcaaccctgaccctgagatcacctggttcaaggacttcctgcctgtggatcctagtgccagcaatggacgcatcaaacagctgcgatcagaccaagctttttcccatcttcccacaggagccctgcagattgaaagcagtgaggaaaccgaccagggcaaatatgagtgtgtggccaccaacagcgccggcgtgcgctactcctcacctgccaacctctacgtgcgagtttggagaacagtccgccgcgtggccccgcgcttctccatcctgcccatgagccacgagatcatgccagggggcaacgtgaacatcacctgcgtggccgtgggctcgcccatgccatacgtgaagtggatgcagggggccgaggacctgacccccgaggatgacatgcccgtgggtcggaacgtgctggaactcacagatgtcaaggactcggccaactacacctgcgtggccatgtccagcctgggcgtcattgaggcggttgctcagatcacggtgaaatctctccccaaagctcccgggactcccatggtgactgagaacacagccaccagcatcaccatcacgtgggactcgggcaacccagatcctgtgtcctattacgtcatcgaatataaatccaagagccaagacgggccgtatcagattaaagaggacatcaccaccacacgttacagcatcggcggcctgagccccaactcggagtacgagatctgggtgtcggccgtcaactccatcggccaggggccccccagcgagtccgtggtcacccgcacaggcgagcaggccccggccagcgcgccgcggaacgtgcaagcccggatgctcagcgcgaccaccatgattgtgcagtgggaggagccggtggagcccaacggcctgatccgcggctaccgcgtctactacaccatggaaccggagcaccccgtgggcaactggcagaagcacaacgtggacgacagcctgctgaccaccgtgggcagcctgctggaggacgagacctacaccgtgcgggtgctcgccttcacctccgtcggcgacgggcccctctcggaccccatccaggtcaagacgcagcagggagtgccgggccagcccatgaacctgcgggccgaggccaggtcggagaccagcatcacgctgtcctggagccccccgcggcaggagagtatcatcaagtacgagctcctcttccgggaaggcgaccatggccgggaggtgggaaggaccttcgacccgacgacttcctacgtggtggaggacctgaagcccaacacggagtacgccttccgcctggcggcccgctcgccgcagggcctgggcgccttcacccccgtggtgcggcagcgcacgctgcagtccaaaccgtcagccccccctcaagacgttaaatgtgtcagcgtgcgctccacggccattttggtaagttggcgcccgccgccgccggaaacgcacaacggggccctggtgggctacagcgtccgctaccgaccgctgggctcagaggacccggaacccaaggaggtgaacggcatccccccgaccaccactcagatcctgctggaggccttggagaagtggacccagtaccgcatcacgactgtcgctcacacagaggtgggaccagggcccgagagctcgcccgtggtcgtccgcaccgacgaggatgtgcccagcgcgccgccgcggaaggtggaggcggaggcgctcaacgccacggccatccgcgtgctgtggcgctcgcccgcgcccggccggcagcacggccagatccgcggctaccaggtccactacgtgcgcatggagggcgccgaggcccgcgggccgccgcgcatcaaggacgtcatgctggccgatgcccagtgggagacggatgacacggccgaatatgagatggtcatcacaaacttgcagcctgagaccgcgtactccatcacggtagccgcctacaccatgaagggcgatggcgctcgcagcaaacccaaggtggttgtgaccaagggagcagtgctgggccgcccaaccctgtcggtgcagcagacccccgagggcagcctgctggcacgctgggagcccccggctggcaccgcggaggaccaggtgctgggctaccgcctgcagtttggccgtgaggactcgacgcccctggccaccctggagttcccgccctccgaggaccgctacacggcatcaggcgtgcacaagggggccacgtatgtgttccggcttgcggcccggagccgcggcggcctgggcgaggaggcagccgaggtcctgagcatcccggaggacacgccccgtggccacccgcagattctggaggcggccggcaacgcctcggccgggaccgtccttctccgctggctgccacccgtgcccgccgagcgcaacggggccatcgtcaaatacacggtggccgtgcgggaggccggtgccctgggccctgcccgagagactgagctgccggcagcggctgagccgggcgcggagaacgcgctcacgctgcagggcctgaagcccgacacggcctatgacctccaagtgcgagcccacacgcgccggggccctggccccttcagcccccccgtccgctaccggacgttcctgcgggaccaagtctcgcccaagaacttcaaggtgaaaatgatcatgaagacatcagttctgctcagctgggagttccctgacaactacaactcacccacaccctacaagatccagtacaatgggctcacactggatgtggatggccgtaccaccaagaagctcatcacgcacctcaagccccacaccttctacaactttgtgctgaccaatcgcggcagcagcctgggcggcctccagcagacggtcaccgcctggactgccttcaacctgctcaacggcaagcccagcgtcgcccccaagcctgatgctgacggcttcatcatggtgtatcttcctgacggccagagccccgtgcctgtccagagctatttcattgtgatggtgccactgcgcaagtctcgtggaggccaattcctgaccccgctgggtagcccagaggacatggatctggaagagctcatccaggacatctcacggctacagaggcgcagcctgcggcactcgcgtcagctggaggtgccccggccctatattgcagctcgcttctctgtgctgccacccacgttccatcccggcgaccagaagcagtatggcggcttcgataaccggggcctggagcccggccaccgctatgtcctcttcgtgcttgccgtgcttcagaagagcgagcctacctttgcagccagtcccttctcagaccccttccagctggataacccggacccccagcccatcgtggatggcgaggaggggcttatctgggtgatcgggcctgtgctggccgtggtcttcataatctgcattgtcattgctatcctgctctacaagaacaaacccgacagtaaacgcaaggactcagaaccccgcaccaaatgcctcctgaacaatgccgacctcgcccctcaccaccccaaggaccctgtggaaatgagacgcattaacttccagactccagattcaggcctcaggagccccctcagggagccggggtttcactttgaaagcatgcttagccacccgccaattcccatcgcagacatggcggagcacacggagcggctcaaggccaacgacagcctcaagctctcccaggagtatgagtccatcgaccctggacagcagttcacatgggaacattccaacctggaagtgaacaagccgaagaaccgctatgccaacgtcatcgcctatgaccactcccgtgtcatcctccagcccattgaaggcatcatgggcagtgattacatcaatgccaactacgtggacggctaccggtgtcagaacgcgtacattgccacgcaggggccgctgcctgagacctttggggacttctggcgtatggtgtgggagcagcggtcggcgaccatcgtcatgatgacgcggctggaggagaagtcacggatcaagtgtgatcagtattggcccaacagaggcacggagacctacggcttcatccaggtcacgttgctagataccatcgagctggccacattctgcgtcaggacattctctctgcacaagaatggctccagtgagaaacgcgaggtccgccagttccagtttacggcgtggccggaccatggcgtgcccgaatacccaacgcccttcctggctttcctgcggagagtcaagacctgcaacccgccagatgccggccccatcgtggttcactgcagtgccggtgtgggccgcacaggctgctttatcgtcatcgacgccatgcttgagcggatcaagccagagaagacagtcgatgtctatggccacgtgacgctcatgaggtcccagcgcaactacatggtgcagacggaggaccagtacagcttcatccacgaggccctgctggaggccgtgggctgtggcaacacagaagtgcccgcacgcagcctctatgcctacatccagaagctggcccaggtggagcctggcgaacacgtcactggcatggaactcgagttcaagcggctggctaactccaaggcccacacgtcacgcttcatcagtgccaatctgccttgtaacaagttcaagaaccgcctggtgaacatcatgccctatgagagcacacgggtctgtctgcaacccatccggggtgtggagggctctgactacatcaacgccagcttcattgatggctacaggcagcagaaggcctacatcgcgacacaggggccgctggcggagaccacggaagacttctggcgcatgctgtgggagaacaattcgacgatcgtggtgatgctgaccaagctgcgggagatgggccgggagaagtgtcaccagtactggccggccgagcgctctgcccgctaccagtactttgtggtagatccgatggcagaatacaacatgcctcagtatatcctgcgagagttcaaggtcacagatgcccgggatggccagtcccggactgtccggcagttccagttcacagactggccggaacagggtgtgccaaagtcgggggagggcttcatcgacttcattggccaagtgcataagactaaggagcagtttggccaggacggccccatctctgtccactgcagtgccggcgtgggcaggacgggcgtcttcatcacgcttagcatcgtgctggagcggatgcggtatgaaggcgtggtggacatctttcagacggtgaagatgctacgaacccagcggccggccatggtgcagacagaggatgagtaccagttctgttaccaggcggcactggagtacctcggaagctttgaccactatgcaacctaaagccatggttccccccaggcccgacaccactggccccggatgcctctgcccctcccgggcggacctcctgaggcctggacccccagtgggcagggcaggaggtggcagcggcagcagctgtgtttctgcaccatttccgaggacgacgcagcccctcgagcccccccaccggccccggccgccccagcgacctccctggcaccggccgccgccttcaaatacttggcacattcctcctttccttccaattccaaaaccagattccggggtggggggtggggggatggtgagcaaataggagtgctccccagaaccagaggagggtggggcacagaccatagacggacccctcgtcctcccccagcggtggtagggggacccggggggctcctccccgctctgcagcctggggacactgggctgggaccagaatccagctttcttttaaaactctcagtgtaactgtatcccgtgacatttcattttttttaaatagtgtatttttttttccatttttttttttaagagaaacaaacaaaagactcgccagtcaatgactttcaaagagaactaactttggcttattcatattctgttcaaagacagtctattttttcactgtagaaagcgtccttgtgtgatagttacgttcgcaaacgcgcacgccaggcccatggctgtaccttggcttttttttttttttttttttttttaatttttcctaccatcagaaagtgtgctttgctcacagaagaatgggatgtccttttttctttcttggctttttttttccccctttttgtttcatttttataaattaaattttcagacatatcaaatacagttctgagggtaaggtcatgggggagctcggacccagtggcgttgggtgcggttgagggggacgctgctgtaagaggagagagatgacagtggtcctcctctgagagcctgagctgtctccccgtctcccgcccccaaggagacagagaggatcctacttcttcggggacagtggctgtatggctgtgctgccccacatcagggaccctttccccctgggactgtggggcagtttgggagcaaaaccagaaggacaggcccccctctacccgcctaccctgagcaagcgagttgttcctctttgtacaagggcaggtctgcggttactttcaacactgtttattccagcggaagcagccgggtggttttcccacccccgtgtatgtagatatatcgactttgtattaaaggaagatcgtctga

SEQ ID NO: 24737 - DNA, 6093 bp, Homo sapiens
  source 1..6093: mol_type = unassigned DNA
cctcgcgccgcccgcccggcagcccggccggcgcgcgcacgccgcgagccgctggcgctcgggctccgctcggatcccatgcaacagccacgatgtgaagcggggcagagccgggggagcccagcccagccagcctccagacgttgccccatctgacgctcggctcgaggcctctctgtgagggaccggggggccatccccctccagggcggagatcggaggtcgctgccaagcatggcgcccacctggggccctggcatggtgtctgtggttggtcccatgggcctccttgtggtcctgctcgttggaggctgtgcagcagaagagccccccaggtttatcaaagaacccaaggaccagatcggcgtgtcggggggtgtggcctctttcgtgtgtcaggccacgggtgaccccaagccacgagtgacctggaacaagaagggcaagaaggtcaactctcagcgctttgagacgattgagtttgatgagagtgcaggggcagtgctgaggatccagccgctgaggacaccgcgggatgaaaacgtgtacgagtgtgtggcccagaactcggttggggagatcacagtccatgccaagcttactgtcctccgagaggaccagctgccctctggcttccccaacatcgacatgggcccacagttgaaggtggtggagcggacacggacagccaccatgctctgtgcagccagcggcaaccctgaccctgagatcacctggttcaaggacttcctgcctgtggatcctagtgccagcaatggacgcatcaaacagctgcgatcagaccaagctttttcccatcttcccacaggagccctgcagattgaaagcagtgaggaaaccgaccagggcaaatatgagtgtgtggccaccaacagcgccggcgtgcgctactcctcacctgccaacctctacgtgcgagtttggagaacagtccgccgcgtggccccgcgcttctccatcctgcccatgagccacgagatcatgccagggggcaacgtgaacatcacctgcgtggccgtgggctcgcccatgccatacgtgaagtggatgcagggggccgaggacctgacccccgaggatgacatgcccgtgggtcggaacgtgctggaactcacagatgtcaaggactcggccaactacacctgcgtggccatgtccagcctgggcgtcattgaggcggttgctcagatcacggtgaaatctctccccaaagctcccgggactcccatggtgactgagaacacagccaccagcatcaccatcacgtgggactcgggcaacccagatcctgtgtcctattacgtcatcgaatataaatccaagagccaagacgggccgtatcagattaaagaggacatcaccaccacacgttacagcatcggcggcctgagccccaactcggagtacgagatctgggtgtcggccgtcaactccatcggccaggggccccccagcgagtccgtggtcacccgcacaggcgagcaggccccggccagcgcgccgcggaacgtgcaagcccggatgctcagcgcgaccaccatgattgtgcagtgggaggagccggtggagcccaacggcctgatccgcggctaccgcgtctactacaccatggaaccggagcaccccgtgggcaactggcagaagcacaacgtggacgacagcctgctgaccaccgtgggcagcctgctggaggacgagacctacaccgtgcgggtgctcgccttcacctccgtcggcgacgggcccctctcggaccccatccaggtcaagacgcagcagggagtgccgggccagcccatgaacctgcgggccgaggccaggtcggagaccagcatcacgctgtcctggagccccccgcggcaggagagtatcatcaagtacgagctcctcttccgggaaggcgaccatggccgggaggtgggaaggaccttcgacccgacgacttcctacgtggtggaggacctgaagcccaacacggagtacgccttccgcctggcggcccgctcgccgcagggcctgggcgccttcacccccgtggtgcggcagcgcacgctgcagtccatctcgcccaagaacttcaaggtgaaaatgatcatgaagacatcagttctgctcagctgggagttccctgacaactacaactcacccacaccctacaagatccagtacaatgggctcacactggatgtggatggccgtaccaccaagaagctcatcacgcacctcaagccccacaccttctacaactttgtgctgaccaatcgcggcagcagcctgggcggcctccagcagacggtcaccgcctggactgccttcaacctgctcaacggcaagcccagcgtcgcccccaagcctgatgctgacggcttcatcatggtgtatcttcctgacggccagagccccgtgcctgtccagagctatttcattgtgatggtgccactgcgcaagtctcgtggaggccaattcctgaccccgctgggtagcccagaggacatggatctggaagagctcatccaggacatctcacggctacagaggcgcagcctgcggcactcgcgtcagctggaggtgccccggccctatattgcagctcgcttctctgtgctgccacccacgttccatcccggcgaccagaagcagtatggcggcttcgataaccggggcctggagcccggccaccgctatgtcctcttcgtgcttgccgtgcttcagaagagcgagcctacctttgcagccagtcccttctcagaccccttccagctggataacccggacccccagcccatcgtggatggcgaggaggggcttatctgggtgatcgggcctgtgctggccgtggtcttcataatctgcattgtcattgctatcctgctctacaagaacaaacccgacagtaaacgcaaggactcagaaccccgcaccaaatgcctcctgaacaatgccgacctcgcccctcaccaccccaaggaccctgtggaaatgagacgcattaacttccagactccagattcaggcctcaggagccccctcagggagccggggtttcactttgaaagcatgcttagccacccgccaattcccatcgcagacatggcggagcacacggagcggctcaaggccaacgacagcctcaagctctcccaggagtatgagtccatcgaccctggacagcagttcacatgggaacattccaacctggaagtgaacaagccgaagaaccgctatgccaacgtcatcgcctatgaccactcccgtgtcatcctccagcccattgaaggcatcatgggcagtgattacatcaatgccaactacgtggacggctaccggtgtcagaacgcgtacattgccacgcaggggccgctgcctgagacctttggggacttctggcgtatggtgtgggagcagcggtcggcgaccatcgtcatgatgacgcggctggaggagaagtcacggatcaagtgtgatcagtattggcccaacagaggcacggagacctacggcttcatccaggtcacgttgctagataccatcgagctggccacattctgcgtcaggacattctctctgcacaagaatggctccagtgagaaacgcgaggtccgccagttccagtttacggcgtggccggaccatggcgtgcccgaatacccaacgcccttcctggctttcctgcggagagtcaagacctgcaacccgccagatgccggccccatcgtggttcactgcagtgccggtgtgggccgcacaggctgctttatcgtcatcgacgccatgcttgagcggatcaagccagagaagacagtcgatgtctatggccacgtgacgctcatgaggtcccagcgcaactacatggtgcagacggaggaccagtacagcttcatccacgaggccctgctggaggccgtgggctgtggcaacacagaagtgcccgcacgcagcctctatgcctacatccagaagctggcccaggtggagcctggcgaacacgtcactggcatggaactcgagttcaagcggctggctaactccaaggcccacacgtcacgcttcatcagtgccaatctgccttgtaacaagttcaagaaccgcctggtgaacatcatgccctatgagagcacacgggtctgtctgcaacccatccggggtgtggagggctctgactacatcaacgccagcttcattgatggctacaggcagcagaaggcctacatcgcgacacaggggccgctggcggagaccacggaagacttctggcgcatgctgtgggagaacaattcgacgatcgtggtgatgctgaccaagctgcgggagatgggccgggagaagtgtcaccagtactggccggccgagcgctctgcccgctaccagtactttgtggtagatccgatggcagaatacaacatgcctcagtatatcctgcgagagttcaaggtcacagatgcccgggatggccagtcccggactgtccggcagttccagttcacagactggccggaacagggtgtgccaaagtcgggggagggcttcatcgacttcattggccaagtgcataagactaaggagcagtttggccaggacggccccatctctgtccactgcagtgccggcgtgggcaggacgggcgtcttcatcacgcttagcatcgtgctggagcggatgcggtatgaaggcgtggtggacatctttcagacggtgaagatgctacgaacccagcggccggccatggtgcagacagaggatgagtaccagttctgttaccaggcggcactggagtacctcggaagctttgaccactatgcaacctaaagccatggttccccccaggcccgacaccactggccccggatgcctctgcccctcccgggcggacctcctgaggcctggacccccagtgggcagggcaggaggtggcagcggcagcagctgtgtttctgcaccatttccgaggacgacgcagcccctcgagcccccccaccggccccggccgccccagcgacctccctggcaccggccgccgccttcaaatacttggcacattcctcctttccttccaattccaaaaccagattccggggtggggggtggggggatggtgagcaaataggagtgctccccagaaccagaggagggtggggcacagaccatagacggacccctcgtcctcccccagcggtggtagggggacccggggggctcctccccgctctgcagcctggggacactgggctgggaccagaatccagctttcttttaaaactctcagtgtaactgtatcccgtgacatttcattttttttaaatagtgtatttttttttccatttttttttttaagagaaacaaacaaaagactcgccagtcaatgactttcaaagagaactaactttggcttattcatattctgttcaaagacagtctattttttcactgtagaaagcgtccttgtgtgatagttacgttcgcaaacgcgcacgccaggcccatggctgtaccttggcttttttttttttttttttttttttaatttttcctaccatcagaaagtgtgctttgctcacagaagaatgggatgtccttttttctttcttggctttttttttccccctttttgtttcatttttataaattaaattttcagacatatcaaatacagttctgagggtaaggtcatgggggagctcggacccagtggcgttgggtgcggttgagggggacgctgctgtaagaggagagagatgacagtggtcctcctctgagagcctgagctgtctccccgtctcccgcccccaaggagacagagaggatcctacttcttcggggacagtggctgtatggctgtgctgccccacatcagggaccctttccccctgggactgtggggcagtttgggagcaaaaccagaaggacaggcccccctctacccgcctaccctgagcaagcgagttgttcctctttgtacaagggcaggtctgcggttactttcaacactgtttattccagcggaagcagccgggtggttttcccacccccgtgtatgtagatatatcgactttgtattaaaggaagatcgtctga

SEQ ID NO: 24738 - DNA, 7320 bp, Homo sapiens
  source 1..7320: mol_type = unassigned DNA
cctcgcgccgcccgcccggcagcccggccggcgcgcgcacgccgcgagccgctggcgctcgggctccgctcggatcccatgcaacagccacgatgtgaagcggggcagagccgggggagcccagcccagccagcctccagacgttgccccatctgacgctcggctcgaggcctctctgtgagggaccggggggccatccccctccagggcggagatcggaggtcgctgccaagcatggcgcccacctggggccctggcatggtgtctgtggttggtcccatgggcctccttgtggtcctgctcgttggaggctgtgcagcagaagagccccccaggtttatcaaagaacccaaggaccagatcggcgtgtcggggggtgtggcctctttcgtgtgtcaggccacgggtgaccccaagccacgagtgacctggaacaagaagggcaagaaggtcaactctcagcgctttgagacgattgagtttgatgagagtgcaggggcagtgctgaggatccagccgctgaggacaccgcgggatgaaaacgtgtacgagtgtgtggcccagaactcggttggggagatcacagtccatgccaagcttactgtcctccgagaggaccagctgccctctggcttccccaacatcgacatgggcccacagttgaaggtggtggagcggacacggacagccaccatgctctgtgcagccagcggcaaccctgaccctgagatcacctggttcaaggacttcctgcctgtggatcctagtgccagcaatggacgcatcaaacagctgcgatcagaccaagctttttcccatcttcccacaggagccctgcagattgaaagcagtgaggaaaccgaccagggcaaatatgagtgtgtggccaccaacagcgccggcgtgcgctactcctcacctgccaacctctacgtgcgagtttggagaacagtccgccgcgtggccccgcgcttctccatcctgcccatgagccacgagatcatgccagggggcaacgtgaacatcacctgcgtggccgtgggctcgcccatgccatacgtgaagtggatgcagggggccgaggacctgacccccgaggatgacatgcccgtgggtcggaacgtgctggaactcacagatgtcaaggactcggccaactacacctgcgtggccatgtccagcctgggcgtcattgaggcggttgctcagatcacggtgaaatctctccccaaagctcccgggactcccatggtgactgagaacacagccaccagcatcaccatcacgtgggactcgggcaacccagatcctgtgtcctattacgtcatcgaatataaatccaagagccaagacgggccgtatcagattaaagaggacatcaccaccacacgttacagcatcggcggcctgagccccaactcggagtacgagatctgggtgtcggccgtcaactccatcggccaggggccccccagcgagtccgtggtcacccgcacaggcgagcaggccccggccagcgcgccgcggaacgtgcaagcccggatgctcagcgcgaccaccatgattgtgcagtgggaggagccggtggagcccaacggcctgatccgcggctaccgcgtctactacaccatggaaccggagcaccccgtgggcaactggcagaagcacaacgtggacgacagcctgctgaccaccgtgggcagcctgctggaggacgagacctacaccgtgcgggtgctcgccttcacctccgtcggcgacgggcccctctcggaccccatccaggtcaagacgcagcagggagtgccgggccagcccatgaacctgcgggccgaggccaggtcggagaccagcatcacgctgtcctggagccccccgcggcaggagagtatcatcaagtacgagctcctcttccgggaaggcgaccatggccgggaggtgggaaggaccttcgacccgacgacttcctacgtggtggaggacctgaagcccaacacggagtacgccttccgcctggcggcccgctcgccgcagggcctgggcgccttcacccccgtggtgcggcagcgcacgctgcagtccaaaccgtcagccccccctcaagacgttaaatgtgtcagcgtgcgctccacggccattttggtaagttggcgcccgccgccgccggaaacgcacaacggggccctggtgggctacagcgtccgctaccgaccgctgggctcagaggacccggaacccaaggaggtgaacggcatccccccgaccaccactcagatcctgctggaggccttggagaagtggacccagtaccgcatcacgactgtcgctcacacagaggtgggaccagggcccgagagctcgcccgtggtcgtccgcaccgacgaggatgtgcccagcgcgccgccgcggaaggtggaggcggaggcgctcaacgccacggccatccgcgtgctgtggcgctcgcccgcgcccggccggcagcacggccagatccgcggctaccaggtccactacgtgcgcatggagggcgccgaggcccgcgggccgccgcgcatcaaggacgtcatgctggccgatgcccaggagatggtcatcacaaacttgcagcctgagaccgcgtactccatcacggtagccgcctacaccatgaagggcgatggcgctcgcagcaaacccaaggtggttgtgaccaagggagcagtgctgggccgcccaaccctgtcggtgcagcagacccccgagggcagcctgctggcacgctgggagcccccggctggcaccgcggaggaccaggtgctgggctaccgcctgcagtttggccgtgaggactcgacgcccctggccaccctggagttcccgccctccgaggaccgctacacggcatcaggcgtgcacaagggggccacgtatgtgttccggcttgcggcccggagccgcggcggcctgggcgaggaggcagccgaggtcctgagcatcccggaggacacgccccgtggccacccgcagattctggaggcggccggcaacgcctcggccgggaccgtccttctccgctggctgccacccgtgcccgccgagcgcaacggggccatcgtcaaatacacggtggccgtgcgggaggccggtgccctgggccctgcccgagagactgagctgccggcagcggctgagccgggcgcggagaacgcgctcacgctgcagggcctgaagcccgacacggcctatgacctccaagtgcgagcccacacgcgccggggccctggccccttcagcccccccgtccgctaccggacgttcctgcgggaccaagtctcgcccaagaacttcaaggtgaaaatgatcatgaagacatcagttctgctcagctgggagttccctgacaactacaactcacccacaccctacaagatccagtacaatgggctcacactggatgtggatggccgtaccaccaagaagctcatcacgcacctcaagccccacaccttctacaactttgtgctgaccaatcgcggcagcagcctgggcggcctccagcagacggtcaccgcctggactgccttcaacctgctcaacggcaagcccagcgtcgcccccaagcctgatgctgacggcttcatcatggtgtatcttcctgacggccagagccccgtgcctgtccagagctatttcattgtgatggtgccactgcgcaagtctcgtggaggccaattcctgaccccgctgggtagcccagaggacatggatctggaagagctcatccaggacatctcacggctacagaggcgcagcctgcggcactcgcgtcagctggaggtgccccggccctatattgcagctcgcttctctgtgctgccacccacgttccatcccggcgaccagaagcagtatggcggcttcgataaccggggcctggagcccggccaccgctatgtcctcttcgtgcttgccgtgcttcagaagagcgagcctacctttgcagccagtcccttctcagaccccttccagctggataacccggacccccagcccatcgtggatggcgaggaggggcttatctgggtgatcgggcctgtgctggccgtggtcttcataatctgcattgtcattgctatcctgctctacaagaacaaacccgacagtaaacgcaaggactcagaaccccgcaccaaatgcctcctgaacaatgccgacctcgcccctcaccaccccaaggaccctgtggaaatgagacgcattaacttccagactccagattcaggcctcaggagccccctcagggagccggggtttcactttgaaagcatgcttagccacccgccaattcccatcgcagacatggcggagcacacggagcggctcaaggccaacgacagcctcaagctctcccaggagtatgagtccatcgaccctggacagcagttcacatgggaacattccaacctggaagtgaacaagccgaagaaccgctatgccaacgtcatcgcctatgaccactcccgtgtcatcctccagcccattgaaggcatcatgggcagtgattacatcaatgccaactacgtggacggctaccggtgtcagaacgcgtacattgccacgcaggggccgctgcctgagacctttggggacttctggcgtatggtgtgggagcagcggtcggcgaccatcgtcatgatgacgcggctggaggagaagtcacggatcaagtgtgatcagtattggcccaacagaggcacggagacctacggcttcatccaggtcacgttgctagataccatcgagctggccacattctgcgtcaggacattctctctgcacaagaatggctccagtgagaaacgcgaggtccgccagttccagtttacggcgtggccggaccatggcgtgcccgaatacccaacgcccttcctggctttcctgcggagagtcaagacctgcaacccgccagatgccggccccatcgtggttcactgcagtgccggtgtgggccgcacaggctgctttatcgtcatcgacgccatgcttgagcggatcaagccagagaagacagtcgatgtctatggccacgtgacgctcatgaggtcccagcgcaactacatggtgcagacggaggaccagtacagcttcatccacgaggccctgctggaggccgtgggctgtggcaacacagaagtgcccgcacgcagcctctatgcctacatccagaagctggcccaggtggagcctggcgaacacgtcactggcatggaactcgagttcaagcggctggctaactccaaggcccacacgtcacgcttcatcagtgccaatctgccttgtaacaagttcaagaaccgcctggtgaacatcatgccctatgagagcacacgggtctgtctgcaacccatccggggtgtggagggctctgactacatcaacgccagcttcattgatggctacaggcagcagaaggcctacatcgcgacacaggggccgctggcggagaccacggaagacttctggcgcatgctgtgggagaacaattcgacgatcgtggtgatgctgaccaagctgcgggagatgggccgggagaagtgtcaccagtactggccggccgagcgctctgcccgctaccagtactttgtggtagatccgatggcagaatacaacatgcctcagtatatcctgcgagagttcaaggtcacagatgcccgggatggccagtcccggactgtccggcagttccagttcacagactggccggaacagggtgtgccaaagtcgggggagggcttcatcgacttcattggccaagtgcataagactaaggagcagtttggccaggacggccccatctctgtccactgcagtgccggcgtgggcaggacgggcgtcttcatcacgcttagcatcgtgctggagcggatgcggtatgaaggcgtggtggacatctttcagacggtgaagatgctacgaacccagcggccggccatggtgcagacagaggatgagtaccagttctgttaccaggcggcactggagtacctcggaagctttgaccactatgcaacctaaagccatggttccccccaggcccgacaccactggccccggatgcctctgcccctcccgggcggacctcctgaggcctggacccccagtgggcagggcaggaggtggcagcggcagcagctgtgtttctgcaccatttccgaggacgacgcagcccctcgagcccccccaccggccccggccgccccagcgacctccctggcaccggccgccgccttcaaatacttggcacattcctcctttccttccaattccaaaaccagattccggggtggggggtggggggatggtgagcaaataggagtgctccccagaaccagaggagggtggggcacagaccatagacggacccctcgtcctcccccagcggtggtagggggacccggggggctcctccccgctctgcagcctggggacactgggctgggaccagaatccagctttcttttaaaactctcagtgtaactgtatcccgtgacatttcattttttttaaatagtgtatttttttttccatttttttttttaagagaaacaaacaaaagactcgccagtcaatgactttcaaagagaactaactttggcttattcatattctgttcaaagacagtctattttttcactgtagaaagcgtccttgtgtgatagttacgttcgcaaacgcgcacgccaggcccatggctgtaccttggcttttttttttttttttttttttttaatttttcctaccatcagaaagtgtgctttgctcacagaagaatgggatgtccttttttctttcttggctttttttttccccctttttgtttcatttttataaattaaattttcagacatatcaaatacagttctgagggtaaggtcatgggggagctcggacccagtggcgttgggtgcggttgagggggacgctgctgtaagaggagagagatgacagtggtcctcctctgagagcctgagctgtctccccgtctcccgcccccaaggagacagagaggatcctacttcttcggggacagtggctgtatggctgtgctgccccacatcagggaccctttccccctgggactgtggggcagtttgggagcaaaaccagaaggacaggcccccctctacccgcctaccctgagcaagcgagttgttcctctttgtacaagggcaggtctgcggttactttcaacactgtttattccagcggaagcagccgggtggttttcccacccccgtgtatgtagatatatcgactttgtattaaaggaagatcgtctga

SEQ ID NO: 24739 - DNA, 7347 bp, Homo sapiens
  source 1..7347: mol_type = unassigned DNA
cctcgcgccgcccgcccggcagcccggccggcgcgcgcacgccgcgagccgctggcgctcgggctccgctcggatcccatgcaacagccacgatgtgaagcggggcagagccgggggagcccagcccagccagcctccagacgttgccccatctgacgctcggctcgaggcctctctgtgagggaccggggggccatccccctccagggcggagatcggaggtcgctgccaagcatggcgcccacctggggccctggcatggtgtctgtggttggtcccatgggcctccttgtggtcctgctcgttggaggctgtgcagcagaagagccccccaggtttatcaaagaacccaaggaccagatcggcgtgtcggggggtgtggcctctttcgtgtgtcaggccacgggtgaccccaagccacgagtgacctggaacaagaagggcaagaaggtcaactctcagcgctttgagacgattgagtttgatgagagtgcaggggcagtgctgaggatccagccgctgaggacaccgcgggatgaaaacgtgtacgagtgtgtggcccagaactcggttggggagatcacagtccatgccaagcttactgtcctccgagaggaccagctgccctctggcttccccaacatcgacatgggcccacagttgaaggtggtggagcggacacggacagccaccatgctctgtgcagccagcggcaaccctgaccctgagatcacctggttcaaggacttcctgcctgtggatcctagtgccagcaatggacgcatcaaacagctgcgatcagaaacctttgaaagcactccgattcgaggagccctgcagattgaaagcagtgaggaaaccgaccagggcaaatatgagtgtgtggccaccaacagcgccggcgtgcgctactcctcacctgccaacctctacgtgcgagagcttcgagaagtccgccgcgtggccccgcgcttctccatcctgcccatgagccacgagatcatgccagggggcaacgtgaacatcacctgcgtggccgtgggctcgcccatgccatacgtgaagtggatgcagggggccgaggacctgacccccgaggatgacatgcccgtgggtcggaacgtgctggaactcacagatgtcaaggactcggccaactacacctgcgtggccatgtccagcctgggcgtcattgaggcggttgctcagatcacggtgaaatctctccccaaagctcccgggactcccatggtgactgagaacacagccaccagcatcaccatcacgtgggactcgggcaacccagatcctgtgtcctattacgtcatcgaatataaatccaagagccaagacgggccgtatcagattaaagaggacatcaccaccacacgttacagcatcggcggcctgagccccaactcggagtacgagatctgggtgtcggccgtcaactccatcggccaggggccccccagcgagtccgtggtcacccgcacaggcgagcaggccccggccagcgcgccgcggaacgtgcaagcccggatgctcagcgcgaccaccatgattgtgcagtgggaggagccggtggagcccaacggcctgatccgcggctaccgcgtctactacaccatggaaccggagcaccccgtgggcaactggcagaagcacaacgtggacgacagcctgctgaccaccgtgggcagcctgctggaggacgagacctacaccgtgcgggtgctcgccttcacctccgtcggcgacgggcccctctcggaccccatccaggtcaagacgcagcagggagtgccgggccagcccatgaacctgcgggccgaggccaggtcggagaccagcatcacgctgtcctggagccccccgcggcaggagagtatcatcaagtacgagctcctcttccgggaaggcgaccatggccgggaggtgggaaggaccttcgacccgacgacttcctacgtggtggaggacctgaagcccaacacggagtacgccttccgcctggcggcccgctcgccgcagggcctgggcgccttcacccccgtggtgcggcagcgcacgctgcagtccaaaccgtcagccccccctcaagacgttaaatgtgtcagcgtgcgctccacggccattttggtaagttggcgcccgccgccgccggaaacgcacaacggggccctggtgggctacagcgtccgctaccgaccgctgggctcagaggacccggaacccaaggaggtgaacggcatccccccgaccaccactcagatcctgctggaggccttggagaagtggacccagtaccgcatcacgactgtcgctcacacagaggtgggaccagggcccgagagctcgcccgtggtcgtccgcaccgacgaggatgtgcccagcgcgccgccgcggaaggtggaggcggaggcgctcaacgccacggccatccgcgtgctgtggcgctcgcccgcgcccggccggcagcacggccagatccgcggctaccaggtccactacgtgcgcatggagggcgccgaggcccgcgggccgccgcgcatcaaggacgtcatgctggccgatgcccagtgggagacggatgacacggccgaatatgagatggtcatcacaaacttgcagcctgagaccgcgtactccatcacggtagccgcctacaccatgaagggcgatggcgctcgcagcaaacccaaggtggttgtgaccaagggagcagtgctgggccgcccaaccctgtcggtgcagcagacccccgagggcagcctgctggcacgctgggagcccccggctggcaccgcggaggaccaggtgctgggctaccgcctgcagtttggccgtgaggactcgacgcccctggccaccctggagttcccgccctccgaggaccgctacacggcatcaggcgtgcacaagggggccacgtatgtgttccggcttgcggcccggagccgcggcggcctgggcgaggaggcagccgaggtcctgagcatcccggaggacacgccccgtggccacccgcagattctggaggcggccggcaacgcctcggccgggaccgtccttctccgctggctgccacccgtgcccgccgagcgcaacggggccatcgtcaaatacacggtggccgtgcgggaggccggtgccctgggccctgcccgagagactgagctgccggcagcggctgagccgggcgcggagaacgcgctcacgctgcagggcctgaagcccgacacggcctatgacctccaagtgcgagcccacacgcgccggggccctggccccttcagcccccccgtccgctaccggacgttcctgcgggaccaagtctcgcccaagaacttcaaggtgaaaatgatcatgaagacatcagttctgctcagctgggagttccctgacaactacaactcacccacaccctacaagatccagtacaatgggctcacactggatgtggatggccgtaccaccaagaagctcatcacgcacctcaagccccacaccttctacaactttgtgctgaccaatcgcggcagcagcctgggcggcctccagcagacggtcaccgcctggactgccttcaacctgctcaacggcaagcccagcgtcgcccccaagcctgatgctgacggcttcatcatggtgtatcttcctgacggccagagccccgtgcctgtccagagctatttcattgtgatggtgccactgcgcaagtctcgtggaggccaattcctgaccccgctgggtagcccagaggacatggatctggaagagctcatccaggacatctcacggctacagaggcgcagcctgcggcactcgcgtcagctggaggtgccccggccctatattgcagctcgcttctctgtgctgccacccacgttccatcccggcgaccagaagcagtatggcggcttcgataaccggggcctggagcccggccaccgctatgtcctcttcgtgcttgccgtgcttcagaagagcgagcctacctttgcagccagtcccttctcagaccccttccagctggataacccggacccccagcccatcgtggatggcgaggaggggcttatctgggtgatcgggcctgtgctggccgtggtcttcataatctgcattgtcattgctatcctgctctacaagaacaaacccgacagtaaacgcaaggactcagaaccccgcaccaaatgcctcctgaacaatgccgacctcgcccctcaccaccccaaggaccctgtggaaatgagacgcattaacttccagactccagattcaggcctcaggagccccctcagggagccggggtttcactttgaaagcatgcttagccacccgccaattcccatcgcagacatggcggagcacacggagcggctcaaggccaacgacagcctcaagctctcccaggagtatgagtccatcgaccctggacagcagttcacatgggaacattccaacctggaagtgaacaagccgaagaaccgctatgccaacgtcatcgcctatgaccactcccgtgtcatcctccagcccattgaaggcatcatgggcagtgattacatcaatgccaactacgtggacggctaccggtgtcagaacgcgtacattgccacgcaggggccgctgcctgagacctttggggacttctggcgtatggtgtgggagcagcggtcggcgaccatcgtcatgatgacgcggctggaggagaagtcacggatcaagtgtgatcagtattggcccaacagaggcacggagacctacggcttcatccaggtcacgttgctagataccatcgagctggccacattctgcgtcaggacattctctctgcacaagaatggctccagtgagaaacgcgaggtccgccagttccagtttacggcgtggccggaccatggcgtgcccgaatacccaacgcccttcctggctttcctgcggagagtcaagacctgcaacccgccagatgccggccccatcgtggttcactgcagtgccggtgtgggccgcacaggctgctttatcgtcatcgacgccatgcttgagcggatcaagccagagaagacagtcgatgtctatggccacgtgacgctcatgaggtcccagcgcaactacatggtgcagacggaggaccagtacagcttcatccacgaggccctgctggaggccgtgggctgtggcaacacagaagtgcccgcacgcagcctctatgcctacatccagaagctggcccaggtggagcctggcgaacacgtcactggcatggaactcgagttcaagcggctggctaactccaaggcccacacgtcacgcttcatcagtgccaatctgccttgtaacaagttcaagaaccgcctggtgaacatcatgccctatgagagcacacgggtctgtctgcaacccatccggggtgtggagggctctgactacatcaacgccagcttcattgatggctacaggcagcagaaggcctacatcgcgacacaggggccgctggcggagaccacggaagacttctggcgcatgctgtgggagaacaattcgacgatcgtggtgatgctgaccaagctgcgggagatgggccgggagaagtgtcaccagtactggccggccgagcgctctgcccgctaccagtactttgtggtagatccgatggcagaatacaacatgcctcagtatatcctgcgagagttcaaggtcacagatgcccgggatggccagtcccggactgtccggcagttccagttcacagactggccggaacagggtgtgccaaagtcgggggagggcttcatcgacttcattggccaagtgcataagactaaggagcagtttggccaggacggccccatctctgtccactgcagtgccggcgtgggcaggacgggcgtcttcatcacgcttagcatcgtgctggagcggatgcggtatgaaggcgtggtggacatctttcagacggtgaagatgctacgaacccagcggccggccatggtgcagacagaggatgagtaccagttctgttaccaggcggcactggagtacctcggaagctttgaccactatgcaacctaaagccatggttccccccaggcccgacaccactggccccggatgcctctgcccctcccgggcggacctcctgaggcctggacccccagtgggcagggcaggaggtggcagcggcagcagctgtgtttctgcaccatttccgaggacgacgcagcccctcgagcccccccaccggccccggccgccccagcgacctccctggcaccggccgccgccttcaaatacttggcacattcctcctttccttccaattccaaaaccagattccggggtggggggtggggggatggtgagcaaataggagtgctccccagaaccagaggagggtggggcacagaccatagacggacccctcgtcctcccccagcggtggtagggggacccggggggctcctccccgctctgcagcctggggacactgggctgggaccagaatccagctttcttttaaaactctcagtgtaactgtatcccgtgacatttcattttttttaaatagtgtatttttttttccatttttttttttaagagaaacaaacaaaagactcgccagtcaatgactttcaaagagaactaactttggcttattcatattctgttcaaagacagtctattttttcactgtagaaagcgtccttgtgtgatagttacgttcgcaaacgcgcacgccaggcccatggctgtaccttggcttttttttttttttttttttttttaatttttcctaccatcagaaagtgtgctttgctcacagaagaatgggatgtccttttttctttcttggctttttttttccccctttttgtttcatttttataaattaaattttcagacatatcaaatacagttctgagggtaaggtcatgggggagctcggacccagtggcgttgggtgcggttgagggggacgctgctgtaagaggagagagatgacagtggtcctcctctgagagcctgagctgtctccccgtctcccgcccccaaggagacagagaggatcctacttcttcggggacagtggctgtatggctgtgctgccccacatcagggaccctttccccctgggactgtggggcagtttgggagcaaaaccagaaggacaggcccccctctacccgcctaccctgagcaagcgagttgttcctctttgtacaagggcaggtctgcggttactttcaacactgtttattccagcggaagcagccgggtggttttcccacccccgtgtatgtagatatatcgactttgtattaaaggaagatcgtctga

SEQ ID NO: 24740 - DNA, 7350 bp, Homo sapiens
  source 1..7350: mol_type = unassigned DNA
cctcgcgccgcccgcccggcagcccggccggcgcgcgcacgccgcgagccgctggcgctcgggctccgctcggatcccatgcaacagccacgatgtgaagcggggcagagccgggggagcccagcccagccagcctccagacgttgccccatctgacgctcggctcgaggcctctctgtgagggaccggggggccatccccctccagggcggagatcggaggtcgctgccaagcatggcgcccacctggggccctggcatggtgtctgtggttggtcccatgggcctccttgtggtcctgctcgttggaggctgtgcagcagaagagccccccaggtttatcaaagaacccaaggaccagatcggcgtgtcggggggtgtggcctctttcgtgtgtcaggccacgggtgaccccaagccacgagtgacctggaacaagaagggcaagaaggtcaactctcagcgctttgagacgattgagtttgatgagagtgcaggggcagtgctgaggatccagccgctgaggacaccgcgggatgaaaacgtgtacgagtgtgtggcccagaactcggttggggagatcacagtccatgccaagcttactgtcctccgagaggaccagctgccctctggcttccccaacatcgacatgggcccacagttgaaggtggtggagcggacacggacagccaccatgctctgtgcagccagcggcaaccctgaccctgagatcacctggttcaaggacttcctgcctgtggatcctagtgccagcaatggacgcatcaaacagctgcgacgttcagaaacctttgaaagcactccgattcgaggagccctgcagattgaaagcagtgaggaaaccgaccagggcaaatatgagtgtgtggccaccaacagcgccggcgtgcgctactcctcacctgccaacctctacgtgcgagagcttcgagaagtccgccgcgtggccccgcgcttctccatcctgcccatgagccacgagatcatgccagggggcaacgtgaacatcacctgcgtggccgtgggctcgcccatgccatacgtgaagtggatgcagggggccgaggacctgacccccgaggatgacatgcccgtgggtcggaacgtgctggaactcacagatgtcaaggactcggccaactacacctgcgtggccatgtccagcctgggcgtcattgaggcggttgctcagatcacggtgaaatctctccccaaagctcccgggactcccatggtgactgagaacacagccaccagcatcaccatcacgtgggactcgggcaacccagatcctgtgtcctattacgtcatcgaatataaatccaagagccaagacgggccgtatcagattaaagaggacatcaccaccacacgttacagcatcggcggcctgagccccaactcggagtacgagatctgggtgtcggccgtcaactccatcggccaggggccccccagcgagtccgtggtcacccgcacaggcgagcaggccccggccagcgcgccgcggaacgtgcaagcccggatgctcagcgcgaccaccatgattgtgcagtgggaggagccggtggagcccaacggcctgatccgcggctaccgcgtctactacaccatggaaccggagcaccccgtgggcaactggcagaagcacaacgtggacgacagcctgctgaccaccgtgggcagcctgctggaggacgagacctacaccgtgcgggtgctcgccttcacctccgtcggcgacgggcccctctcggaccccatccaggtcaagacgcagcagggagtgccgggccagcccatgaacctgcgggccgaggccaggtcggagaccagcatcacgctgtcctggagccccccgcggcaggagagtatcatcaagtacgagctcctcttccgggaaggcgaccatggccgggaggtgggaaggaccttcgacccgacgacttcctacgtggtggaggacctgaagcccaacacggagtacgccttccgcctggcggcccgctcgccgcagggcctgggcgccttcacccccgtggtgcggcagcgcacgctgcagtccaaaccgtcagccccccctcaagacgttaaatgtgtcagcgtgcgctccacggccattttggtaagttggcgcccgccgccgccggaaacgcacaacggggccctggtgggctacagcgtccgctaccgaccgctgggctcagaggacccggaacccaaggaggtgaacggcatccccccgaccaccactcagatcctgctggaggccttggagaagtggacccagtaccgcatcacgactgtcgctcacacagaggtgggaccagggcccgagagctcgcccgtggtcgtccgcaccgacgaggatgtgcccagcgcgccgccgcggaaggtggaggcggaggcgctcaacgccacggccatccgcgtgctgtggcgctcgcccgcgcccggccggcagcacggccagatccgcggctaccaggtccactacgtgcgcatggagggcgccgaggcccgcgggccgccgcgcatcaaggacgtcatgctggccgatgcccagtgggagacggatgacacggccgaatatgagatggtcatcacaaacttgcagcctgagaccgcgtactccatcacggtagccgcctacaccatgaagggcgatggcgctcgcagcaaacccaaggtggttgtgaccaagggagcagtgctgggccgcccaaccctgtcggtgcagcagacccccgagggcagcctgctggcacgctgggagcccccggctggcaccgcggaggaccaggtgctgggctaccgcctgcagtttggccgtgaggactcgacgcccctggccaccctggagttcccgccctccgaggaccgctacacggcatcaggcgtgcacaagggggccacgtatgtgttccggcttgcggcccggagccgcggcggcctgggcgaggaggcagccgaggtcctgagcatcccggaggacacgccccgtggccacccgcagattctggaggcggccggcaacgcctcggccgggaccgtccttctccgctggctgccacccgtgcccgccgagcgcaacggggccatcgtcaaatacacggtggccgtgcgggaggccggtgccctgggccctgcccgagagactgagctgccggcagcggctgagccgggcgcggagaacgcgctcacgctgcagggcctgaagcccgacacggcctatgacctccaagtgcgagcccacacgcgccggggccctggccccttcagcccccccgtccgctaccggacgttcctgcgggaccaagtctcgcccaagaacttcaaggtgaaaatgatcatgaagacatcagttctgctcagctgggagttccctgacaactacaactcacccacaccctacaagatccagtacaatgggctcacactggatgtggatggccgtaccaccaagaagctcatcacgcacctcaagccccacaccttctacaactttgtgctgaccaatcgcggcagcagcctgggcggcctccagcagacggtcaccgcctggactgccttcaacctgctcaacggcaagcccagcgtcgcccccaagcctgatgctgacggcttcatcatggtgtatcttcctgacggccagagccccgtgcctgtccagagctatttcattgtgatggtgccactgcgcaagtctcgtggaggccaattcctgaccccgctgggtagcccagaggacatggatctggaagagctcatccaggacatctcacggctacagaggcgcagcctgcggcactcgcgtcagctggaggtgccccggccctatattgcagctcgcttctctgtgctgccacccacgttccatcccggcgaccagaagcagtatggcggcttcgataaccggggcctggagcccggccaccgctatgtcctcttcgtgcttgccgtgcttcagaagagcgagcctacctttgcagccagtcccttctcagaccccttccagctggataacccggacccccagcccatcgtggatggcgaggaggggcttatctgggtgatcgggcctgtgctggccgtggtcttcataatctgcattgtcattgctatcctgctctacaagaagaagccccatagtaaacgcaaggactcagaaccccgcaccaaatgcctcctgaacaatgccgacctcgcccctcaccaccccaaggaccctgtggaaatgagacgcattaacttccagactccagattcaggcctcaggagccccctcagggagccggggtttcactttgaaagcatgcttagccacccgccaattcccatcgcagacatggcggagcacacggagcggctcaaggccaacgacagcctcaagctctcccaggagtatgagtccatcgaccctggacagcagttcacatgggaacattccaacctggaagtgaacaagccgaagaaccgctatgccaacgtcatcgcctatgaccactcccgtgtcatcctccagcccattgaaggcatcatgggcagtgattacatcaatgccaactacgtggacggctaccggtgtcagaacgcgtacattgccacgcaggggccgctgcctgagacctttggggacttctggcgtatggtgtgggagcagcggtcggcgaccatcgtcatgatgacgcggctggaggagaagtcacggatcaagtgtgatcagtattggcccaacagaggcacggagacctacggcttcatccaggtcacgttgctagataccatcgagctggccacattctgcgtcaggacattctctctgcacaagaatggctccagtgagaaacgcgaggtccgccagttccagtttacggcgtggccggaccatggcgtgcccgaatacccaacgcccttcctggctttcctgcggagagtcaagacctgcaacccgccagatgccggccccatcgtggttcactgcagtgccggtgtgggccgcacaggctgctttatcgtcatcgacgccatgcttgagcggatcaagccagagaagacagtcgatgtctatggccacgtgacgctcatgaggtcccagcgcaactacatggtgcagacggaggaccagtacagcttcatccacgaggccctgctggaggccgtgggctgtggcaacacagaagtgcccgcacgcagcctctatgcctacatccagaagctggcccaggtggagcctggcgaacacgtcactggcatggaactcgagttcaagcggctggctaactccaaggcccacacgtcacgcttcatcagtgccaatctgccttgtaacaagttcaagaaccgcctggtgaacatcatgccctatgagagcacacgggtctgtctgcaacccatccggggtgtggagggctctgactacatcaacgccagcttcattgatggctacaggcagcagaaggcctacatcgcgacacaggggccgctggcggagaccacggaagacttctggcgcatgctgtgggagaacaattcgacgatcgtggtgatgctgaccaagctgcgggagatgggccgggagaagtgtcaccagtactggccggccgagcgctctgcccgctaccagtactttgtggtagatccgatggcagaatacaacatgcctcagtatatcctgcgagagttcaaggtcacagatgcccgggatggccagtcccggactgtccggcagttccagttcacagactggccggaacagggtgtgccaaagtcgggggagggcttcatcgacttcattggccaagtgcataagactaaggagcagtttggccaggacggccccatctctgtccactgcagtgccggcgtgggcaggacgggcgtcttcatcacgcttagcatcgtgctggagcggatgcggtatgaaggcgtggtggacatctttcagacggtgaagatgctacgaacccagcggccggccatggtgcagacagaggatgagtaccagttctgttaccaggcggcactggagtacctcggaagctttgaccactatgcaacctaaagccatggttccccccaggcccgacaccactggccccggatgcctctgcccctcccgggcggacctcctgaggcctggacccccagtgggcagggcaggaggtggcagcggcagcagctgtgtttctgcaccatttccgaggacgacgcagcccctcgagcccccccaccggccccggccgccccagcgacctccctggcaccggccgccgccttcaaatacttggcacattcctcctttccttccaattccaaaaccagattccggggtggggggtggggggatggtgagcaaataggagtgctccccagaaccagaggagggtggggcacagaccatagacggacccctcgtcctcccccagcggtggtagggggacccggggggctcctccccgctctgcagcctggggacactgggctgggaccagaatccagctttcttttaaaactctcagtgtaactgtatcccgtgacatttcattttttttaaatagtgtatttttttttccatttttttttttaagagaaacaaacaaaagactcgccagtcaatgactttcaaagagaactaactttggcttattcatattctgttcaaagacagtctattttttcactgtagaaagcgtccttgtgtgatagttacgttcgcaaacgcgcacgccaggcccatggctgtaccttggcttttttttttttttttttttttttaatttttcctaccatcagaaagtgtgctttgctcacagaagaatgggatgtccttttttctttcttggctttttttttccccctttttgtttcatttttataaattaaattttcagacatatcaaatacagttctgagggtaaggtcatgggggagctcggacccagtggcgttgggtgcggttgagggggacgctgctgtaagaggagagagatgacagtggtcctcctctgagagcctgagctgtctccccgtctcccgcccccaaggagacagagaggatcctacttcttcggggacagtggctgtatggctgtgctgccccacatcagggaccctttccccctgggactgtggggcagtttgggagcaaaaccagaaggacaggcccccctctacccgcctaccctgagcaagcgagttgttcctctttgtacaagggcaggtctgcggttactttcaacactgtttattccagcggaagcagccgggtggttttcccacccccgtgtatgtagatatatcgactttgtattaaaggaagatcgtctga

SEQ ID NO: 24741 - DNA, 4836 bp, Homo sapiens
  source 1..4836: mol_type = unassigned DNA
cctcgcgccgcccgcccggcagcccggccggcgcgcgcacgccgcgagccgctggcgctcgggctccgctcggatcccatgcaacagccacgatgtgaagcggggcagagccgggggagcccagcccagccagcctccagacgttgccccatctgacgctcggctcgaggcctctctgtgagggaccggggggccatccccctccagggcggagatcggaggtcgctgccaagcatggcgcccacctggggccctggcatggtgtctgtggttggtcccatgggcctccttgtggtcctgctcgttggaggctgtgcagcagaagagccccccaggtttatcaaagaacccaaggaccagatcggcgtgtcggggggtgtggcctctttcgtgtgtcaggccacgggtgaccccaagccacgagtgacctggaacaagaagggcaagaaggtcaactctcagcgctttgagacgattgagtttgatgagagtgcaggggcagtgctgaggatccagccgctgaggacaccgcgggatgaaaacgtgtacgagtgtgtggcccagaactcggttggggagatcacagtccatgccaagcttactgtcctccgagaggaccagctgccctctggcttccccaacatcgacatgggcccacagttgaaggtggtggagcggacacggacagccaccatgctctgtgcagccagcggcaaccctgaccctgagatcacctggttcaaggacttcctgcctgtggatcctagtgccagcaatggacgcatcaaacagctgcgatcaggagccctgcagattgaaagcagtgaggaaaccgaccagggcaaatatgagtgtgtggccaccaacagcgccggcgtgcgctactcctcacctgccaacctctacgtgcgagtccgccgcgtggccccgcgcttctccatcctgcccatgagccacgagatcatgccagggggcaacgtgaacatcacctgcgtggccgtgggctcgcccatgccatacgtgaagtggatgcagggggccgaggacctgacccccgaggatgacatgcccgtgggtcggaacgtgctggaactcacagatgtcaaggactcggccaactacacctgcgtggccatgtccagcctgggcgtcattgaggcggttgctcagatcacggtgaaatctctccccaaagctcccgggactcccatggtgactgagaacacagccaccagcatcaccatcacgtgggactcgggcaacccagatcctgtgtcctattacgtcatcgaatataaatccaagagccaagacgggccgtatcagattaaagaggacatcaccaccacacgttacagcatcggcggcctgagccccaactcggagtacgagatctgggtgtcggccgtcaactccatcggccaggggccccccagcgagtccgtggtcacccgcacaggcgagcaggccccggccagcgcgccgcggaacgtgcaagcccggatgctcagcgcgaccaccatgattgtgcagtgggaggagccggtggagcccaacggcctgatccgcggctaccgcgtctactacaccatggaaccggagcaccccgtgggcaactggcagaagcacaacgtggacgacagcctgctgaccaccgtgggcagcctgctggaggacgagacctacaccgtgcgggtgctcgccttcacctccgtcggcgacgggcccctctcggaccccatccaggtcaagacgcagcagggagtgccgggccagcccatgaacctgcgggccgaggccaggtcggagaccagcatcacgctgtcctggagccccccgcggcaggagagtatcatcaagtacgagctcctcttccgggaaggcgaccatggccgggaggtgggaaggaccttcgacccgacgacttcctacgtggtggaggacctgaagcccaacacggagtacgccttccgcctggcggcccgctcgccgcagggcctgggcgccttcacccccgtggtgcggcagcgcacgctgcagtccatctcgcccaagaacttcaaggtgaaaatgatcatgaagacatcagttctgctcagctgggagttccctgacaactacaactcacccacaccctacaagatccagtacaatgggctcacactggatgtggatggccgtaccaccaagaagctcatcacgcacctcaagccccacaccttctacaactttgtgctgaccaatcgcggcagcagcctgggcggcctccagcagacggtcaccgcctggactgccttcaacctgctcaacggcaagcccagcgtcgcccccaagcctgatgctgacggcttcatcatggtgtatcttcctgacggccagagccccgtgcctgtccagagctatttcattgtgatggtgccactgcgcaagtctcgtggaggccaattcctgaccccgctgggtagcccagaggacatggatctggaagagctcatccaggacatctcacggctacagaggcgcagcctgcggcactcgcgtcagctggaggtgccccggccctatattgcagctcgcttctctgtgctgccacccacgttccatcccggcgaccagaagcagtatggcggcttcgataaccggggcctggagcccggccaccgctatgtcctcttcgtgcttgccgtgcttcagaagagcgagcctacctttgcagccagtcccttctcagaccccttccagctggataacccggacccccagcccatcgtggatggcgaggaggggcttatctgggtgatcgggcctgtgctggccgtggtcttcataatctgcattgtcattgctatcctgctctacaagaacaaacccgacagtaaacgcaaggactcagaaccccgcaccaaatgcctcctgaacaatgccgacctcgcccctcaccaccccaaggaccctgtggaaatgagacgcattaacttccagactccagattcaggcctcaggagccccctcagggagccggggtttcactttgaaagcatgcttagccacccgccaattcccatcgcagacatggcggagcacacggagcggctcaaggccaacgacagcctcaagctctcccaggagtatgagtccatcgaccctggacagcagttcacatgggaacattccaacctggaagtgaacaagccgaagaaccgctatgccaacgtcatcgcctatgaccactcccgtgtcatcctccagcccattgaaggcatcatgggcagtgattacatcaatgccaactacgtggacggctaccggtgtcagaacgcgtacattgccacgcaggggccgctgcctgagacctttggggacttctggcgtatggtgtgggagcagcggtcggcgaccatcgtcatgatgacgcggctggaggagaagtcacggatcaagtgtgatcagtattggcccaacagaggcacggagacctacggcttcatccaggtcacgttgctagataccatcgagctggccacattctgcgtcaggacattctctctgcacaagaatggctccagtgagaaacgcgaggtccgccagttccagtttacggcgtggccggaccatggcgtgcccgaatacccaacgcccttcctggctttcctgcggagagtcaagacctgcaacccgccagatgccggccccatcgtggttcactgcagtgccggtgtgggccgcacaggctgctttatcgtcatcgacgccatgcttgagcggatcaagccagagaagacagtcgatgtctatggccacgtgacgctcatgaggtcccagcgcaactacatggtgcagacggaggaccagtacagcttcatccacgaggccctgctggaggccgtgggctgtggcaacacagaagtgcccgcacgcagcctctatgcctacatccagaagctggcccaggtggagcctggcgaacacgtcactggcatggaactcgagttcaagcggctggctaactccaaggcccacacgtcacgcttcatcagtgccaatctgccttgtaacaagttcaagaaccgcctggtgaacatcatgccctatgagagcacacgggtctgtctgcaacccatccggggtgtggagggctctgactacatcaacgccagcttcattgatggctacaggcagcagaaggcctacatcgcgacacaggggccgctggcggagaccacggaagacttctggcgcatgctgtgggagaacaattcgacgatcgtggtgatgctgaccaagctgcgggagatgggccgggagaagtgtcaccagtactggccggccgagcgctctgcccgctaccagtactttgtggtagatccgatggcagaatacaacatgcctcagtatatcctgcgagagttcaaggtcacagatgcccgggatggccagtcccggactgtccggcagttccagttcacagactggccggaacagggtgtgccaaagtcgggggagggcttcatcgacttcattggccaagtgcataagactaaggagcagtttggccaggacggccccatctctgtccactgcagtgccggcgtgggcaggacgggcgtcttcatcacgcttagcatcgtgctggagcggatgcggtatgaaggcgtggtggacatctttcagacggtgaagatgctacgaacccagcggccggccatggtgcagacagagacggagtctcgcccaggctggagtgcagtggctcaatctcggctcactgcaagctccgcctcctggattcacgccattctcctgcctcagcctcccgagtggctgggactacaggtg

SEQ ID NO: 24742 - DNA, 6018 bp, Homo sapiens
  source 1..6018: mol_type = unassigned DNA
cctcgcgccgcccgcccggcagcccggccggcgcgcgcacgccgcgagccgctggcgctcgggctccgctcggatcccatgcaacagccacgatgtgaagcggggcagagccgggggagcccagcccagccagcctccagacgttgccccatctgacgctcggctcgaggcctctctgtgagggaccggggggccatccccctccagggcggagatcggaggtcgctgccaagcatggcgcccacctggggccctggcatggtgtctgtggttggtcccatgggcctccttgtggtcctgctcgttggaggctgtgcagcagaagagccccccaggtttatcaaagaacccaaggaccagatcggcgtgtcggggggtgtggcctctttcgtgtgtcaggccacgggtgaccccaagccacgagtgacctggaacaagaagggcaagaaggtcaactctcagcgctttgagacgattgagtttgatgagagtgcaggggcagtgctgaggatccagccgctgaggacaccgcgggatgaaaacgtgtacgagtgtgtggcccagaactcggttggggagatcacagtccatgccaagcttactgtcctccgagaggaccagctgccctctggcttccccaacatcgacatgggcccacagttgaaggtggtggagcggacacggacagccaccatgctctgtgcagccagcggcaaccctgaccctgagatcacctggttcaaggacttcctgcctgtggatcctagtgccagcaatggacgcatcaaacagctgcgatcaggagccctgcagattgaaagcagtgaggaaaccgaccagggcaaatatgagtgtgtggccaccaacagcgccggcgtgcgctactcctcacctgccaacctctacgtgcgagctctccgagaagtccgccgcgtggccccgcgcttctccatcctgcccatgagccacgagatcatgccagggggcaacgtgaacatcacctgcgtggccgtgggctcgcccatgccatacgtgaagtggatgcagggggccgaggacctgacccccgaggatgacatgcccgtgggtcggaacgtgctggaactcacagatgtcaaggactcggccaactacacctgcgtggccatgtccagcctgggcgtcattgaggcggttgctcagatcacggtgaaatctctccccaaagctcccgggactcccatggtgactgagaacacagccaccagcatcaccatcacgtgggactcgggcaacccagatcctgtgtcctattacgtcatcgaatataaatccaagagccaagacgggccgtatcagattaaagaggacatcaccaccacacgttacagcatcggcggcctgagccccaactcggagtacgagatctgggtgtcggccgtcaactccatcggccaggggccccccagcgagtccgtggtcacccgcacaggcgagcaggccccggccagcgcgccgcggaacgtgcaagcccggatgctcagcgcgaccaccatgattgtgcagtgggaggagccggtggagcccaacggcctgatccgcggctaccgcgtctactacaccatggaaccggagcaccccgtgggcaactggcagaagcacaacgtggacgacagcctgctgaccaccgtgggcagcctgctggaggacgagacctacaccgtgcgggtgctcgccttcacctccgtcggcgacgggcccctctcggaccccatccaggtcaagacgcagcagggagtgccgggccagcccatgaacctgcgggccgaggccaggtcggagaccagcatcacgctgtcctggagccccccgcggcaggagagtatcatcaagtacgagctcctcttccgggaaggcgaccatggccgggaggtgggaaggaccttcgacccgacgacttcctacgtggtggaggacctgaagcccaacacggagtacgccttccgcctggcggcccgctcgccgcagggcctgggcgccttcacccccgtggtgcggcagcgcacgctgcagtccatctcgcccaagaacttcaaggtgaaaatgatcatgaagacatcagttctgctcagctgggagttccctgacaactacaactcacccacaccctacaagatccagtacaatgggctcacactggatgtggatggccgtaccaccaagaagctcatcacgcacctcaagccccacaccttctacaactttgtgctgaccaatcgcggcagcagcctgggcggcctccagcagacggtcaccgcctggactgccttcaacctgctcaacggcaagcccagcgtcgcccccaagcctgatgctgacggcttcatcatggtgtatcttcctgacggccagagccccgtgcctgtccagagctatttcattgtgatggtgccactgcgcaagtctcgtggaggccaattcctgaccccgctgggtagcccagaggacatggatctggaagagctcatccaggacatctcacggctacagaggcgcagcctgcggcactcgcgtcagctggaggtgccccggccctatattgcagctcgcttctctgtgctgccacccacgttccatcccggcgaccagaagcagtatggcggcttcgataaccggggcctggagcccggccaccgctatgtcctcttcgtgcttgccgtgcttcagaagagcgagcctacctttgcagccagtcccttctcagaccccttccagctggataacccggacccccagcccatcgtggatggcgaggaggggcttatctgggtgatcgggcctgtgctggccgtggtcttcataatctgcattgtcattgctatcctgctctacaagaacaaacccgacagtaaacgcaaggactcagaaccccgcaccaaatgcctcctgaacaatgccgacctcgcccctcaccaccccaaggaccctgtggaaatgagacgcattaacttccagactccaggcatgcttagccacccgccaattcccatcgcagacatggcggagcacacggagcggctcaaggccaacgacagcctcaagctctcccaggagtatgagtccatcgaccctggacagcagttcacatgggaacattccaacctggaagtgaacaagccgaagaaccgctatgccaacgtcatcgcctatgaccactcccgtgtcatcctccagcccattgaaggcatcatgggcagtgattacatcaatgccaactacgtggacggctaccggtgtcagaacgcgtacattgccacgcaggggccgctgcctgagacctttggggacttctggcgtatggtgtgggagcagcggtcggcgaccatcgtcatgatgacgcggctggaggagaagtcacggatcaagtgtgatcagtattggcccaacagaggcacggagacctacggcttcatccaggtcacgttgctagataccatcgagctggccacattctgcgtcaggacattctctctgcacaagaatggctccagtgagaaacgcgaggtccgccagttccagtttacggcgtggccggaccatggcgtgcccgaatacccaacgcccttcctggctttcctgcggagagtcaagacctgcaacccgccagatgccggccccatcgtggttcactgcagtgccggtgtgggccgcacaggctgctttatcgtcatcgacgccatgcttgagcggatcaagccagagaagacagtcgatgtctatggccacgtgacgctcatgaggtcccagcgcaactacatggtgcagacggaggaccagtacagcttcatccacgaggccctgctggaggccgtgggctgtggcaacacagaagtgcccgcacgcagcctctatgcctacatccagaagctggcccaggtggagcctggcgaacacgtcactggcatggaactcgagttcaagcggctggctaactccaaggcccacacgtcacgcttcatcagtgccaatctgccttgtaacaagttcaagaaccgcctggtgaacatcatgccctatgagagcacacgggtctgtctgcaacccatccggggtgtggagggctctgactacatcaacgccagcttcattgatggctacaggcagcagaaggcctacatcgcgacacaggggccgctggcggagaccacggaagacttctggcgcatgctgtgggagaacaattcgacgatcgtggtgatgctgaccaagctgcgggagatgggccgggagaagtgtcaccagtactggccggccgagcgctctgcccgctaccagtactttgtggtagatccgatggcagaatacaacatgcctcagtatatcctgcgagagttcaaggtcacagatgcccgggatggccagtcccggactgtccggcagttccagttcacagactggccggaacagggtgtgccaaagtcgggggagggcttcatcgacttcattggccaagtgcataagactaaggagcagtttggccaggacggccccatctctgtccactgcagtgccggcgtgggcaggacgggcgtcttcatcacgcttagcatcgtgctggagcggatgcggtatgaaggcgtggtggacatctttcagacggtgaagatgctacgaacccagcggccggccatggtgcagacagaggatgagtaccagttctgttaccaggcggcactggagtacctcggaagctttgaccactatgcaacctaaagccatggttccccccaggcccgacaccactggccccggatgcctctgcccctcccgggcggacctcctgaggcctggacccccagtgggcagggcaggaggtggcagcggcagcagctgtgtttctgcaccatttccgaggacgacgcagcccctcgagcccccccaccggccccggccgccccagcgacctccctggcaccggccgccgccttcaaatacttggcacattcctcctttccttccaattccaaaaccagattccggggtggggggtggggggatggtgagcaaataggagtgctccccagaaccagaggagggtggggcacagaccatagacggacccctcgtcctcccccagcggtggtagggggacccggggggctcctccccgctctgcagcctggggacactgggctgggaccagaatccagctttcttttaaaactctcagtgtaactgtatcccgtgacatttcattttttttaaatagtgtatttttttttccatttttttttttaagagaaacaaacaaaagactcgccagtcaatgactttcaaagagaactaactttggcttattcatattctgttcaaagacagtctattttttcactgtagaaagcgtccttgtgtgatagttacgttcgcaaacgcgcacgccaggcccatggctgtaccttggcttttttttttttttttttttttttaatttttcctaccatcagaaagtgtgctttgctcacagaagaatgggatgtccttttttctttcttggctttttttttccccctttttgtttcatttttataaattaaattttcagacatatcaaatacagttctgagggtaaggtcatgggggagctcggacccagtggcgttgggtgcggttgagggggacgctgctgtaagaggagagagatgacagtggtcctcctctgagagcctgagctgtctccccgtctcccgcccccaaggagacagagaggatcctacttcttcggggacagtggctgtatggctgtgctgccccacatcagggaccctttccccctgggactgtggggcagtttgggagcaaaaccagaaggacaggcccccctctacccgcctaccctgagcaagcgagttgttcctctttgtacaagggcaggtctgcggttactttcaacactgtttattccagcggaagcagccgggtggttttcccacccccgtgtatgtagatatatcgactttgtattaaaggaagatcgtctga

SEQ ID NO: 24743 - DNA, 5579 bp, Homo sapiens
  source 1..5579: mol_type = unassigned DNA
gccgcgccgctccgctccggctcgggctccggctcgcctcgggctgggctcgggctccgggggcggcgtcccccgcgccgggccccgggacgggcggcgacgctccaaccatggcccgtgcccaggcgctcgtgctggcactcaccttccagctctgcgcgccggagaccgagactccggcagctggctgcaccttcgaggaggcaagtgacccagcagtgccctgcgagtacagccaggcccagtacgatgacttccagtgggagcaagtgcgaatccaccctggcacccgggcacctgcggacctgccccacggctcctacttgatggtcaacacttcccagcatgccccaggccagcgagcccatgtcatcttccagagcctgagcgagaatgatacccactgtgtgcagttcagctacttcctgtacagccgggacgggcacagcccgggcaccctgggcgtctacgtgcgcgttaatgggggccccctgggcagtgctgtgtggaatatgactggatcccacggccgtcagtggcaccaggctgagctggctgtcagcactttctggcccaatgaatatcaggtgctgtttgaggccctcatctccccagaccgcaggggctacatgggcctagatgacatcctgcttctcagctacccctgcgcaaaggccccacacttctcccgcctgggcgacgtggaggtcaacgcgggccagaacgcgtcgttccagtgcatggccgcgggcagagcggccgaggccgaacgcttcctcttgcaacggcagagcggggcgctggtgccggcggcgggcgtgcggcacatcagccaccggcgcttcctggccactttcccgctggctgccgtgagccgcgccgagcaggacctgtaccgctgtgtgtcccaggccccgcgcggcgcgggcgtctctaacttcgcggagctcatcgtcaaggagcccccaactcccatcgcgcccccacagctgctgcgtgctggccccacctacctcatcatccagctcaacaccaactccatcattggcgacgggccgatcgtgcgcaaggagattgagtaccgcatggcgcgcgggccctgggctgaggtgcacgccgtcagcctgcagacctacaagctgtggcacctcgaccccgacacagagtatgagatcagcgtgctgctcacgcgtcccggagacggcggcactggccgccctgggccacccctcatcagccgcaccaaatgcgcagagcccatgagggcccccaaaggcctggcttttgctgagatccaggcccgtcagctgaccctgcagtgggaaccactgggctacaacgtgacgcgttgccacacctatactgtgtcgctgtgctatcactacaccctgggcagcagccacaaccagaccatccgagagtgtgtgaagacagagcaaggtgtcagccgctacaccatcaagaacctgctgccctatcggaacgttcacgtgaggcttgtcctcactaaccctgaggggcgcaaagagggcaaggaggtcactttccagacggatgaggatgtgcccagtgggattgcagccgagtccctgaccttcactccactggaggacatgatcttcctcaagtgggaggagccccaggagcccaatggtctcatcacccagtatgagatcagctaccagagcatcgagtcatcagacccggcagtgaacgtgccaggcccacgacgtaccatctccaagctccgcaatgagacctaccatgtcttctccaacctgcacccaggcaccacctacctgttctccgtgcgggcccgcacaggcaaaggcttcggccaggcggcactcactgagataaccactaacatctctgctcccagctttgattatgccgacatgccgtcacccctgggcgagtctgagaacaccatcaccgtgctgctgaggccggcacagggccgcggtgcgcccatcagtgtgtaccaggtgattgtggaggaggagcgggcgcggaggctgcggcgggagccaggtggacaggactgcttcccagtgccattgaccttcgaggcggcgctggcccgaggcctggtgcactacttcggggccgaactggcggccagcagtctacctgaggccatgccctttaccgtgggtgacaaccagacctaccgaggcttctggaacccaccacttgagcctaggaaggcctatctcatctacttccaggcagcaagccacctgaagggggagacccggctgaattgcatccgcattgccaggaaagctgcctgcaaggaaagcaagcggcccctggaggtgtcccagagatcggaggagatggggcttatcctgggcatctgtgcaggggggcttgctgtcctcatccttctcctgggtgccatcattgtcatcatccgcaaagggaagccggtgaacatgaccaaggccaccgtcaactaccgccaggagaagacacacatgatgagcgccgtggaccgcagcttcacagaccagagcaccctgcaggaggacgagcggctgggcctgtccttcatggacacccatggctacagcacccggggagaccagcgcagcggtggggtcactgaggccagcagcctcctggggggctccccgaggcgtccctgtggccggaagggctccccataccacacggggcagctgcaccctgcggtgcgtgtcgcagaccttctgcagcacatcaaccagatgaagacggccgagggttacggcttcaagcaggagtatgagagcttctttgaaggctgggacgccacaaagaagaaagacaaggtcaagggcagccggcaggagccaatgcctgcctatgatcggcaccgagtgaaactgcacccgatgctgggagaccccaatgccgactacattaatgccaactacatagatctcagaggagggaggacaggttaccacaggtcaaaccacttcatagccactcaagggccgaagcctgagatggtctatgacttctggcgtatggtgtggcaggagcactgttccagcatcgtcatgatcaccaagctggtcgaggtgggcagggtgaaatgctcacggtactggccggaggactcagacacctacggggacatcaagattatgctggtgaagacagagaccctggctgagtatgtcgtgcgcacttttgccctggagcggagaggctactctgcccggcacgaggtccgccagttccacttcacagcgtggccagagcatggcgtcccctaccatgccacggggctgctggctttcatccggcgcgtgaaggcctccaccccacctgatgccgggcccattgtcatccactgcagcgcgggcaccggccgcacaggttgctatatcgtcctggatgtgatgctggacatggcagagtgtgagggcgtcgtggacatttacaactgtgtgaagactctctgctcccggcgtgtcaacatgatccagactgaggagcagtacatcttcattcatgatgcaatcctggaggcctgcctgtgtggggagaccaccatccctgtcagtgagttcaaggccacctacaaggagatgatccgcattgatcctcagagtaattcctcccagctgcgggaagagttccagacgctgaactcggtcaccccgccgctggacgtggaggagtgcagcatcgccctgttgccccggaaccgcgacaagaaccgcagcatggacgtcctgccgcccgaccgctgcctgcccttcctcatctccactgatggggactccaacaactacattaatgcagccctgactgacagctacacacggagtgcggccttcatcgtgaccctgcacccgctgcagagcaccacgcccgacttctggcggctggtctacgattacgggtgcacctccatcgtcatgctcaaccagctgaaccagtccaactccgcctggccctgcctgcagtactggccagagccaggccggcagcaatatggcctcatggaggtggagtttatgtcgggcacagctgatgaagacttagtggctcgagtcttccgggtgcagaacatctctcggttgcaggaggggcacctgctggtgcggcacttccagttcctgcgctggtctgcataccgggacacacctgactccaagaaggccttcttgcacctgctggctgaggtggacaagtggcaggccgagagtggggatgggcgcaccatcgtgcactgcctaaacgggggaggacgcagcggcaccttctgcgcctgcgccacggtcctggagatgatccgctgccacaacttggtggacgttttctttgctgccaaaaccctccggaactacaaacccaacatggtggagaccatggatcagtaccacttttgctacgatgtggccctggagtacttggaggggctggagtcaagatagcggggccctggcctggggcacccactgcacactcagggccagacccaccatcctggactggcgaggaagatcagtgcctcctgctctgcccaaacacactcccatggggcaagcactggagtggatgctgggctatcttgctcccccttccactgtgggcagggcctttcgcttgtcccatgggcgggtggtgggccaaggaggagcttagcaagtctgcagcccagccccacctccatagggtcctgcaggcctgtgctgagaggcctggtgctgcctggcagagtgacaaaggctcaggacggctggctctgggggactcaggccaagccccttggcaccatcctggcttttggcagggatgagtgaggccctgcagagagcatcccaggccaaggttcccactcagcctgccccctctgcatgtgggtagaggatgtactgggacttggcatttaggattccatctggcccagcccctgaaggtcctggggaagcaggtctcaattctgaatagccagtggggcacactgactgtcctccccaggggaactgcagcgccctcctccccactgccccctgcagcccctgagatattttgctcactatccctccccacttgcttccctgatatgtgctctgagcttccctgaaccaggatctgcctattactgctgtgccccatggggggctccttccctgcctgacccactgttgcagaatgaagtcacctcgcccccctcttcctttaatcttcaggcctcactggcctgtcctgctcagcttgggccagtgacaatctgcaaggctgaacaacagcccctggggttgaggcccctgtggctcctggtcaggctgcccgttgtggggaggggcagtgttagagcagggctggtcataccctctggagttcagaggaagaggtaggaccagtgcttttttgtttcttttgttatttttggttgggtgggtgggaaggtctctttaaaatggggcaggccacacccccattccgtgcctcaatttccccatctgtaaactgtagatatgactactgacctacctcgcagggggctgtggggaggcataagctgatgtttgtaaagcgctttgtaaataaacgtgctctctgaatgccac

SEQ ID NO: 24744 - DNA, 4470 bp, Homo sapiens
  source 1..4470: mol_type = unassigned DNA
ggcgccagtcccgctccgcgccgcgccgctccgctccggctcgggctccggctcgcctcgggctgggctcgggctccgggggcggcgtcccccgcgccgggccccgggacgggcggcgacgctccaaccatggcccgtgcccaggcgctcgtgctggcactcaccttccagctctgcgcgccggagaccgagactccggcagctggctgcaccttcgaggaggcaagtgacccagcagtgccctgcgagtacagccaggcccagtacgatgacttccagtgggagcaagtgcgaatccaccctggcacccgggcacctgcggacctgccccacggctcctacttgatggtcaacacttcccagcatgccccaggccagcgagcccatgtcatcttccagagcctgagcgagaatgatacccactgtgtgcagttcagctacttcctgtacagccgggacgggcacagcccgggcaccctgggcgtctacgtgcgcgttaatgggggccccctgggcagtgctgtgtggaatatgactggatcccacggccgtcagtggcaccaggctgagctggctgtcagcactttctggcccaatgaatatcaggtgctgtttgaggccctcatctccccagaccgcaggggctacatgggcctagatgacatcctgcttctcagctacccctgcgcaaaggccccacacttctcccgcctgggcgacgtggaggtcaacgcgggccagaacgcgtcgttccagtgcatggccgcgggcagagcggccgaggccgaacgcttcctcttgcaacggcagagcggggcgctggtgccggcggcgggcgtgcggcacatcagccaccggcgcttcctggccactttcccgctggctgccgtgagccgcgccgagcaggacctgtaccgctgtgtgtcccaggccccgcgcggcgcgggcgtctctaacttcgcggagctcatcgtcaaggagcccccaactcccatcgcgcccccacagctgctgcgtgctggccccacctacctcatcatccagctcaacaccaactccatcattggcgacgggccgatcgtgcgcaaggagattgagtaccgcatggcgcgcgggccctgggctgaggtgcacgccgtcagcctgcagacctacaagctgtggcacctcgaccccgacacagagtatgagatcagcgtgctgctcacgcgtcccggagacggcggcactggccgccctgggccacccctcatcagccgcaccaaatgcgcagagcccatgagggcccccaaaggcctggcttttgctgagatccaggcccgtcagctgaccctgcagtgggaaccactgggctacaacgtgacgcgttgccacacctatactgtgtcgctgtgctatcactacaccctgggcagcagccacaaccagaccatccgagagtgtgtgaagacagagcaaggtgtcagccgctacaccatcaagaacctgctgccctatcggaacgttcacgtgaggcttgtcctcactaaccctgaggggcgcaaagagggcaaggaggtcactttccagacggatgaggatgtgcccagtgggattgcagccgagtccctgaccttcactccactggaggacatgatcttcctcaagtgggaggagccccaggagcccaatggtctcatcacccagtatgagatcagctaccagagcatcgagtcatcagacccggcagtgaacgtgccaggcccacgacgtaccatctccaagctccgcaatgagacctaccatgtcttctccaacctgcacccaggcaccacctacctgttctccgtgcgggcccgcacaggcaaaggcttcggccaggcggcactcactgagataaccactaacatctctgctcccagctttgattatgccgacatgccgtcacccctgggcgagtctgagaacaccatcaccgtgctgctgaggccggcacagggccgcggtgcgcccatcagtgtgtaccaggtgattgtggaggaggagcgggcgcggaggctgcggcgggagccaggtggacaggactgcttcccagtgccattgaccttcgaggcggcgctggcccgaggcctggtgcactacttcggggccgaactggcggccagcagtctacctgaggccatgccctttaccgtgggtgacaaccagacctaccgaggcttctggaacccaccacttgagcctaggaaggcctatctcatctacttccaggcagcaagccacctgaagggggagacccggctgaattgcatccgcattgccaggaaagctgcctgcaaggaaagcaagcggcccctggaggtgtcccagagatcggaggagatggggcttatcctgggcatctgtgcaggggggcttgctgtcctcatccttctcctgggtgccatcattgtcatcatccgcaaagggagagaccactatgcctactcctactacccgaagccggtgaacatgaccaaggccaccgtcaactaccgccaggagaagacacacatgatgagcgccgtggaccgcagcttcacagaccagagcaccctgcaggaggacgagcggctgggcctgtccttcatggacacccatggctacagcacccggggagaccagcgcagcggtggggtcactgaggccagcagcctcctggggggctccccgaggcgtccctgtggccggaagggctccccataccacacggggcagctgcaccctgcggtgcgtgtcgcagaccttctgcagcacatcaaccagatgaagacggccgagggttacggcttcaagcaggagtatgagagcttctttgaaggctgggacgccacaaagaagaaagacaaggtcaagggcagccggcaggagccaatgcctgcctatgatcggcaccgagtgaaactgcacccgatgctgggagaccccaatgccgactacattaatgccaactacatagatggttaccacaggtcaaaccacttcatagccactcaagggccgaagcctgagatggtctatgacttctggcgtatggtgtggcaggagcactgttccagcatcgtcatgatcaccaagctggtcgaggtgggcagggtgaaatgctcacggtactggccggaggactcagacacctacggggacatcaagattatgctggtgaagacagagaccctggctgagtatgtcgtgcgcacttttgccctggagcggagaggctactctgcccggcacgaggtccgccagttccacttcacagcgtggccagagcatggcgtcccctaccatgccacggggctgctggctttcatccggcgcgtgaaggcctccaccccacctgatgccgggcccattgtcatccactgcagcgcgggcaccggccgcacaggttgctatatcgtcctggatgtgatgctggacatggcagagtgtgagggcgtcgtggacatttacaactgtgtgaagactctctgctcccggcgtgtcaacatgatccagactgaggagcagtacatcttcattcatgatgcaatcctggaggcctgcctgtgtggggagaccaccatccctgtcagtgagttcaaggccacctacaaggagatgatccgcattgatcctcagagtaattcctcccagctgcgggaagagttccagacgctgaactcggtcaccccgccgctggacgtggaggagtgcagcatcgccctgttgccccggaaccgcgacaagaaccgcagcatggacgtcctgccgcccgaccgctgcctgcccttcctcatctccactgatggggactccaacaactacattaatgcagccctgactgacagctacacacggagtgcggccttcatcgtgaccctgcacccgctgcagagcaccacgcccgacttctggcggctggtctacgattacgggtgcacctccatcgtcatgctcaaccagctgaaccagtccaactccgcctggccctgcctgcagtactggccagagccaggccggcagcaatatggcctcatggaggtggagtttatgtcgggcacagctgatgaagacttagtggctcgagtcttccgggtgcagaacatctctcggttgcaggaggggcacctgctggtgcggcacttccagttcctgcgctggtctgcataccgggacacacctgactccaagaaggccttcttgcacctgctggctgaggtggacaagtggcaggccgagagtggggatgggcgcaccatcgtgcactgcctaaacgggggaggacgcagcggcaccttctgcgcctgcgccacggtcctggagatgatccgctgccacaacttggtggacgttttctttgctgccaaaaccctccggaactacaaacccaacatggtggagaccatggatcagtaccacttttgctacgatgtggccctggagtacttggaggggctggagtcaagatag

SEQ ID NO: 24745 - DNA, 5579 bp, Homo sapiens
  source 1..5579: mol_type = unassigned DNA
gccgcgccgctccgctccggctcgggctccggctcgcctcgggctgggctcgggctccgggggcggcgtcccccgcgccgggccccgggacgggcggcgacgctccaaccatggcccgtgcccaggcgctcgtgctggcactcaccttccagctctgcgcgccggagaccgagactccggcagctggctgcaccttcgaggaggcaagtgacccagcagtgccctgcgagtacagccaggcccagtacgatgacttccagtgggagcaagtgcgaatccaccctggcacccgggcacctgcggacctgccccacggctcctacttgatggtcaacacttcccagcatgccccaggccagcgagcccatgtcatcttccagagcctgagcgagaatgatacccactgtgtgcagttcagctacttcctgtacagccgggacgggcacagcccgggcaccctgggcgtctacgtgcgcgttaatgggggccccctgggcagtgctgtgtggaatatgactggatcccacggccgtcagtggcaccaggctgagctggctgtcagcactttctggcccaatgaatatcaggtgctgtttgaggccctcatctccccagaccgcaggggctacatgggcctagatgacatcctgcttctcagctacccctgcgcaaaggccccacacttctcccgcctgggcgacgtggaggtcaacgcgggccagaacgcgtcgttccagtgcatggccgcgggcagagcggccgaggccgaacgcttcctcttgcaacggcagagcggggcgctggtgccggcggcgggcgtgcggcacatcagccaccggcgcttcctggccactttcccgctggctgccgtgagccgcgccgagcaggacctgtaccgctgtgtgtcccaggccccgcgcggcgcgggcgtctctaacttcgcggagctcatcgtcaaggagcccccaactcccatcgcgcccccacagctgctgcgtgctggccccacctacctcatcatccagctcaacaccaactccatcattggcgacgggccgatcgtgcgcaaggagattgagtaccgcatggcgcgcgggccctgggctgaggtgcacgccgtcagcctgcagacctacaagctgtggcacctcgaccccgacacagagtatgagatcagcgtgctgctcacgcgtcccggagacggcggcactggccgccctgggccacccctcatcagccgcaccaaatgcgcagagcccatgagggcccccaaaggcctggcttttgctgagatccaggcccgtcagctgaccctgcagtgggaaccactgggctacaacgtgacgcgttgccacacctatactgtgtcgctgtgctatcactacaccctgggcagcagccacaaccagaccatccgagagtgtgtgaagacagagcaaggtgtcagccgctacaccatcaagaacctgctgccctatcggaacgttcacgtgaggcttgtcctcactaaccctgaggggcgcaaagagggcaaggaggtcactttccagacggatgaggatgtgcccagtgggattgcagccgagtccctgaccttcactccactggaggacatgatcttcctcaagtgggaggagccccaggagcccaatggtctcatcacccagtatgagatcagctaccagagcatcgagtcatcagacccggcagtgaacgtgccaggcccacgacgtaccatctccaagctccgcaatgagacctaccatgtcttctccaacctgcacccaggcaccacctacctgttctccgtgcgggcccgcacaggcaaaggcttcggccaggcggcactcactgagataaccactaacatctctgctcccagctttgattatgccgacatgccgtcacccctgggcgagtctgagaacaccatcaccgtgctgctgaggccggcacagggccgcggtgcgcccatcagtgtgtaccaggtgattgtggaggaggagcgggcgcggaggctgcggcgggagccaggtggacaggactgcttcccagtgccattgaccttcgaggcggcgctggcccgaggcctggtgcactacttcggggccgaactggcggccagcagtctacctgaggccatgccctttaccgtgggtgacaaccagacctaccgaggcttctggaacccaccacttgagcctaggaaggcctatctcatctacttccaggcagcaagccacctgaagggggagacccggctgaattgcatccgcattgccaggaaagctgcctgcaaggaaagcaagcggcccctggaggtgtcccagagatcggaggagatggggcttatcctgggcatctgtgcaggggggcttgctgtcctcatccttctcctgggtgccatcattgtcatcatccgcaaagggaagccggtgaacatgaccaaggccaccgtcaactaccgccaggagaagacacacatgatgagcgccgtggaccgcagcttcacagaccagagcaccctgcaggaggacgagcggctgggcctgtccttcatggacacccatggctacagcacccggggagaccagcgcagcggtggggtcactgaggccagcagcctcctggggggctccccgaggcgtccctgtggccggaagggctccccataccacacggggcagctgcaccctgcggtgcgtgtcgcagaccttctgcagcacatcaaccagatgaagacggccgagggttacggcttcaagcaggagtatgagagcttctttgaaggctgggacgccacaaagaagaaagacaaggtcaagggcagccggcaggagccaatgcctgcctatgatcggcaccgagtgaaactgcacccgatgctgggagaccccaatgccgactacattaatgccaactacatagatattcggataaaccgagaaggttaccacaggtcaaaccacttcatagccactcaagggccgaagcctgagatggtctatgacttctggcgtatggtgtggcaggagcactgttccagcatcgtcatgatcaccaagctggtcgaggtgggcagggtgaaatgctcacggtactggccggaggactcagacacctacggggacatcaagattatgctggtgaagacagagaccctggctgagtatgtcgtgcgcacttttgccctggagcggagaggctactctgcccggcacgaggtccgccagttccacttcacagcgtggccagagcatggcgtcccctaccatgccacggggctgctggctttcatccggcgcgtgaaggcctccaccccacctgatgccgggcccattgtcatccactgcagcgcgggcaccggccgcacaggttgctatatcgtcctggatgtgatgctggacatggcagagtgtgagggcgtcgtggacatttacaactgtgtgaagactctctgctcccggcgtgtcaacatgatccagactgaggagcagtacatcttcattcatgatgcaatcctggaggcctgcctgtgtggggagaccaccatccctgtcagtgagttcaaggccacctacaaggagatgatccgcattgatcctcagagtaattcctcccagctgcgggaagagttccagacgctgaactcggtcaccccgccgctggacgtggaggagtgcagcatcgccctgttgccccggaaccgcgacaagaaccgcagcatggacgtcctgccgcccgaccgctgcctgcccttcctcatctccactgatggggactccaacaactacattaatgcagccctgactgacagctacacacggagtgcggccttcatcgtgaccctgcacccgctgcagagcaccacgcccgacttctggcggctggtctacgattacgggtgcacctccatcgtcatgctcaaccagctgaaccagtccaactccgcctggccctgcctgcagtactggccagagccaggccggcagcaatatggcctcatggaggtggagtttatgtcgggcacagctgatgaagacttagtggctcgagtcttccgggtgcagaacatctctcggttgcaggaggggcacctgctggtgcggcacttccagttcctgcgctggtctgcataccgggacacacctgactccaagaaggccttcttgcacctgctggctgaggtggacaagtggcaggccgagagtggggatgggcgcaccatcgtgcactgcctaaacgggggaggacgcagcggcaccttctgcgcctgcgccacggtcctggagatgatccgctgccacaacttggtggacgttttctttgctgccaaaaccctccggaactacaaacccaacatggtggagaccatggatcagtaccacttttgctacgatgtggccctggagtacttggaggggctggagtcaagatagcggggccctggcctggggcacccactgcacactcagggccagacccaccatcctggactggcgaggaagatcagtgcctcctgctctgcccaaacacactcccatggggcaagcactggagtggatgctgggctatcttgctcccccttccactgtgggcagggcctttcgcttgtcccatgggcgggtggtgggccaaggaggagcttagcaagtctgcagcccagccccacctccatagggtcctgcaggcctgtgctgagaggcctggtgctgcctggcagagtgacaaaggctcaggacggctggctctgggggactcaggccaagccccttggcaccatcctggcttttggcagggatgagtgaggccctgcagagagcatcccaggccaaggttcccactcagcctgccccctctgcatgtgggtagaggatgtactgggacttggcatttaggattccatctggcccagcccctgaaggtcctggggaagcaggtctcaattctgaatagccagtggggcacactgactgtcctccccaggggaactgcagcgccctcctccccactgccccctgcagcccctgagatattttgctcactatccctccccacttgcttccctgatatgtgctctgagcttccctgaaccaggatctgcctattactgctgtgccccatggggggctccttccctgcctgacccactgttgcagaatgaagtcacctcgcccccctcttcctttaatcttcaggcctcactggcctgtcctgctcagcttgggccagtgacaatctgcaaggctgaacaacagcccctggggttgaggcccctgtggctcctggtcaggctgcccgttgtggggaggggcagtgttagagcagggctggtcataccctctggagttcagaggaagaggtaggaccagtgcttttttgtttcttttgttatttttggttgggtgggtgggaaggtctctttaaaatggggcaggccacacccccattccgtgcctcaatttccccatctgtaaactgtagatatgactactgacctacctcgcagggggctgtggggaggcataagctgatgtttgtaaagcgctttgtaaataaacgtgctctctgaatgccac

SEQ ID NO: 24746 - DNA, 5579 bp, Homo sapiens
  source 1..5579: mol_type = unassigned DNA
ggcgccagtcccgctccgcgccgcgccgctccgctccggctcgggctccggctcgcctcgggctgggctcgggctccgggggcggcgtcccccgcgccgggccccgggacgggcggcgacgctccaaccatggcccgtgcccaggcgctcgtgctggcactcaccttccagctctgcgcgccggagaccgagactccggcagctggctgcaccttcgaggaggcaagtgacccagcagtgccctgcgagtacagccaggcccagtacgatgacttccagtgggagcaagtgcgaatccaccctggcacccgggcacctgcggacctgccccacggctcctacttgatggtcaacacttcccagcatgccccaggccagcgagcccatgtcatcttccagagcctgagcgagaatgatacccactgtgtgcagttcagctacttcctgtacagccgggacgggcacagcccgggcaccctgggcgtctacgtgcgcgttaatgggggccccctgggcagtgctgtgtggaatatgactggatcccacggccgtcagtggcaccaggctgagctggctgtcagcactttctggcccaatgaatatcaggtgctgtttgaggccctcatctccccagaccgcaggggctacatgggcctagatgacatcctgcttctcagctacccctgcgcaaaggccccacacttctcccgcctgggcgacgtggaggtcaacgcgggccagaacgcgtcgttccagtgcatggccgcgggcagagcggccgaggccgaacgcttcctcttgcaacggcagagcggggcgctggtgccggcggcgggcgtgcggcacatcagccaccggcgcttcctggccactttcccgctggctgccgtgagccgcgccgagcaggacctgtaccgctgtgtgtcccaggccccgcgcggcgcgggcgtctctaacttcgcggagctcatcgtcaaggagcccccaactcccatcgcgcccccacagctgctgcgtgctggccccacctacctcatcatccagctcaacaccaactccatcattggcgacgggccgatcgtgcgcaaggagattgagtaccgcatggcgcgcgggccctgggctgaggtgcacgccgtcagcctgcagacctacaagctgtggcacctcgaccccgacacagagtatgagatcagcgtgctgctcacgcgtcccggagacggcggcactggccgccctgggccacccctcatcagccgcaccaaatgcgcagagcccatgagggcccccaaaggcctggcttttgctgagatccaggcccgtcagctgaccctgcagtgggaaccactgggctacaacgtgacgcgttgccacacctatactgtgtcgctgtgctatcactacaccctgggcagcagccacaaccagaccatccgagagtgtgtgaagacagagcaaggtgtcagccgctacaccatcaagaacctgctgccctatcggaacgttcacgtgaggcttgtcctcactaaccctgaggggcgcaaagagggcaaggaggtcactttccagacggatgaggatgtgcccagtgggattgcagccgagtccctgaccttcactccactggaggacatgatcttcctcaagtgggaggagccccaggagcccaatggtctcatcacccagtatgagatcagctaccagagcatcgagtcatcagacccggcagtgaacgtgccaggcccacgacgtaccatctccaagctccgcaatgagacctaccatgtcttctccaacctgcacccaggcaccacctacctgttctccgtgcgggcccgcacaggcaaaggcttcggccaggcggcactcactgagataaccactaacatctctgctcccagctttgattatgccgacatgccgtcacccctgggcgagtctgagaacaccatcaccgtgctgctgaggccggcacagggccgcggtgcgcccatcagtgtgtaccaggtgattgtggaggaggagcgggcgcggaggctgcggcgggagccaggtggacaggactgcttcccagtgccattgaccttcgaggcggcgctggcccgaggcctggtgcactacttcggggccgaactggcggccagcagtctacctgaggccatgccctttaccgtgggtgacaaccagacctaccgaggcttctggaacccaccacttgagcctaggaaggcctatctcatctacttccaggcagcaagccacctgaagggggagacccggctgaattgcatccgcattgccaggaaagctgcctgcaaggaaagcaagcggcccctggaggtgtcccagagatcggaggagatggggcttatcctgggcatctgtgcaggggggcttgctgtcctcatccttctcctgggtgccatcattgtcatcatccgcaaagggaagccggtgaacatgaccaaggccaccgtcaactaccgccaggagaagacacacatgatgagcgccgtggaccgcagcttcacagaccagagcaccctgcaggaggacgagcggctgggcctgtccttcatggacacccatggctacagcacccggggagaccagcgcagcggtggggtcactgaggccagcagcctcctggggggctccccgaggcgtccctgtggccggaagggctccccataccacacggggcagctgcaccctgcggtgcgtgtcgcagaccttctgcagcacatcaaccagatgaagacggccgagggttacggcttcaagcaggagtatgagagcttctttgaaggctgggacgccacaaagaagaaagacaaggtcaagggcagccggcaggagccaatgcctgcctatgatcggcaccgagtgaaactgcacccgatgctgggagaccccaatgccgactacattaatgccaactacatagatggttaccacaggtcaaaccacttcatagccactcaagggccgaagcctgagatggtctatgacttctggcgtatggtgtggcaggagcactgttccagcatcgtcatgatcaccaagctggtcgaggtgggcagggtgaaatgctcacggtactggccggaggactcagacacctacggggacatcaagattatgctggtgaagacagagaccctggctgagtatgtcgtgcgcacttttgccctggagcggagaggctactctgcccggcacgaggtccgccagttccacttcacagcgtggccagagcatggcgtcccctaccatgccacggggctgctggctttcatccggcgcgtgaaggcctccaccccacctgatgccgggcccattgtcatccactgcagcgcgggcaccggccgcacaggttgctatatcgtcctggatgtgatgctggacatggcagagtgtgagggcgtcgtggacatttacaactgtgtgaagactctctgctcccggcgtgtcaacatgatccagactgaggagcagtacatcttcattcatgatgcaatcctggaggcctgcctgtgtggggagaccaccatccctgtcagtgagttcaaggccacctacaaggagatgatccgcattgatcctcagagtaattcctcccagctgcgggaagagttccagacgctgaactcggtcaccccgccgctggacgtggaggagtgcagcatcgccctgttgccccggaaccgcgacaagaaccgcagcatggacgtcctgccgcccgaccgctgcctgcccttcctcatctccactgatggggactccaacaactacattaatgcagccctgactgacagctacacacggagtgcggccttcatcgtgaccctgcacccgctgcagagcaccacgcccgacttctggcggctggtctacgattacgggtgcacctccatcgtcatgctcaaccagctgaaccagtccaactccgcctggccctgcctgcagtactggccagagccaggccggcagcaatatggcctcatggaggtggagtttatgtcgggcacagctgatgaagacttagtggctcgagtcttccgggtgcagaacatctctcggttgcaggaggggcacctgctggtgcggcacttccagttcctgcgctggtctgcataccgggacacacctgactccaagaaggccttcttgcacctgctggctgaggtggacaagtggcaggccgagagtggggatgggcgcaccatcgtgcactgcctaaacgggggaggacgcagcggcaccttctgcgcctgcgccacggtcctggagatgatccgctgccacaacttggtggacgttttctttgctgccaaaaccctccggaactacaaacccaacatggtggagaccatggatcagtaccacttttgctacgatgtggccctggagtacttggaggggctggagtcaagatagcggggccctggcctggggcacccactgcacactcagggccagacccaccatcctggactggcgaggaagatcagtgcctcctgctctgcccaaacacactcccatggggcaagcactggagtggatgctgggctatcttgctcccccttccactgtgggcagggcctttcgcttgtcccatgggcgggtggtgggccaaggaggagcttagcaagtctgcagcccagccccacctccatagggtcctgcaggcctgtgctgagaggcctggtgctgcctggcagagtgacaaaggctcaggacggctggctctgggggactcaggccaagccccttggcaccatcctggcttttggcagggatgagtgaggccctgcagagagcatcccaggccaaggttcccactcagcctgccccctctgcatgtgggtagaggatgtactgggacttggcatttaggattccatctggcccagcccctgaaggtcctggggaagcaggtctcaattctgaatagccagtggggcacactgactgtcctccccaggggaactgcagcgccctcctccccactgccccctgcagcccctgagatattttgctcactatccctccccacttgcttccctgatatgtgctctgagcttccctgaaccaggatctgcctattactgctgtgccccatggggggctccttccctgcctgacccactgttgcagaatgaagtcacctcgcccccctcttcctttaatcttcaggcctcactggcctgtcctgctcagcttgggccagtgacaatctgcaaggctgaacaacagcccctggggttgaggcccctgtggctcctggtcaggctgcccgttgtggggaggggcagtgttagagcagggctggtcataccctctggagttcagaggaagaggtaggaccagtgcttttttgtttcttttgttatttttggttgggtgggtgggaaggtctctttaaaatggggcaggccacacccccattccgtgcctcaatttccccatctgtaaactgtagatatgactactgacctacctcgcagggggctgtggggaggcataagctgatgtttgtaaagcgctttgtaaataaacgtgctctctgaatgcca

SEQ ID NO: 24747 - DNA, 5550 bp, Homo sapiens
  source 1..5550: mol_type = unassigned DNA
ctccggctcgggctccggctcgcctcgggctgggctcgggctccgggggcggcgtcccccgcgccgggccccgggacgggcggcgacgctccaaccatggcccgtgcccaggcgctcgtgctggcactcaccttccagctctgcgcgccggagaccgagactccggcagctggctgcaccttcgaggaggcaagtgacccagcagtgccctgcgagtacagccaggcccagtacgatgacttccagtgggagcaagtgcgaatccaccctggcacccgggcacctgcggacctgccccacggctcctacttgatggtcaacacttcccagcatgccccaggccagcgagcccatgtcatcttccagagcctgagcgagaatgatacccactgtgtgcagttcagctacttcctgtacagccgggacgggcacagcccgggcaccctgggcgtctacgtgcgcgttaatgggggccccctgggcagtgctgtgtggaatatgactggatcccacggccgtcagtggcaccaggctgagctggctgtcagcactttctggcccaatgaatatcaggtgctgtttgaggccctcatctccccagaccgcaggggctacatgggcctagatgacatcctgcttctcagctacccctgcgcaaaggccccacacttctcccgcctgggcgacgtggaggtcaacgcgggccagaacgcgtcgttccagtgcatggccgcgggcagagcggccgaggccgaacgcttcctcttgcaacggcagagcggggcgctggtgccggcggcgggcgtgcggcacatcagccaccggcgcttcctggccactttcccgctggctgccgtgagccgcgccgagcaggacctgtaccgctgtgtgtcccaggccccgcgcggcgcgggcgtctctaacttcgcggagctcatcgtcaaggagcccccaactcccatcgcgcccccacagctgctgcgtgctggccccacctacctcatcatccagctcaacaccaactccatcattggcgacgggccgatcgtgcgcaaggagattgagtaccgcatggcgcgcgggccctgggctgaggtgcacgccgtcagcctgcagacctacaagctgtggcacctcgaccccgacacagagtatgagatcagcgtgctgctcacgcgtcccggagacggcggcactggccgccctgggccacccctcatcagccgcaccaaatgcgcagagcccatgagggcccccaaaggcctggcttttgctgagatccaggcccgtcagctgaccctgcagtgggaaccactgggctacaacgtgacgcgttgccacacctatactgtgtcgctgtgctatcactacaccctgggcagcagccacaaccagaccatccgagagtgtgtgaagacagagcaaggtgtcagccgctacaccatcaagaacctgctgccctatcggaacgttcacgtgaggcttgtcctcactaaccctgaggggcgcaaagagggcaaggaggtcactttccagacggatgaggatgtgcccagtgggattgcagccgagtccctgaccttcactccactggaggacatgatcttcctcaagtgggaggagccccaggagcccaatggtctcatcacccagtatgagatcagctaccagagcatcgagtcatcagacccggcagtgaacgtgccaggcccacgacgtaccatctccaagctccgcaatgagacctaccatgtcttctccaacctgcacccaggcaccacctacctgttctccgtgcgggcccgcacaggcaaaggcttcggccaggcggcactcactgagataaccactaacatctctgctcccagctttgattatgccgacatgccgtcacccctgggcgagtctgagaacaccatcaccgtgctgctgaggccggcacagggccgcggtgcgcccatcagtgtgtaccaggtgattgtggaggaggagcgggcgcggaggctgcggcgggagccaggtggacaggactgcttcccagtgccattgaccttcgaggcggcgctggcccgaggcctggtgcactacttcggggccgaactggcggccagcagtctacctgaggccatgccctttaccgtgggtgacaaccagacctaccgaggcttctggaacccaccacttgagcctaggaaggcctatctcatctacttccaggcagcaagccacctgaagggggagacccggctgaattgcatccgcattgccaggaaagctgcctgcaaggaaagcaagcggcccctggaggtgtcccagagatcggaggagatggggcttatcctgggcatctgtgcaggggggcttgctgtcctcatccttctcctgggtgccatcattgtcatcatccgcaaagggaagccggtgaacatgaccaaggccaccgtcaactaccgccaggagaagacacacatgatgagcgccgtggaccgcagcttcacagaccagagcaccctgcaggaggacgagcggctgggcctgtccttcatggacacccatggctacagcacccggggagaccagcgcagcggtggggtcactgaggccagcagcctcctggggggctccccgaggcgtccctgtggccggaagggctccccataccacacggggcagctgcaccctgcggtgcgtgtcgcagaccttctgcagcacatcaaccagatgaagacggccgagggttacggcttcaagcaggagtatgagagcttctttgaaggctgggacgccacaaagaagaaagacaaggtcaagggcagccggcaggagccaatgcctgcctatgatcggcaccgagtgaaactgcacccgatgctgggagaccccaatgccgactacattaatgccaactacatagatggttaccacaggtcaaaccacttcatagccactcaagggccgaagcctgagatggtctatgacttctggcgtatggtgtggcaggagcactgttccagcatcgtcatgatcaccaagctggtcgaggtgaaatgctcacggtactggccggaggactcagacacctacggggacatcaagattatgctggtgaagacagagaccctggctgagtatgtcgtgcgcacttttgccctggagcggagaggctactctgcccggcacgaggtccgccagttccacttcacagcgtggccagagcatggcgtcccctaccatgccacggggctgctggctttcatccggcgcgtgaaggcctccaccccacctgatgccgggcccattgtcatccactgcagcgcgggcaccggccgcacaggttgctatatcgtcctggatgtgatgctggacatggcagagtgtgagggcgtcgtggacatttacaactgtgtgaagactctctgctcccggcgtgtcaacatgatccagactgaggagcagtacatcttcattcatgatgcaatcctggaggcctgcctgtgtggggagaccaccatccctgtcagtgagttcaaggccacctacaaggagatgatccgcattgatcctcagagtaattcctcccagctgcgggaagagttccagacgctgaactcggtcaccccgccgctggacgtggaggagtgcagcatcgccctgttgccccggaaccgcgacaagaaccgcagcatggacgtcctgccgcccgaccgctgcctgcccttcctcatctccactgatggggactccaacaactacattaatgcagccctgactgacagctacacacggagtgcggccttcatcgtgaccctgcacccgctgcagagcaccacgcccgacttctggcggctggtctacgattacgggtgcacctccatcgtcatgctcaaccagctgaaccagtccaactccgcctggccctgcctgcagtactggccagagccaggccggcagcaatatggcctcatggaggtggagtttatgtcgggcacagctgatgaagacttagtggctcgagtcttccgggtgcagaacatctctcggttgcaggaggggcacctgctggtgcggcacttccagttcctgcgctggtctgcataccgggacacacctgactccaagaaggccttcttgcacctgctggctgaggtggacaagtggcaggccgagagtggggatgggcgcaccatcgtgcactgcctaaacgggggaggacgcagcggcaccttctgcgcctgcgccacggtcctggagatgatccgctgccacaacttggtggacgttttctttgctgccaaaaccctccggaactacaaacccaacatggtggagaccatggatcagtaccacttttgctacgatgtggccctggagtacttggaggggctggagtcaagatagcggggccctggcctggggcacccactgcacactcagggccagacccaccatcctggactggcgaggaagatcagtgcctcctgctctgcccaaacacactcccatggggcaagcactggagtggatgctgggctatcttgctcccccttccactgtgggcagggcctttcgcttgtcccatgggcgggtggtgggccaaggaggagcttagcaagtctgcagcccagccccacctccatagggtcctgcaggcctgtgctgagaggcctggtgctgcctggcagagtgacaaaggctcaggacggctggctctgggggactcaggccaagccccttggcaccatcctggcttttggcagggatgagtgaggccctgcagagagcatcccaggccaaggttcccactcagcctgccccctctgcatgtgggtagaggatgtactgggacttggcatttaggattccatctggcccagcccctgaaggtcctggggaagcaggtctcaattctgaatagccagtggggcacactgactgtcctccccaggggaactgcagcgccctcctccccactgccccctgcagcccctgagatattttgctcactatccctccccacttgcttccctgatatgtgctctgagcttccctgaaccaggatctgcctattactgctgtgccccatggggggctccttccctgcctgacccactgttgcagaatgaagtcacctcgcccccctcttcctttaatcttcaggcctcactggcctgtcctgctcagcttgggccagtgacaatctgcaaggctgaacaacagcccctggggttgaggcccctgtggctcctggtcaggctgcccgttgtggggaggggcagtgttagagcagggctggtcataccctctggagttcagaggaagaggtaggaccagtgcttttttgtttcttttgttatttttggttgggtgggtgggaaggtctctttaaaatggggcaggccacacccccattccgtgcctcaatttccccatctgtaaactgtagatatgactactgacctacctcgcagggggctgtggggaggcataagctgatgtttgtaaagcgctttgtaaataaacgtgctctctgaatgccacagagcagccctg

SEQ ID NO: 24748 - DNA, 8175 bp, Homo sapiens
  source 1..8175: mol_type = unassigned DNA
aggagccgcggcgcgcacagccgggctggagcgcgcacccggcactgaggcttcgctgctctcggagcgctcagaccgcggccgccgcagccggcgaaagaggcaaagtcccgcacgccggaggacatgcgcctcggctagcggccccgggccccaccaccgtgcggctttctccagattattcctctctcgctgtctctgactgtctctctctgtctctgtctctgtctctctctctctcacacacacacacacacacacaaacacacatacgcacgcacgatctcacttcgatctatacactggaggattaaaacaaacaaacaaaaaaaacatttccttcgctccccctccctctccactctgagaagcagaggagccgcacggcgaggggccgcagaccgtctggaaatgcgaatcctaaagcgtttcctcgcttgcattcagctcctctgtgtttgccgcctggattgggctaatggatactacagacaacagagaaaacttgttgaagagattggctggtcctatacaggagcactgaatcaaaaaaattggggaaagaaatatccaacatgtaatagcccaaaacaatctcctatcaatattgatgaagatcttacacaagtaaatgtgaatcttaagaaacttaaatttcagggttgggataaaacatcattggaaaacacattcattcataacactgggaaaacagtggaaattaatctcactaatgactaccgtgtcagcggaggagtttcagaaatggtgtttaaagcaagcaagataacttttcactggggaaaatgcaatatgtcatctgatggatcagagcatagtttagaaggacaaaaatttccacttgagatgcaaatctactgctttgatgcggaccgattttcaagttttgaggaagcagtcaaaggaaaagggaagttaagagctttatccattttgtttgaggttgggacagaagaaaatttggatttcaaagcgattattgatggagtcgaaagtgttagtcgttttgggaagcaggctgctttagatccattcatactgttgaaccttctgccaaactcaactgacaagtattacatttacaatggctcattgacatctcctccctgcacagacacagttgactggattgtttttaaagatacagttagcatctctgaaagccagttggctgttttttgtgaagttcttacaatgcaacaatctggttatgtcatgctgatggactacttacaaaacaattttcgagagcaacagtacaagttctctagacaggtgttttcctcatacactggaaaggaagagattcatgaagcagtttgtagttcagaaccagaaaatgttcaggctgacccagagaattataccagccttcttgttacatgggaaagacctcgagtcgtttatgataccatgattgagaagtttgcagttttgtaccagcagttggatggagaggaccaaaccaagcatgaatttttgacagatggctatcaagacttgggtgctattctcaataatttgctacccaatatgagttatgttcttcagatagtagccatatgcactaatggcttatatggaaaatacagcgaccaactgattgtcgacatgcctactgataatcctgaacttgatcttttccctgaattaattggaactgaagaaataatcaaggaggaggaagagggaaaagacattgaagaaggcgctattgtgaatcctggtagagacagtgctacaaaccaaatcaggaaaaaggaaccccagatttctaccacaacacactacaatcgcatagggacgaaatacaatgaagccaagactaaccgatccccaacaagaggaagtgaattctctggaaagggtgatgttcccaatacatctttaaattccacttcccaaccagtcactaaattagccacagaaaaagatatttccttgacttctcagactgtgactgaactgccacctcacactgtggaaggtacttcagcctctttaaatgatggctctaaaactgttcttagatctccacatatgaacttgtcggggactgcagaatccttaaatacagtttctataacagaatatgaggaggagagtttattgaccagtttcaagcttgatactggagctgaagattcttcaggctccagtcccgcaacttctgctatcccattcatctctgagaacatatcccaagggtatatattttcctccgaaaacccagagacaataacatatgatgtccttataccagaatctgctagaaatgcttccgaagattcaacttcatcaggttcagaagaatcactaaaggatccttctatggagggaaatgtgtggtttcctagctctacagacataacagcacagcccgatgttggatcaggcagagagagctttctccagactaattacactgagatacgtgttgatgaatctgagaagacaaccaagtccttttctgcaggcccagtgatgtcacagggtccctcagttacagatctggaaatgccacattattctacctttgcctacttcccaactgaggtaacacctcatgcttttaccccatcctccagacaacaggatttggtctccacggtcaacgtggtatactcgcagacaacccaaccggtatacaatggtgagacacctcttcaaccttcctacagtagtgaagtctttcctctagtcacccctttgttgcttgacaatcagatcctcaacactacccctgctgcttcaagtagtgattcggccttgcatgctacgcctgtatttcccagtgtcgatgtgtcatttgaatccatcctgtcttcctatgatggtgcacctttgcttccattttcctctgcttccttcagtagtgaattgtttcgccatctgcatacagtttctcaaatccttccacaagttacttcagctaccgagagtgataaggtgcccttgcatgcttctctgccagtggctgggggtgatttgctattagagcccagccttgctcagtattctgatgtgctgtccactactcatgctgcttcagagacgctggaatttggtagtgaatctggtgttctttataaaacgcttatgttttctcaagttgaaccacccagcagtgatgccatgatgcatgcacgttcttcagggcctgaaccttcttatgccttgtctgataatgagggctcccaacacatcttcactgtttcttacagttctgcaatacctgtgcatgattctgtgggtgtaacttatcagggttccttatttagcggccctagccatataccaatacctaagtcttcgttaataaccccaactgcatcattactgcagcctactcatgccctctctggtgatggggaatggtctggagcctcttctgatagtgaatttcttttacctgacacagatgggctgacagcccttaacatttcttcacctgtttctgtagctgaatttacatatacaacatctgtgtttggtgatgataataaggcgctttctaaaagtgaaataatatatggaaatgagactgaactgcaaattccttctttcaatgagatggtttacccttctgaaagcacagtcatgcccaacatgtatgataatgtaaataagttgaatgcgtctttacaagaaacctctgtttccatttctagcaccaagggcatgtttccagggtcccttgctcataccaccactaaggtttttgatcatgagattagtcaagttccagaaaataacttttcagttcaacctacacatactgtctctcaagcatctggtgacacttcgcttaaacctgtgcttagtgcaaactcagagccagcatcctctgaccctgcttctagtgaaatgttatctccttcaactcagctcttattttatgagacctcagcttcttttagtactgaagtattgctacaaccttcctttcaggcttctgatgttgacaccttgcttaaaactgttcttccagctgtgcccagtgatccaatattggttgaaacccccaaagttgataaaattagttctacaatgttgcatctcattgtatcaaattctgcttcaagtgaaaacatgctgcactctacatctgtaccagtttttgatgtgtcgcctacttctcatatgcactctgcttcacttcaaggtttgaccatttcctatgcaagtgagaaatatgaaccagttttgttaaaaagtgaaagttcccaccaagtggtaccttctttgtacagtaatgatgagttgttccaaacggccaatttggagattaaccaggcccatcccccaaaaggaaggcatgtatttgctacacctgttttatcaattgatgaaccattaaatacactaataaataagcttatacattccgatgaaattttaacctccaccaaaagttctgttactggtaaggtatttgctggtattccaacagttgcttctgatacatttgtatctactgatcattctgttcctataggaaatgggcatgttgccattacagctgtttctccccacagagatggttctgtaacctcaacaaagttgctgtttccttctaaggcaacttctgagctgagtcatagtgccaaatctgatgccggtttagtgggtggtggtgaagatggtgacactgatgatgatggtgatgatgatgatgatgacagaggtagtgatggcttatccattcataagtgtatgtcatgctcatcctatagagaatcacaggaaaaggtaatgaatgattcagacacccacgaaaacagtcttatggatcagaataatccaatctcatactcactatctgagaattctgaagaagataatagagtcacaagtgtatcctcagacagtcaaactggtatggacagaagtcctggtaaatcaccatcagcaaatgggctatcccaaaagcacaatgatggaaaagaggaaaatgacattcagactggtagtgctctgcttcctctcagccctgaatctaaagcatgggcagttctgacaagtgatgaagaaagtggatcagggcaaggtacctcagatagccttaatgagaatgagacttccacagatttcagttttgcagacactaatgaaaaagatgctgatgggatcctggcagcaggtgactcagaaataactcctggattcccacagtccccaacatcatctgttactagcgagaactcagaagtgttccacgtttcagaggcagaggccagtaatagtagccatgagtctcgtattggtctagctgaggggttggaatccgagaagaaggcagttataccccttgtgatcgtgtcagccctgacttttatctgtctagtggttcttgtgggtattctcatctactggaggaaatgcttccagactgcacacttttacttagaggacagtacatcccctagagttatatccacacctccaacacctatctttccaatttcagatgatgtcggagcaattccaataaagcactttccaaagcatgttgcagatttacatgcaagtagtgggtttactgaagaatttgagacactgaaagagttttaccaggaagtgcagagctgtactgttgacttaggtattacagcagacagctccaaccacccagacaacaagcacaagaatcgatacataaatatcgttgcctatgatcatagcagggttaagctagcacagcttgctgaaaaggatggcaaactgactgattatatcaatgccaattatgttgatggctacaacagaccaaaagcttatattgctgcccaaggcccactgaaatccacagctgaagatttctggagaatgatatgggaacataatgtggaagttattgtcatgataacaaacctcgtggagaaaggaaggagaaaatgtgatcagtactggcctgccgatgggagtgaggagtacgggaactttctggtcactcagaagagtgtgcaagtgcttgcctattatactgtgaggaattttactctaagaaacacaaaaataaaaaagggctcccagaaaggaagacccagtggacgtgtggtcacacagtatcactacacgcagtggcctgacatgggagtaccagagtactccctgccagtgctgacctttgtgagaaaggcagcctatgccaagcgccatgcagtggggcctgttgtcgtccactgcagtgctggagttggaagaacaggcacatatattgtgctagacagtatgttgcagcagattcaacacgaaggaactgtcaacatatttggcttcttaaaacacatccgttcacaaagaaattatttggtacaaactgaggagcaatatgtcttcattcatgatacactggttgaggccatacttagtaaagaaactgaggtgctggacagtcatattcatgcctatgttaatgcactcctcattcctggaccagcaggcaaaacaaagctagagaaacaattccagctcctgagccagtcaaatatacagcagagtgactattctgcagccctaaagcaatgcaacagggaaaagaatcgaacttcttctatcatccctgtggaaagatcaagggttggcatttcatccctgagtggagaaggcacagactacatcaatgcctcctatatcatgggctattaccagagcaatgaattcatcattacccagcaccctctccttcataccatcaaggatttctggaggatgatatgggaccataatgcccaactggtggttatgattcctgatggccaaaacatggcagaagatgaatttgtttactggccaaataaagatgagcctataaattgtgagagctttaaggtcactcttatggctgaagaacacaaatgtctatctaatgaggaaaaacttataattcaggactttatcttagaagctacacaggatgattatgtacttgaagtgaggcactttcagtgtcctaaatggccaaatccagatagccccattagtaaaacttttgaacttataagtgttataaaagaagaagctgccaatagggatgggcctatgattgttcatgatgagcatggaggagtgacggcaggaactttctgtgctctgacaacccttatgcaccaactagaaaaagaaaattccgtggatgtttaccaggtagccaagatgatcaatctgatgaggccaggagtctttgctgacattgagcagtatcagtttctctacaaagtgatcctcagccttgtgagcacaaggcaggaagagaatccatccacctctctggacagtaatggtgcagcattgcctgatggaaatatagctgagagcttagagtctttagtttaacacagaaaggggtgggggaactcacatctgagcattgttttcctcttcctaaaattaggcaggaaaatcagtctagttctgttatctgttgatttcccatcacctgacagtaactttcatgacataggattctgccgccaaatttatatcattaacaatgtgtgcctttttgcaagacttgtaatttacttattatgtttgaactaaaatgattgaattttacagtatttctaagaatggaattgtggtatttttttctgtattgattttaacagaaaatttcaatttatagaggttaggaattccaaactacagaaaatgtttgtttttagtgtcaaatttttagctgtatttgtagcaattatcaggtttgctagaaatataacttttaatacagtagcctgtaaataaaacactcttccatatgatattcaacattttacaactgcagtattcacctaaagtagaaataatctgttacttattgtaaatactgccctagtgtctccatggaccaaatttatatttataattgtagatttttatattttactactgagtcaagttttctagttctgtgtaattgtttagtttaatgacgtagttcattagctggtcttactctaccagttttctgacattgtattgtgttacctaagtcattaactttgtttcagcatgtaattttaacttttgtggaaaatagaaataccttcattttgaaagaagtttttatgagaataacaccttaccaaacattgttcaaatggtttttatccaaggaattgcaaaaataaatataaatattgccattaa

SEQ ID NO: 24749 - DNA, 771 bp, Homo sapiens
  source 1..771: mol_type = unassigned DNA
ggctgcgccgagccccctgcgcgctgcacatggggcgcctgacggaagcggcggcagcgggcagcggctctcgggctgcaggctgggcagggtcccctcccacgctcctgccgctgtctcccacgtcccccaggtgcgcggccaccatggcgtccagcgacgaggacggcaccaacggcggcgcctcggaggccggcgaggaccgggaggctcccggcgagcggaggcgcctgggggtcttggccaccgcctggctcaccttctacgacatcgccatgaccgcggggagactcattctgtcgcccaggctggagtgcattggcgcgatctccgctcactgccaacctcagcctccggagttcaagcgattctcctgcctcggcctccggagtagctgggactacaagcgtgggccaccacgccccattaatttttgtatttttggtagagacagggtatcaccatgttggccagggtggtctcgaactcctgacctcaaatgattcccccacttcggcctcccaatgtgctgggattacaggtgtgagccatcgcaccgggcctaatattttattttaattttttaaaaatagagatggcctctcactgtgttggctaggctggtctcaaactcccggcctcaagcaatcctcccacctcaacctccaaaagtgctgggattaccacttccggcttaatattttaaactttctccagggtttatagaaaaatgtgattgacaaaaatttaataaatctttacctatggtga

SEQ ID NO: 24750 - DNA, 1310 bp, Homo sapiens
  source 1..1310: mol_type = unassigned DNA
ggtagagctggctgcgccgagccccctgcgcgctgcacatggggcgcctgacggaagcggcggcagcgggcagcggctctcgggctgcaggctgggcagggtcccctcccacgctcctgccgctgtctcccacgtcccccaggtgcgcggccaccatggcgtccagcgacgaggacggcaccaacggcggcgcctcggaggccggcgaggaccgggaggctcccggcgagcggaggcgcctgggggtcttggccaccgcctggctcaccttctacgacatcgccatgaccgcggggtggttggttctagctattgccatggtacgtttttatatggaaaaaggaacacacagaggtttatataaaagtattcagaagacacttaaatttttccagacatttgccttgcttgagatagttcactgtttaattggaattgtacctacttctgtgattgtgactggggtccaagtgagttcaagaatctttatggtgtggctcattactcacagtataaaaccaatccagaatgaagagagtgtggtgctttttctggtcgcgtggactgtgacagagatcactcgctattccttctacacattcagccttcttgaccacttgccatacttcattaaatgggccagatataatttttttatcatcttatatcctgttggagttgctggtgaacttcttacaatatacgctgccttgccgcatgtgaagaaaacaggaatgttttcaataagacttcctaacaaatacaatgtctcttttgactactattattttcttcttataaccatggcatcatatatacctttgtttccacaactctattttcatatgttacgtcaaagaagaaaggtgcttcatggagaggtgattgtagaaaaggatgattaaatgatctctgcaaacaaggtgctttttccagaataaccaagattacctgagtccaagttttaataacaagaataaacaactttgtgaaatatcatggattgtatggtttcttaaaatataacttgagacacgtggtatttgccagtatttgtgttcctcttgtgccagatctattttttacaagaactgtgcaaatatcagtaacttttgggtaggtattgattattaggaaaataattaggtgtattatctgggggaaaaaaaaacttttgctaagttttttttgaaacatgctcaaagctttttaaatcaatatttagaaattagtttaacgatttactattatacctgctagtgatatttatgtgatatttataaatgaaaataaatgcaaaattataacaa

SEQ ID NO: 24751 - DNA, 1551 bp, Homo sapiens
  source 1..1551: mol_type = unassigned DNA
ggtgggaatggcaggctgcgtcccactgctccagggcctggtcctggtcctcgccctccatcgtgtggagccctcagccacttcactgaaggaacgacatggactccattctgactctgcctgcacaggcgtccaggaaagcttatttctcccggcctccaaagcaaacgacgttctggtgaggtggaagcgtgcgggctcctatcttctggaagaactcttcgagggaaacttggaaaaagaatgttatgaagaaatctgtgtctatgaagaagcaagagaagtgtttgaaaatgaagtagtcactgatgaattctggagacgatataagggcggctccccgtgcatctcccagccctgcctccacaacggctcttgccaggacagcatctggggctacacctgcacctgctcccccggctatgagggcagcaactgcgagctggctaaaaatgaatgtcacccagagcggactgatgggtgtcaacacttctgcctcccaggacaggaatcctacacatgcagctgtgctcagggctacaggcttggtgaggaccacaaacagtgtgtgccccacgaccagtgtgcctgcggggtgctgacctctgagaagcgtgcaccggatctacaggacctcccgtggcaggtaaagttaacaaattccgaaggaaaagacttctgtggtggtgttataatacgggaaaattttgtactgacaacagcaaaatgttcactgttacacaggaatattactgtaaaaacatattttaacagaacgagccaagacccgctgatgatcaagataacgcacgtccatgtgcacatgcggtatgacgcggacgcgggggagaatgacctgtcactgctggagctggagtggcccatccagtgcccaggtgcggggctccccgtgtgcacccctgagaaagacttcgctgagcacctcctcatcccacgcaccaggggcctcctcagcggctgggcacgcaatggcactgacctgggcaactcgctgaccacgcggcctgtcacacttgtggagggggaggagtgcgggcaggtcctgaatgtgactgtcaccaccaggacctactgtgagagaagcagcgtggcggccatgcactggatggatggaagtgtggtcaccagagaacacagaggctcctggtttctcacgggggtcctgggctcgcagccagtaggagggcaggctcacatggtccttgtcaccaaggtctccaggtactcactctggtttaaacagatcatgaactaactgaaactcagctagccagaatgaacaacacaaccggaagcgggattccaagctggcactgccactgtggagggcgctgaaacttcatcacacactgagaggccgtcacagccccagaccacccgcttggcccacgcagcagcagagccgccgtttgctgggttgtttaccgagcactgtgacctttctttccctggaactctttatctcaatagagaccttaaaagaaaacatgagatacgttaaataataaaataagataatctgtcagtcat

SEQ ID NO: 24752 - DNA, 1485 bp, Homo sapiens
  source 1..1485: mol_type = unassigned DNA
ggtgggaatggcaggctgcgtcccactgctccagggcctggtcctggtcctcgccctccatcgtgtggagccctcagtatttctcccggcctccaaagcaaacgacgttctggtgaggtggaagcgtgcgggctcctatcttctggaagaactcttcgagggaaacttggaaaaagaatgttatgaagaaatctgtgtctatgaagaagcaagagaagtgtttgaaaatgaagtagtcactgatgaattctggagacgatataagggcggctccccgtgcatctcccagccctgcctccacaacggctcttgccaggacagcatctggggctacacctgcacctgctcccccggctatgagggcagcaactgcgagctggctaaaaatgaatgtcacccagagcggactgatgggtgtcaacacttctgcctcccaggacaggaatcctacacatgcagctgtgctcagggctacaggcttggtgaggaccacaaacagtgtgtgccccacgaccagtgtgcctgcggggtgctgacctctgagaagcgtgcaccggatctacaggacctcccgtggcaggtaaagttaacaaattccgaaggaaaagacttctgtggtggtgttataatacgggaaaattttgtactgacaacagcaaaatgttcactgttacacaggaatattactgtaaaaacatattttaacagaacgagccaagacccgctgatgatcaagataacgcacgtccatgtgcacatgcggtatgacgcggacgcgggggagaatgacctgtcactgctggagctggagtggcccatccagtgcccaggtgcggggctccccgtgtgcacccctgagaaagacttcgctgagcacctcctcatcccacgcaccaggggcctcctcagcggctgggcacgcaatggcactgacctgggcaactcgctgaccacgcggcctgtcacacttgtggagggggaggagtgcgggcaggtcctgaatgtgactgtcaccaccaggacctactgtgagagaagcagcgtggcggccatgcactggatggatggaagtgtggtcaccagagaacacagaggctcctggtttctcacgggggtcctgggctcgcagccagtaggagggcaggctcacatggtccttgtcaccaaggtctccaggtactcactctggtttaaacagatcatgaactaactgaaactcagctagccagaatgaacaacacaaccggaagcgggattccaagctggcactgccactgtggagggcgctgaaacttcatcacacactgagaggccgtcacagccccagaccacccgcttggcccacgcagcagcagagccgccgtttgctgggttgtttaccgagcactgtgacctttctttccctggaactctttatctcaatagagaccttaaaagaaaacatgagatacgttaaataataaaataagataatctgtcagtcat

SEQ ID NO: 24753 - DNA, 1001 bp, Homo sapiens
  source 1..1001: mol_type = unassigned DNA
cgtgggtgcaccctggaccccaccatggctcaccggccccccagccctgccctggcgtccgtgctgctggccttgctgctgagcggtgctgcccgagctgcggagatcgtgggcgggcacgaggcgcagccacactcccggccctacatggcctccctgcagatgcgggggaacccgggcagccacttctgcggaggcaccttgatccaccccagcttcgtgctgacggccgcgcactgcctgcgggacataccccagcgcctggtgaacgtggtgctcggagcccacaacgtgcggacgcaggagcccacccagcagcacttctcggtggctcaggtgtttctgaacaactacgacgcggagaacaaactgaacgacgttctcctcatccagctgagcagcccagccaacctcagtgcctccgtcgccacagtccagctgccacagcaggaccagccagtgccccacggcacccagtgcctggccatgggctggggccgcgtgggtgcccacgaccccccagcccaggtcctgcaggagctcaatgtcaccgtggtcaccttcttctgccggccacataacatttgcactttcgtccctcgccgcaaggccggcatctgcttcggagactcaggtggccccctgatctgtgatggcatcatccaaggaatagactccttcgtgatctggggatgtgccacccgccttttccctgacttcttcacgcgggtagccctctacgtggactggatccgttccacgctgcgccgtgtggaggccaagggccgcccctgaaccgcccctcccacagcgctggccgggaccccgagcctggctccaaaccctcgaggcggatctttggacagaagcagctcttccccgaacactgtggcgtccgggacggccccacccgtccccccacactccctcccacggggctccgggagacaggccggccctgcacctcaccccaccgtgacctcaataaacgttgaaactcc

SEQ ID NO: 24754 - DNA, 1041 bp, Homo sapiens
  source 1..1041: mol_type = unassigned DNA
aggcactgaccgggttgcagatcgggagacggaggctcggagaggcccaggggctgctctgccatcccccctttccctgcagcctgggggctccctgacgcctggactccccccctgcaggtgctgcccgagctgcggagatcgtgggcgggcacgaggcgcagccacactcccggccctacatggcctccctgcagatgcgggggaacccgggcagccacttctgcggaggcaccttgatccaccccagcttcgtgctgacggccgcgcactgcctgcgggacataccccagcgcctggtgaacgtggtgctcggagcccacaacgtgcggacgcaggagcccacccagcagcacttctcggtggctcaggtgtttctgaacaactacgacgcggagaacaaactgaacgacgttctcctcatccagctgagcagcccagccaacctcagtgcctccgtcgccacagtccagctgccacagcaggaccagccagtgccccacggcacccagtgcctggccatgggctggggccgcgtgggtgcccacgaccccccagcccaggtcctgcaggagctcaatgtcaccgtggtcaccttcttctgccggccacataacatttgcactttcgtccctcgccgcaaggccggcatctgcttcggagactcaggtggccccctgatctgtgatggcatcatccaaggaatagactccttcgtgatctggggatgtgccacccgccttttccctgacttcttcacgcgggtagccctctacgtggactggatccgttccacgctgcgccgtgtggaggccaagggccgcccctgaaccgcccctcccacagcgctggccgggaccccgagcctggctccaaaccctcgaggcggatctttggacagaagcagctcttccccgaacactgtggcgtccgggacggccccacccgtccccccacactccctcccacggggctccgggagacaggccggccctgcacctcaccccaccgtgacctcaataaacgttgaaactccccctg

SEQ ID NO: 24755 - DNA, 1293 bp, Homo sapiens
  source 1..1293: mol_type = unassigned DNA
ccgccatcccgccgtcccgctcggtgaccggagacacagccgggaacgcgactgatcaggctaccgagccgggccgcagggcgaaagcggtgcggtccgaggcctcagaaagggacacgcagcagcggaagtggcgctgactcagcccggcctccctgcagtcccctggcagcggtagcagccacaggggcgggcggctgggccacacgcctcccccgccctcggccccacccggccgcaccctaagccgcgcggcgtcacagagcgcatgcgtgccgcgggggatgccgggagcgcgcagtggcggcagcggcggcgacggcagtaacagcggcagctacagcggggacgcgagcggggcggtgacggtgtgggaggtggtctcactcttgggaaaactgctgggcaccgtcgtcgcgctgaaggtggttctgtacctgctccgagtgtgcttagcgatggcctggaaatccggcggcgccagccactcggagctaatccacaatctccgcaaaaatggaatcatcaagacagataaagtatttgaagtgatgctggctacagaccgctcccactatgcaaaatgtaacccatacatggattctccacaatcaataggtttccaagcaacaatcagtgctccacacatgcatgcatatgcgctagaacttctatttgatcagttgcatgaaggagctaaagctcttgatgtaggatctggaagtggaatccttactgcatgttttgcacgtatggttggatgtactggaaaagtcataggaattgatcacattaaagagctagtagatgactcagtaaataatgtcaggaaggacgatccaacacttctgtcttcagggagagtacagcttgttgtgggggatggaagaatgggatatgctgaagaagccccttatgatgccattcatgtgggagctgcagcccctgttgtaccccaggcgctaatagatcagttaaagcccggaggaagattgatattgcctgttggtcctgcaggcggaaaccaaatgttggagcagtatgacaagctacaagatggcagcatcaaaatgaagcctctgatgggggtgatatacgtgcctttaacagataaagaaaagcagtggtccaggtggaagtgattttatcttctgctctttcttcttccacacatgcaaggtgaaagggtgtggattttaagacattagactacaagagctgtttttggttgtcacctttatgctcctccattataacgtcagaaattcattacattaaaaatgtgaaaaatgt

SEQ ID NO: 24756 - DNA, 1733 bp, Homo sapiens
  source 1..1733: mol_type = unassigned DNA
gcggcgtcacagagcgcatgcgtgccgcgggggatgccgggagcgcgcagtggcggcagcggcggcgacggcagtaacagcggcagctacagcggggacgcgagcggggcggtgacggtgtgggaggtggtctcactcttgggaaaactgctgggcaccgtcgtcgcgctgaaggtggttctgtacctgctccgagtgtgcttagcgatggcctggaaatccggcggcgccagccactcggagctaatccacaatctccgcaaaaatggaatcatcaagacagataaagtatttgaagtgatgctggctacagaccgctcccactatgcaaaatgtaacccatacatggattctccacaatcaataggtttccaagcaacaatcagtgctccacacatgcatgcatatgcgctagaacttctatttgatcagttgcatgaaggagctaaagctcttgatgtaggatctggaagtggaatccttactgcatgttttgcacgtatggttggatgtactggaaaagtcataggaattgatcacattaaagagctagtagatgactcagtaaataatgtcaggaaggacgatccaacacttctgtcttcagggagagtacagcttgttgtgggggatggaagaatgggatatgctgaagaagccccttatgatgccattcatgtgggagctgcagcccctgttgtaccccaggcgctaatagatcagttaaagcccggaggaagattgatattgcctgttggtcctgcaggcggaaaccaaatgttggagcagtatgacaagctacaagatggcagcatcaaaatgaagcctctgatgggggtgatatacgtgcctttaacagataaagaaaagcagtggtccaggtggaagtgattttatcttctgctctttcttcttccacacatgcaagggatgaattgtaaaagcaacatcagcttgaccagtataaaattacagtggattgctcatctcagtcctcaaagctttttgaaaaccaacaccatcacagcttgttttggactttgttacactgttattttcagcatgaaaatgtgtgtttttttagggtttctgattcttcaaagaggcacagagccaaattggtagaggaaggatgcaaagtataaatttgtgtaatattactttaacatgcccatattttacttggaaatattaaaagaaagggttctgtaaaatggaaaacttagtttgtgaattgattttgaggagtggtttttcttttcttggacacttaattctgttctgatattaatttatcagattgcttttgtgcattggataacaccaccattcacaagttaagattcttggtatttggatatctgttagatgctactaagaaaatagagatgagctttctttttaaagcttttgatgtggtgtcatagaatagcatgttgtagatacaatcagctgctttgttaccttaaaactaggcatttgtaaatattaaaccataagatggcaggtgatgtcctgtaaacactcagctgttcagattggacataactgacttagttcttcccttctctctctctcaaaattataggagacttgtagtttagtgtggttttctgtttctaatttgctgctgataatgtatatgaacttaacatgctgtgtaagctgtgtcctagttcttgaacagtttatgcagtgctgctttgccaaataaagttaaaagtaaaagaggc

SEQ ID NO: 24757 - DNA, 1938 bp, Homo sapiens
  source 1..1938: mol_type = unassigned DNA
cccgccatcccgccgtcccgctcggtgaccggagacacagccgggaacgcgactgatcaggctaccgagccgggccgcagggcgaaagcggtgcggtccgaggcctcagaaagggacacgcagcagcggaagtggcgctgactcagcccggcctccctgcagtcccctggcagcggtagcagccacaggggcgggcggctgggccacacgcctcccccgccctcggccccacccggccgcaccctaagccgcgcggcgtcacagagcgcatgcgtgccgcgggggatgccgggagcgcgcagtggcggcagcggcggcgacggcagtaacagcggcagctacagcggggacgcgagcggggcggtgacggtgtgggaggtggtctcactcttgggaaaactgctgggcaccgtcgtcgcgctgaaggtggttctgtacctgctccgagtgtgcttagcgatggcctggaaatccggcggcgccagccactcggagctaatccacaatctccgcaaaaatggaatcatcaagacagataaagtatttgaagtgatgctggctacagaccgctcccactatgcaaaatgtaacccatacatggattctccacaatcaataggtttccaagcaacaatcagtgctccacacatgcatgcatatgcgctagaacttctatttgatcagttgcatgaaggagctaaagctcttgatgtaggatctggaagtggaatccttactgcatgttttgcacgtatggttggatgtactggaaaagtcataggaattgatcacattaaagagctagtagatgactcagtaaataatgtcaggaaggacgatccaacacttctgtcttcagggagagtacagcttgttgtgggggatggaagaatgggatatgctgaagaagccccttatgatgccattcatgtgggagctgcagcccctgttgtaccccaggcgctaatagatcagttaaagcccggaggaagattgatattgcctgttggtcctgcaggcggaaaccaaatgttggagcagtatgacaagctacaagatggcagcatcaaaatgaagcctctgatgggggtgatatacgtgcctttaacagataaagaaaagcagtggtccagggatgaattgtaaaagcaacatcagcttgaccagtataaaattacagtggattgctcatctcagtcctcaaagctttttgaaaaccaacaccatcacagcttgttttggactttgttacactgttattttcagcatgaaaatgtgtgtttttttagggtttctgattcttcaaagaggcacagagccaaattggtagaggaaggatgcaaagtataaatttgtgtaatattactttaacatgcccatattttacttggaaatattaaaagaaagggttctgtaaaatggaaaacttagtttgtgaattgattttgaggagtggtttttcttttcttggacacttaattctgttctgatattaatttatcagattgcttttgtgcattggataacaccaccattcacaagttaagattcttggtatttggatatctgttagatgctactaagaaaatagagatgagctttctttttaaagcttttgatgtggtgtcatagaatagcatgttgtagatacaatcagctgctttgttaccttaaaactaggcatttgtaaatattaaaccataagatggcaggtgatgtcctgtaaacactcagctgttcagattggacataactgacttagttcttcccttctctctctctcaaaattataggagacttgtagtttagtgtggttttctgtttctaatttgctgctgataatgtatatgaacttaacatgctgtgtaagctgtgtcctagttcttgaacagtttatgcagtgctgctttgccaaataaagttaaaagtaaaagaggc

SEQ ID NO: 24758 - DNA, 1984 bp, Homo sapiens
  source 1..1984: mol_type = unassigned DNA
ccgccatcccgccgtcccgctcggtgaccggagacacagccgggaacgcgactgatcaggctaccgagccgggccgcagggcgaaagcggtgcggtccgaggcctcagaaagggacacgcagcagcggaagtggcgctgactcagcccggcctccctgcagtcccctggcagcggtagcagccacaggggcgggcggctgggccacacgcctcccccgccctcggccccacccggccgcaccctaagccgcgcggcgtcacagagcgcatgcgtgccgcgggggatgccgggagcgcgcagtggcggcagcggcggcgacggcagtaacagcggcagctacagcggggacgcgagcggggcggtgacggtgtgggaggtggtctcactcttgggaaaactgctgggcaccgtcgtcgcgctgaaggtggttctgtacctgctccgagtgtgcttagcgatggcctggaaatccggcggcgccagccactcggagctaatccacaatctccgcaaaaatggaatcatcaagacagataaagtatttgaagtgatgctggctacagaccgctcccactatgcaaaatgtaacccatacatggattctccacaatcaataggtttccaagcaacaatcagtgctccacacatgcatgcatatgcgctagaacttctatttgatcagttgcatgaaggagctaaagctcttgatgtaggatctggaagtggaatccttactgcatgttttgcacgtatggttggatgtactggaaaagtcataggaattgatcacattaaagagctagtagatgactcagtaaataatgtcaggaaggacgatccaacacttctgtcttcagggagagtacagcttgttgtgggggatggaagaatgggatatgctgaagaagccccttatgatgccattcatgtgggagctgcagcccctgttgtaccccaggcgctaatagatcagttaaagcccggaggaagattgatattgcctgttggtcctgcaggcggaaaccaaatgttggagcagtatgacaagctacaagatggcagcatcaaaatgaagcctctgatgggggtgatatacgtgcctttaacagataaagaaaagcagtggtccaggtggaagtgattttatcttctgctctttcttcttccacacatgcaagggatgaattgtaaaagcaacatcagcttgaccagtataaaattacagtggattgctcatctcagtcctcaaagctttttgaaaaccaacaccatcacagcttgttttggactttgttacactgttattttcagcatgaaaatgtgtgtttttttagggtttctgattcttcaaagaggcacagagccaaattggtagaggaaggatgcaaagtataaatttgtgtaatattactttaacatgcccatattttacttggaaatattaaaagaaagggttctgtaaaatggaaaacttagtttgtgaattgattttgaggagtggtttttcttttcttggacacttaattctgttctgatattaatttatcagattgcttttgtgcattggataacaccaccattcacaagttaagattcttggtatttggatatctgttagatgctactaagaaaatagagatgagctttctttttaaagcttttgatgtggtgtcatagaatagcatgttgtagatacaatcagctgctttgttaccttaaaactaggcatttgtaaatattaaaccataagatggcaggtgatgtcctgtaaacactcagctgttcagattggacataactgacttagttcttcccttctctctctctcaaaattataggagacttgtagtttagtgtggttttctgtttctaatttgctgctgataatgtatatgaacttaacatgctgtgtaagctgtgtcctagttcttgaacagtttatgcagtgctgctttgccaaataaagttaaaagtaaaagaggc

SEQ ID NO: 24759 - DNA, 930 bp, Homo sapiens
  source 1..930: mol_type = unassigned DNA
gcggcagctacagcggggacgcgagcggggcggtgacggtgtgggaggtggtctcactcttgggaaaactgctgggcaccgtcgtcgcgctgaaggtggttctgtacctgctccgagtgtgcttagcgatggcctggaaatccggcggcgccagccactcggagctaatccacaatctccgcagtttccaagcaacaatcagtgctccacacatgcatgcatatgcgctagaacttctatttgatcagttgcatgaaggagctaaagctcttgatgtaggatctggaagtggaatccttactgcatgttttgcacgtatggttggatgtactggaaaagtcataggaattgatcacattaaagagctagtagatgactcagtaaataatgtcaggaaggacgatccaacacttctgtcttcagggagagtacagcttgttgtgggggatggaagaatgggatatgctgaagaagccccttatgatgccattcatgtgggagctgcagcccctgttgtaccccaggcgctaatagatcagttaaagcccggaggaagattgatattgcctgttggtcctgcaggcggaaaccaaatgttggagcagtatgacaagctacaagatggcagcatcaaaatgaagcctctgatgggggtgatatacgtgcctttaacagataaagaaaagcagtggtccaggtggaagtgattttatcttctgctctttcttcttccacacatgcaagggatgaattgtaaaagcaacatcagcttgaccagtataaaattacagtggattgctcatctcagtcctcaaagctttttgaaaaccaacaccatcacagcttgttttggactttgttacactgttattttcagcatgaaaatgtgtgtttttttagggtttctgattcttcaaagaggcacagagc

SEQ ID NO: 24760 - DNA, 2912 bp, Homo sapiens
  source 1..2912: mol_type = unassigned DNA
gtctggccccgcaggctcggtgaatcgaacgttgagcagggcggtgggtggtgcggagtgccgagcggcctcacccccaaccgtcggcccagtcggacggttccgaggcgttgccgggagccgggcgcggctctgtgtggactcggagaaacgcggttttgacgaagtatattatgggcagtacatctctttttacatgaaacaaatcttcttcttggatgacagtgggccgccatttggccacatggtgctggccttgggaggttatttaggaggattcgatggcaattttttgtggaacagaattggagcagaatacagtagcaacgtgcctgtgtggtccctgcgcctgctgccagcactcgcgggggccttgtcggtccccatggcctaccagatagtgttggagctccacttttctcattgtgccgccatgggagctgctctgttgatgcttatcgagaatgctctcatcactcagtcaaggctaatgcttttggaatcagtgttaatatttttcaatctattggccgtgttgtcctacctgaagttcttcaactgccaaaagcacagccctttttctctgagctggtggttctggctaacactgacaggggtcgcttgttcctgtgcagtgggcatcaagtacatgggtgtgttcacgtacgtgctcgtgctgggtgttgcagctgtccatgcctggcacctgcttggagaccagactttgtccaatgtctgtgtgttctgtcacttgctcgcccgagcagtggctttgctggtcatcccggtcgtcctgtacttactgttcttctacgtccacttgattctagtcttccgctctgggccccacgaccaaatcatgtccagtgccttccaggccagcttagagggaggactagctcggatcactcagggtcagccactggaggtggcctttgggtcccaggtcactctgaggaacgtctttgggaaacctgtgccctgctggcttcattcccaccaggacacctaccccatgatatatgagaacggccgaggcagctcccaccagcaacaggtgacctgttaccccttcaaagatgtcaataactggtggattgtaaaggatcccaggaggcaccagctggtggtgagcagccctccgagacctgtgaggcacggggacatggtgcagctggtccacggcatgaccacccgctccctgaacacgcatgatgttgcagcccccctgagcccccattcacaggaggtctcctgctacattgactataacatctccatgcccgcccagaacctctggagactggaaattgtgaacagaggatctgacacagacgtctggaagaccatcctctcagaggtccgctttgtgcacgtgaacacttccgctgtcttaaagctgagcggggctcacctccctgactgggggtatcggcaactggagatcgtcggggagaagctgtcccggggctaccacgggagcacggtgtggaacgtggaggagcaccgatacggcgcgagccaggagcagagggagcgggaacgggagctgcactcacctgcgcaggtggacgtcagcaggaacctcagcttcatggcgagattctcggagctgcagtggaggatgctggcgctgagaagtgatgactcggaacacaagtacagctccagcccactggagtgggtcaccctggacaccaatattgcctactggctgcaccccaggaccagcgctcagatccacctacttggaaacatagtgatctgggtttcgggcagcctcgctctggccatctacgccctgctgtccttgtggtacctgctccgacggcgaagaaatgtccatgacctccctcaggatgcctggctgcgctgggtgctggctggggcgctgtgtgccggtggctgggcagtgaactacctcccgttcttcctgatggagaagacactcttcctctaccactacctgcccgcactcaccttccaaatccttctgctccctgtggtcctgcagcacatcagcgaccacctgtgcaggtcccagctccagaggagcatcttcagcgccctggtggtggcctggtactcctccgcgtgccacgtgtccaacacgctgcgcccactcacctacggggacaagtcactctcgccacatgaactcaaggcccttcgctggaaagacagctgggacatcttgatccgaaaacactagaacaagagtgtggcaaagaacacccgtgctggggtcgggatgaggttgaagggtcttggtcaatgtacgtaatgagcagggtgggccccacgctgggaggacacgggctgggctgagcagggcctctagtggaacacatgggggtctcattgaaaagctctctgatgagcacctccttttgtgcaaagttaattttttctcgacaataaagatattccgtgtctttacccctgaactaagacacagggagtatttcagaggccagcgtaggagtcattgacaacaaaaagccgagaacccagggccagcagtggagcctcagcagaccagggcctggtccttgctaactgctgcagggtggagtttgatctggcagacccgatcctccttcatgaacacccagcaacctgagcaagtcccggccctgccctcagcgagcccggcaggcgtcctgggacagctcagtgttggagggccacctgaaccacgagccagggctggggcttgcatgtcattgtctatgacagcgtcaagactggcccttggcaccgtgctgtgtggaaaccctcccctctgagactccactgagacgtggctgagtgaaatcttcctcgtcagtggtcaaggtgtgtcatccatacagctccatgcctttgtcttttttaaatgtaattaaaaaaggaaccaactggcgtttgta

SEQ ID NO: 24761 - DNA, 2573 bp, Homo sapiens
  source 1..2573: mol_type = unassigned DNA
gttgagcagggcggtgggtggtgcggagtgccgagcggcctcacccccaaccgtcggcccagtcggacggttccgaggcgttgccgggagccgggcgcggctctgtgtggactcggagaaacgcggggcgtctgcctgagcccgcttttctacaagatgtggggatttttgaagcgccctgtagtggtgacggctgacatcaacttgagccttgtggccctgactgggatggggttactgagccggctgtggcgactcacctacccgcgggctgtggtgttatttaggaggattcgatggcaattttttgtggaacagaattggagcagtgtggttgcttttccagaatacagtagcaacgtgcctgtgtggtccctgcgcctgctgccagcactcgcgggggccttgtcggtccccatggcctaccagatagtgttggagctccacttttctcattgtgccgccatgggagctgctctgttgatgcttatcgagaatgctctcatcactcagtcaaggctaatgcttttggaatcagtgttaatatttttcaatctattggccgtgttgtcctacctgaagttcttcaactgccaaaagcacagccctttttctctgagctggtggttctggctaacactgacaggggtcgcttgttcctgtgcagtgggcatcaagtacatgggtgtgttcacgtacgtgctcgtgctgggtgttgcagctgtccatgcctggcacctgcttggagaccagactttgtccaatgtctgtgtgttctgtcacttgctcgcccgagcagtggctttgctggtcatcccggtcgtcctgtacttactgttcttctacgtccacttgattctagtcttccgctctgggccccacgaccaaatcatgtccagtgccttccaggccagcttagagggaggactagctcggatcactcagggtcagccactggaggtggcctttgggtcccaggtcactctgaggaacgtctttgggaaacctgtgccctgctggcttcattcccaccaggacacctaccccatgatatatgagaacggccgaggcagctcccaccagcaacaggtgacctgttaccccttcaaagatgtcaataactggtggattgtaaaggatcccaggaggcaccagctggtggtgagcagccctccgagacctgtgaggcacggggacatggtgcagctggtccacggcatgaccacccgctccctgaacacgcatgatgttgcagcccccctgagcccccattcacaggaggtctcctgctacattgactataacatctccatgcccgcccagaacctctggagactggaaattgtgaacagaggatctgacacagacgtctggaagaccatcctctcagaggtccgctttgtgcacgtgaacacttccgctgtcttaaagctgagcggggctcacctccctgactgggggtatcggcaactggagatcgtcggggagaagctgtcccggggctaccacgggagcacggtgtggaacgtggaggagcaccgatacggcgcgagccaggagcagagggagcgggaacgggagctgcactcacctgcgcaggtggacgtcagcaggaacctcagcttcatggcgagattctcggagctgcagtggaggatgctggcgctgagaagtgatgactcggaacacaagtacagctccagcccactggagtgggtcaccctggacaccaatattgcctactggctgcaccccaggaccagcgctcagatccacctacttggaaacatagtgatctgggtttcgggcagcctcgctctggccatctacgccctgctgtccttgtggtacctgctccgacggcgaagaaatgtccatgacctccctcaggatgcctggctgcgctgggtgctggctggggcgctgtgtgccggtggctgggcagtgaactacctcccgttcttcctgatggagaagacactcttcctctaccactacctgcccgcactcaccttccaaatccttctgctccctgtggtcctgcagcacatcagcgaccacctgtgcaggtcccagctccagaggagcatcttcagcgccctggtggtggcctggtactcctccgcgtgccacgtgtccaacacgctgcgcccactcacctacggggacaagtcactctcgccacatgaactcaaggcccttcgctggaaagacagctgggacatcttgatccgaaaacactagaacaagagtgtggcaaagaacacccgtgctggggtcgggatgaggttgaagggtcttggtcaatgtacgtaatgagcagggtgggccccacgctgggaggacacgggctgggctgagcagggcctctagtggaacacatgggggtctcattgaaaagctctctgatgagcacctccttttgtgcaaagttaattttttctcgacaataaagatattccgtgtctttacccctgaactaagacacagggagtatttcagaggccagcgtaggagtcattgacaacaaaaagccgagaacccagggccagcagtggagcctcagcagacca

SEQ ID NO: 24762 - DNA, 1741 bp, Homo sapiens
  source 1..1741: mol_type = unassigned DNA
tggcgaggaggagggtgcacttccccagcgaccctcggagcagcccggggtgctgtgggcattgggaaggaaggccagtaccagccccttatagcttccctcacttggggacttgtccctttgtctcaggctcaagaaattgtgaacagaggatctgacacagacgtctggaagaccatcctctcagaggtccgctttgtgcacgtgaacacttccgctgtcttaaagctgagcggggctcacctccctgactgggggtatcggcaactggagatcgtcggggagaagctgtcccggggctaccacgggagcacggtgtggaacgtggaggagcaccgatacggcgcgagccaggagcagagggagcgggaacgggagctgcactcacctgcgcaggtggacgtcagcaggaacctcagcttcatggcgagattctcggagctgcagtggaggatgctggcgctgagaagtgatgactcggaacacaagtacagctccagcccactggagtgggtcaccctggacaccaatattgcctactggctgcaccccaggaccagcgctcagatccacctacttggaaacatagtgatctgggtttcgggcagcctcgctctggccatctacgccctgctgtccttgtggtacctgctccgacggcgaagaaatgtccatgacctccctcaggatgcctggctgcgctgggtgctggctggggcgctgtgtgccggtggctgggcagtgaactacctcccgttcttcctgatggagaagacactcttcctctaccactacctgcccgcactcaccttccaaatccttctgctccctgtggtcctgcagcacatcagcgaccacctgtgcaggtcccagctccagaggagcatcttcagcgccctggtggtggcctggtactcctccgcgtgccacgtgtccaacacgctgcgcccactcacctacggggacaagtcactctcgccacatgaactcaaggcccttcgctggaaagacagctgggacatcttgatccgaaaacactagaacaagagtgtggcaaagaacacccgtgctggggtcgggatgaggttgaagggtcttggtcaatgtacgtaatgagcagggtgggccccacgctgggaggacacgggctgggctgagcagggcctctagtggaacacatgggggtctcattgaaaagctctctgatgagcacctccttttgtgcaaagttaattttttctcgacaataaagatattccgtgtctttacccctgaactaagacacagggagtatttcagaggccagcgtaggagtcattgacaacaaaaagccgagaacccagggccagcagtggagcctcagcagaccagggcctggtccttgctaactgctgcagggtggagtttgatctggcagacccgatcctccttcatgaacacccagcaacctgagcaagtcccggccctgccctcagcgagcccggcaggcgtcctgggacagctcagtgttggagggccacctgaaccacgagccagggctggggcttgcatgtcattgtctatgacagcgtcaagactggcccttggcaccgtgctgtgtggaaaccctcccctctgagactccactgagacgtggctgagtgaaatcttcctcgtcagtggtcaaggtgtgtcatccatacagctccatgcctttgtcttttttaaatgtaattaaaaaaggaaccaactggcgtttgta

SEQ ID NO: 24763 - DNA, 2652 bp, Homo sapiens
  source 1..2652: mol_type = unassigned DNA
gtctggccccgcaggctcggtgaatcgaacgttgagcagggcggtgggtggtgcggagtgccgagcggcctcacccccaaccgtcggcccagtcggacggttccgaggcgttgccgggagccgggcgcggctctgtgtggactcggagaaacgcggttttgacgaagtatattatgggcagtacatctctttttacatgaaacaaatcttcttcttggatgacagtgggccgccatttggccacatggtgctggccttgggaggttatttaggaggattcgatggcaattttttgtggaacagaattggagcagaatacagtagcaacgtgcctgtgtggtccctgcgcctgctgccagcactcgcgggggccttgtcggtccccatggcctaccagatagtgttggagctccacttttctcattgtgccgccatgggagctgctctgttgatgcttatcgagaatgctctcatcactcagtcaaggctaatgcttttggaatcagtgttaatatttttcaatctattggccgtgttgtcctacctgaagttcttcaactgccaaaagcacagtcttccgctctgggccccacgaccaaatcatgtccagtgccttccaggccagcttagagggaggactagctcggatcactcagggtcagccactggaggtggcctttgggtcccaggtcactctgaggaacgtctttgggaaacctgtgccctgctggcttcattcccaccaggacacctaccccatgatgtaagatatgagaacggccgaggcagctcccaccagcaacaggtgacctgttaccccttcaaagatgtcaataactggtggattgtaaaggatcccaggaggcaccagctggtggtgagcagccctccgagacctgtgaggcacggggacatggtgcagctggtccacggcatgaccacccgctccctgaacacgcatgatgttgcagcccccctgagcccccattcacaggaggtctcctgctacattgactataacatctccatgcccgcccagaacctctggagactggaaattgtgaacagaggatctgacacagacgtctggaagaccatcctctcagaggtccgctttgtgcacgtgaacacttccgctgtcttaaagctgagcggggctcacctccctgactgggggtatcggcaactggagatcgtcggggagaagctgtcccggggctaccacgggagcacggtgtggaacgtggaggagcaccgatacggcgcgagccaggagcagagggagcgggaacgggagctgcactcacctgcgcaggtggacgtcagcaggaacctcagcttcatggcgagattctcggagctgcagtggaggatgctggcgctgagaagtgatgactcggaacacaagtacagctccagcccactggagtgggtcaccctggacaccaatattgcctactggctgcaccccaggaccagcgctcagatccacctacttggaaacatagtgatctgggtttcgggcagcctcgctctggccatctacgccctgctgtccttgtggtacctgctccgacggcgaagaaatgtccatgacctccctcaggatgcctggctgcgctgggtgctggctggggcgctgtgtgccggtggctgggcagtgaactacctcccgttcttcctgatggagaagacactcttcctctaccactacctgcccgcactcaccttccaaatccttctgctccctgtggtcctgcagcacatcagcgaccacctgtgcaggtcccagctccagaggagcatcttcagcgccctggtggtggcctggtactcctccgcgtgccacgtgtccaacacgctgcgcccactcacctacggggacaagtcactctcgccacatgaactcaaggcccttcgctggaaagacagctgggacatcttgatccgaaaacactagaacaagagtgtggcaaagaacacccgtgctggggtcgggatgaggttgaagggtcttggtcaatgtacgtaatgagcagggtgggccccacgctgggaggacacgggctgggctgagcagggcctctagtggaacacatgggggtctcattgaaaagctctctgatgagcacctccttttgtgcaaagttaattttttctcgacaataaagatattccgtgtctttacccctgaactaagacacagggagtatttcagaggccagcgtaggagtcattgacaacaaaaagccgagaacccagggccagcagtggagcctcagcagaccagggcctggtccttgctaactgctgcagggtggagtttgatctggcagacccgatcctccttcatgaacacccagcaacctgagcaagtcccggccctgccctcagcgagcccggcaggcgtcctgggacagctcagtgttggagggccacctgaaccacgagccagggctggggcttgcatgtcattgtctatgacagcgtcaagactggcccttggcaccgtgctgtgtggaaaccctcccctctgagactccactgagacgtggctgagtgaaatcttcctcgtcagtggtcaaggtgtgtcatccatacagctccatgcctttgtcttttttaaatgtaattaaaaaaggaaccaactgg

SEQ ID NO: 24764 - DNA, 3123 bp, Homo sapiens
  source 1..3123: mol_type = unassigned DNA
cccgcaggctcggtgaatcgaacgttgagcagggcggtgggtggtgcggagtgccgagcggcctcacccccaaccgtcggcccagtcggacggttccgaggcgttgccgggagccgggcgcggctctgtgtggactcggagaaacgcggggcgtctgcctgagcccgcttttctacaagatgtggggatttttgaagcgccctgtagtggtgacggctgacatcaacttgagccttgtggccctgactgggatggggttactgagccggctgtggcgactcacctacccgcgggctgtggtttttgacgaagtatattatgggcagtacatctctttttacatgaaacaaatcttcttcttggatgacagtgggccgccatttggccacatggtgctggccttgggaggttatttaggaggattcgatggcaattttttgtggaacagaattggagcagaatacagtagcaacgtgcctgtgtggtccctgcgcctgctgccagcactcgcgggggccttgtcggtccccatggcctaccagatagtgttggagctccacttttctcattgtgccgccatgggagctgctctgttgatgcttatcgagaatgctctcatcactcagtcaaggctaatgcttttggaatcagtgttaatatttttcaatctattggccgtgttgtcctacctgaagttcttcaactgccaaaagcacagccctttttctctgagctggtggttctggctaacactgacaggggtcgcttgttcctgtgcagtgggcatcaagtacatgggtgtgttcacgtacgtgctcgtgctgggtgttgcagctgtccatgcctggcacctgcttggagaccagactttgtccaatgtaggtgctgatgtccagtgctgcatgaggccggcctgtatggggcagatgcagatgtcacagggggtctgtgtgttctgtcacttgctcgcccgagcagtggctttgctggtcatcccggtcgtcctgtacttactgttcttctacgtccacttgattctagtcttccgctctgggccccacgaccaaatcatgtccagtgccttccaggccagcttagagggaggactagctcggatcactcagggtcagccactggaggtggcctttgggtcccaggtcactctgaggaacgtctttgggaaacctgtgccctgctggcttcattcccaccaggacacctaccccatgatatatgagaacggccgaggcagctcccaccagcaacaggtgacctgttaccccttcaaagatgtcaataactggtggattgtaaaggatcccaggaggcaccagctggtggtgagcagccctccgagacctgtgaggcacggggacatggtgcagctggtccacggcatgaccacccgctccctgaacacgcatgatgttgcagcccccctgagcccccattcacaggaggtctcctgctacattgactataacatctccatgcccgcccagaacctctggagactggaaattgtgaacagaggatctgacacagacgtctggaagaccatcctctcagaggtccgctttgtgcacgtgaacacttccgctgtcttaaagctgagcggggctcacctccctgactgggggtatcggcaactggagatcgtcggggagaagctgtcccggggctaccacgggagcacggtgtggaacgtggaggagcaccgatacggcgcgagccaggagcagagggagcgggaacgggagctgcactcacctgcgcaggtggacgtcagcaggaacctcagcttcatggcgagattctcggagctgcagtggaggatgctggcgctgagaagtgatgactcggaacacaagtacagctccagcccactggagtgggtcaccctggacaccaatattgcctactggctgcaccccaggaccagcgctcagatccacctacttggaaacatagtgatctgggtttcgggcagcctcgctctggccatctacgccctgctgtccttgtggtacctgctccgacggcgaagaaatgtccatgacctccctcaggatgcctggctgcgctgggtgctggctggggcgctgtgtgccggtggctgggcagtgaactacctcccgttcttcctgatggagaagacactcttcctctaccactacctgcccgcactcaccttccaaatccttctgctccctgtggtcctgcagcacatcagcgaccacctgtgcaggtcccagctccagaggagcatcttcagcgccctggtggtggcctggtactcctccgcgtgccacgtgtccaacacgctgcgcccactcacctacggggacaagtcactctcgccacatgaactcaaggcccttcgctggaaagacagctgggacatcttgatccgaaaacactagaacaagagtgtggcaaagaacacccgtgctggggtcgggatgaggttgaagggtcttggtcaatgtacgtaatgagcagggtgggccccacgctgggaggacacgggctgggctgagcagggcctctagtggaacacatgggggtctcattgaaaagctctctgatgagcacctccttttgtgcaaagttaattttttctcgacaataaagatattccgtgtctttacccctgaactaagacacagggagtatttcagaggccagcgtaggagtcattgacaacaaaaagccgagaacccagggccagcagtggagcctcagcagaccagggcctggtccttgctaactgctgcagggtggagtttgatctggcagacccgatcctccttcatgaacacccagcaacctgagcaagtcccggccctgccctcagcgagcccggcaggcgtcctgggacagctcagtgttggagggccacctgaaccacgagccagggctggggcttgcatgtcattgtctatgacagcgtcaagactggcccttggcaccgtgctgtgtggaaaccctcccctctgagactccactgagacgtggctgagtgaaatcttcctcgtcagtggtcaaggtgtgtcatccatacagctccatgcctttgtcttttttaaatgtaattaaaaaaggaaccaactggcgtttgta

SEQ ID NO: 24765 - DNA, 3038 bp, Homo sapiens
  source 1..3038: mol_type = unassigned DNA
gaacgttgagcagggcggtgggtggtgcggagtgccgagcggcctcacccccaaccgtcggcccagtcggacggttccgaggcgttgccgggagccgggcgcggctctgtgtggactcggagaaacgcggggcgtctgcctgagcccgcttttctacaagatgtggggatttttgaagcgccctgtagtggtgacggctgacatcaacttgagccttgtggccctgactgggatggggttactgagccggctgtggcgactcacctacccgcgggctgtggtttttgacgaagtatattatgggcagtacatctctttttacatgaaacaaatcttcttcttggatgacagtgggccgccatttggccacatggtgctggccttgggaggttatttaggaggattcgatggcaattttttgtggaacagaattggagcagaatacagtagcaacgtgcctgtgtggtccctgcgcctgctgccagcactcgcgggggccttgtcggtccccatggcctaccagatagtgttggagctccacttttctcattgtgccgccatgggagctgctctgttgatgcttatcgagaatgctctcatcactcagtcaaggctaatgcttttggaatcagtgttaatatttttcaatctattggccgtgttgtcctacctgaagttcttcaactgccaaaagcacagccctttttctctgagctggtggttctggctaacactgacaggggtcgcttgttcctgtgcagtgggcatcaagtacatgggtgtgttcacgtacgtgctcgtgctgggtgttgcagctgtccatgcctggcacctgcttggagaccagactttgtccaatgtctgtgtgttctgtcacttgctcgcccgagcagtggctttgctggtcatcccggtcgtcctgtacttactgttcttctacgtccacttgattctagtcttccgctctgggccccacgaccaaatcatgtccagtgccttccaggccagcttagagggaggactagctcggatcactcagggtcagccactggaggtggcctttgggtcccaggtcactctgaggaacgtctttgggaaacctgtgccctgctggcttcattcccaccaggacacctaccccatgatatatgagaacggccgaggcagctcccaccagcaacaggtgacctgttaccccttcaaagatgtcaataactggtggattgtaaaggatcccaggaggcaccagctggtggtgagcagccctccgagacctgtgaggcacggggacatggtgcagctggtccacggcatgaccacccgctccctgaacacgcatgatgttgcagcccccctgagcccccattcacaggaggtctcctgctacattgactataacatctccatgcccgcccagaacctctggagactggaaattgtgaacagaggatctgacacagacgtctggaagaccatcctctcagaggtccgctttgtgcacgtgaacacttccgctgtcttaaagctgagcggggctcacctccctgactgggggtatcggcaactggagatcgtcggggagaagctgtcccggggctaccacgggagcacggtgtggaacgtggaggagcaccgatacggcgcgagccaggagcagagggagcgggaacgggagctgcactcacctgcgcaggtggacgtcagcaggaacctcagcttcatggcgagattctcggagctgcagtggaggatgctggcgctgagaagtgatgactcggaacacaagtacagctccagcccactggagtgggtcaccctggacaccaatattgcctactggctgcaccccaggaccagcgctcagatccacctacttggaaacatagtgatctgggtttcgggcagcctcgctctggccatctacgccctgctgtccttgtggtacctgctccgacggcgaagaaatgtccatgacctccctcaggatgcctggctgcgctgggtgctggctggggcgctgtgtgccggtggctgggcagtgaactacctcccgttcttcctgatggagaagacactcttcctctaccactacctgcccgcactcaccttccaaatccttctgctccctgtggtcctgcagcacatcagcgaccacctgtgcaggtcccagctccagaggagcatcttcagcgccctggtggtggcctggtactcctccgcgtgccacgtgtccaacacgctgcgcccactcacctacggggacaagtcactctcgccacatgaactcaaggcccttcgctggaaagacagctgggacatcttgatccgaaaacactagaacaagagtgtggcaaagaacacccgtgctggggtcgggatgaggttgaagggtcttggtcaatgtacgtaatgagcagggtgggccccacgctgggaggacacgggctgggctgagcagggcctctagtggaacacatgggggtctcattgaaaagctctctgatgagcacctccttttgtgcaaagttaattttttctcgacaataaagatattccgtgtctttacccctgaactaagacacagggagtatttcagaggccagcgtaggagtcattgacaacaaaaagccgagaacccagggccagcagtggagcctcagcagaccagggcctggtccttgctaactgctgcagggtggagtttgatctggcagacccgatcctccttcatgaacacccagcaacctgagcaagtcccggccctgccctcagcgagcccggcaggcgtcctgggacagctcagtgttggagggccacctgaaccacgagccagggctggggcttgcatgtcattgtctatgacagcgtcaagactggcccttggcaccgtgctgtgtggaaaccctcccctctgagactccactgagacgtggctgagtgaaatcttcctcgtcagtggtcaaggtgtgtcatccatacagctccatgcctttgtcttttttaaatgtaattaaaaaaggaaccaactggcgtttgta

SEQ ID NO: 24766 - DNA, 2821 bp, Homo sapiens
  source 1..2821: mol_type = unassigned DNA
acgcgcgctgctgcccgtctggccccgcaggctcggtgaatcgaacgttgagcagggcggtgggtggtgcggagtgccgagcggcctcacccccaaccgtcggcccagtcggacggttccgaggcgttgccgggagccgggcgcggctctgtgtggactcggagaaacgcgggttatttaggaggattcgatggcaattttttgtggaacagaattggagcagaatacagtagcaacgtgcctgtgtggtccctgcgcctgctgccagcactcgcgggggccttgtcggtccccatggcctaccagatagtgttggagctccacttttctcattgtgccgccatgggagctgctctgttgatgcttatcgagaatgctctcatcactcagtcaaggctaatgcttttggaatcagtgttaatatttttcaatctattggccgtgttgtcctacctgaagttcttcaactgccaaaagcacagccctttttctctgagctggtggttctggctaacactgacaggggtcgcttgttcctgtgcagtgggcatcaagtacatgggtgtgttcacgtacgtgctcgtgctgggtgttgcagctgtccatgcctggcacctgcttggagaccagactttgtccaatgtctgtgtgttctgtcacttgctcgcccgagcagtggctttgctggtcatcccggtcgtcctgtacttactgttcttctacgtccacttgattctagtcttccgctctgggccccacgaccaaatcatgtccagtgccttccaggccagcttagagggaggactagctcggatcactcagggtcagccactggaggtggcctttgggtcccaggtcactctgaggaacgtctttgggaaacctgtgccctgctggcttcattcccaccaggacacctaccccatgatatatgagaacggccgaggcagctcccaccagcaacaggtgacctgttaccccttcaaagatgtcaataactggtggattgtaaaggatcccaggaggcaccagctggtggtgagcagccctccgagacctgtgaggcacggggacatggtgcagctggtccacggcatgaccacccgctccctgaacacgcatgatgttgcagcccccctgagcccccattcacaggaggtctcctgctacattgactataacatctccatgcccgcccagaacctctggagactggaaattgtgaacagaggatctgacacagacgtctggaagaccatcctctcagaggtccgctttgtgcacgtgaacacttccgctgtcttaaagctgagcggggctcacctccctgactgggggtatcggcaactggagatcgtcggggagaagctgtcccggggctaccacgggagcacggtgtggaacgtggaggagcaccgatacggcgcgagccaggagcagagggagcgggaacgggagctgcactcacctgcgcaggtggacgtcagcaggaacctcagcttcatggcgagattctcggagctgcagtggaggatgctggcgctgagaagtgatgactcggaacacaagtacagctccagcccactggagtgggtcaccctggacaccaatattgcctactggctgcaccccaggaccagcgctcagatccacctacttggaaacatagtgatctgggtttcgggcagcctcgctctggccatctacgccctgctgtccttgtggtacctgctccgacggcgaagaaatgtccatgacctccctcaggatgcctggctgcgctgggtgctggctggggcgctgtgtgccggtggctgggcagtgaactacctcccgttcttcctgatggagaagacactcttcctctaccactacctgcccgcactcaccttccaaatccttctgctccctgtggtcctgcagcacatcagcgaccacctgtgcaggtcccagctccagaggagcatcttcagcgccctggtggtggcctggtactcctccgcgtgccacgtgtccaacacgctgcgcccactcacctacggggacaagtcactctcgccacatgaactcaaggcccttcgctggaaagacagctgggacatcttgatccgaaaacactagaacaagagtgtggcaaagaacacccgtgctggggtcgggatgaggttgaagggtcttggtcaatgtacgtaatgagcagggtgggccccacgctgggaggacacgggctgggctgagcagggcctctagtggaacacatgggggtctcattgaaaagctctctgatgagcacctccttttgtgcaaagttaattttttctcgacaataaagatattccgtgtctttacccctgaactaagacacagggagtatttcagaggccagcgtaggagtcattgacaacaaaaagccgagaacccagggccagcagtggagcctcagcagaccagggcctggtccttgctaactgctgcagggtggagtttgatctggcagacccgatcctccttcatgaacacccagcaacctgagcaagtcccggccctgccctcagcgagcccggcaggcgtcctgggacagctcagtgttggagggccacctgaaccacgagccagggctggggcttgcatgtcattgtctatgacagcgtcaagactggcccttggcaccgtgctgtgtggaaaccctcccctctgagactccactgagacgtggctgagtgaaatcttcctcgtcagtggtcaaggtgtgtcatccatacagctccatgcctttgtcttttttaaatgtaattaaaaaaggaaccaactggcgtttgta

SEQ ID NO: 24767 - DNA, 847 bp, Homo sapiens
  source 1..847: mol_type = unassigned DNA
cggagtgccgagcggcctcacccccaaccgtcggcccagtcggacggttccgaggcgttgccgggagccgggcgcggctctgtgtggactcggagaaacgcggggcgtctgcctgagcccgcttttctacaagatgtggggatttttgaagcgccctgtagtggtgacggctgacatcaacttgagccttgtggccctgactgggatggggttactgagccggctgtggcgactcacctacccgcgggctgtggtgttatttaggaggattcgatggcaattttttgtggaacagaattggagcagaatacagtagcaacgtgcctgtgtggtccctgcgcctgctgccagcactcgcgggggccttgtcggtccccatggcctaccagatagtgttggagctccacttttctcattgtgccgccatgggagctgctctgttgatgcttatcgagaatgctctcatcactcagtcaaggctaatgcttttggaatcagtgttaatatttttcaatctattggccgtgttgtcctacctgaagttcttcaactgccaaaagcacagtcttccgctctgggccccacgaccaaatcatgtccagtgccttccaggccagcttagagggaggactagctcggatcactcagggtcagccactggaggtggcctttgggtcccaggtcactctgaggaacgtctttgggaaacctgtgccctgctggcttcattcccaccaggacacctaccccatgatgtaagatatgagaacggccgaggcagctcccaccagcaacaggtgacctgttaccccttcaaagatgtcaataactggtggattgtaaagga

SEQ ID NO: 24768 - DNA, 812 bp, Homo sapiens
  source 1..812: mol_type = unassigned DNA
cggtgggtggtgcggagtgccgagcggcctcacccccaaccgtcggcccagtcggacggttccgaggcgttgccgggagccgggcgcggctctgtgtggactcggagaaacgcgggtacatttggggacaccggggacgagagcccagcccggacttgggggagtccgtcagtgccggacgcgggtccctggcttgcggacgggctggggccgggggcgtccccgtctttccggagctgggggcggggttcgggcccgggcagatgcggcgttcgggcggccgagccccgaagtaagaactccgtggcgcgtgcagccctagggaggaagggcgtgctgcgggtgcagtctcaggggcgtctgcctgagcccgcttttctacaagatgtggggatttttgaagcgccctgtagtggtgacggctgacatcaacttgagccttgtggccctgactgggatggggttactgagccggctgtggcgactcacctacccgcgggctgtggtttttgacgaagtatattatgggcagtacatctctttttacatgaaacaaatcttcttcttggatgacagtgggccgccatttggccacatggtgctggccttgggaggttatttaggaggattcgatggcaattttttgtggaacagaattggagcagaatacagtagcaacgtgcctgtgtggtccctgcgcctgctgccagcactcgcgggggccttgtcggtccccatggcctaccagatagtgttggagctccacttttctcattgtgccgccatgggagctgctctgttgatgcttatcg

SEQ ID NO: 24769 - DNA, 2189 bp, Homo sapiens
  source 1..2189: mol_type = unassigned DNA
gaacgttgagcagggcggtgggtggtgcggagtgccgagcggcctcacccccaaccgtcggcccagtcggacggttccgaggcgttgccgggagccgggcgcggctctgtgtggactcggagaaacgcgggttatttaggaggattcgatggcaattttttgtggaacagaattggagcagagaatgctctcatcactcagtcaaggctaatgcttttggaatcagtgttaatatttttcaatctattggccgtgttgtcctacctgaagttcttcaactgccaaaagcacagccctttttctctgagctggtggttctggctaacactgacaggggtcgcttgttcctgtgcagtgggcatcaagtacatgggtgtgttcacgtacgtgctcgtgctgggtgttgcagctgtccatgcctggcacctgcttggagaccagactttgtccaatgtctgtgtgttctgtcacttgctcgcccgagcagtggctttgctggtcatcccggtcgtcctgtacttactgttcttctacgtccacttgattctagtcttccgctctgggccccacgaccaaatcatgtccagtgccttccaggccagcttagagggaggactagctcggatcactcagggtcagccactggaggtggcctttgggtcccaggtcactctgaggaacgtctttgggaaacctgtgccctgctggcttcattcccaccaggacacctaccccatgatatatgagaacggccgaggcagctcccaccagcaacaggtgacctgttaccccttcaaagatgtcaataactggtggattgtaaaggatcccaggaggcaccagctggtggtgagcagccctccgagacctgtgaggcacggggacatggtgcagctggtccacggcatgaccacccgctccctgaacacgcatgatgttgcagcccccctgagcccccattcacaggaggtctcctgctacattgactataacatctccatgcccgcccagaacctctggagactggaaattgtgaacagaggatctgacacagacgtctggaagaccatcctctcagaggtccgctttgtgcacgtgaacacttccgctgtcttaaagctgagcggggctcacctccctgactgggggtatcggcaactggagatcgtcggggagaagctgtcccggggctaccacgggagcacggtgtggaacgtggaggagcaccgatacggcgcgagccaggagcagagggagcgggaacgggagctgcactcacctgcgcaggtggacgtcagcaggaacctcagcttcatggcgagattctcggagctgcagtggaggatgctggcgctgagaagtgatgactcggaacacaagtacagctccagcccactggagtgggtcaccctggacaccaatattgcctactggctgcaccccaggaccagcgctcagatccacctacttggaaacatagtgatctgggtttcgggcagcctcgctctggccatctacgccctgctgtccttgtggtacctgctccgacggcgaagaaatgtccatgacctccctcaggatgcctggctgcgctgggtgctggctggggcgctgtgtgccggtggctgggcagtgaactacctcccgttcttcctgatggagaagacactcttcctctaccactacctgcccgcactcaccttccaaatccttctgctccctgtggtcctgcagcacatcagcgaccacctgtgcaggtcccagctccagaggagcatcttcagcgccctggtggtggcctggtactcctccgcgtgccacgtgtccaacacgctgcgcccactcacctacggggacaagtcactctcgccacatgaactcaaggcccttcgctggaaagacagctgggacatcttgatccgaaaacactagaacaagagtgtggcaaagaacacccgtgctggggtcgggatgaggttgaagggtcttggtcaatgtacgtaatgagcagggtgggccccacgctgggaggacacgggctgggctgagcagggcctctagtggaacacatgggggtctcattgaaaagctctctgatgagcacctccttttgtgcaaagttaattttttctcgacaataaagatattccgtgtctttacccctgaactaagacacagggagtatttca

SEQ ID NO: 24770 - DNA, 3320 bp, Homo sapiens
  source 1..3320: mol_type = unassigned DNA
acgcgcgctgctgcccgtctggccccgcaggctcggtgaatcgaacgttgagcagggcggtgggtggtgcggagtgccgagcggcctcacccccaaccgtcggcccagtcggacggttccgaggcgttgccgggagccgggcgcggctctgtgtggactcggagaaacgcgggtacatttggggacaccggggacgagagcccagcccggacttgggggagtccgtcagtgccggacgcgggtccctggcttgcggacgggctggggccgggggcgtccccgtctttccggagctgggggcggggttcgggcccgggcagatgcggcgttcgggcggccgagccccgaagtaagaactccgtggcgcgtgcagccctagggaggaagggcgtgctgcgggtgcagtctcaggggcgtctgcctgagcccgcttttctacaagatgtggggatttttgaagcgccctgtagtggtgacggctgacatcaacttgagccttgtggccctgactgggatggggttactgagccggctgtggcgactcacctacccgcgggctgtggtttttgacgaagtatattatgggcagtacatctctttttacatgaaacaaatcttcttcttggatgacagtgggccgccatttggccacatggtgctggccttgggaggttatttaggaggattcgatggcaattttttgtggaacagaattggagcagaatacagtagcaacgtgcctgtgtggtccctgcgcctgctgccagcactcgcgggggccttgtcggtccccatggcctaccagatagtgttggagctccacttttctcattgtgccgccatgggagctgctctgttgatgcttatcgagaatgctctcatcactcagtcaaggctaatgcttttggaatcagtgttaatatttttcaatctattggccgtgttgtcctacctgaagttcttcaactgccaaaagcacagccctttttctctgagctggtggttctggctaacactgacaggggtcgcttgttcctgtgcagtgggcatcaagtacatgggtgtgttcacgtacgtgctcgtgctgggtgttgcagctgtccatgcctggcacctgcttggagaccagactttgtccaatgtctgtgtgttctgtcacttgctcgcccgagcagtggctttgctggtcatcccggtcgtcctgtacttactgttcttctacgtccacttgattctagtcttccgctctgggccccacgaccaaatcatgtccagtgccttccaggccagcttagagggaggactagctcggatcactcagggtcagccactggaggtggcctttgggtcccaggtcactctgaggaacgtctttgggaaacctgtgccctgctggcttcattcccaccaggacacctaccccatgatatatgagaacggccgaggcagctcccaccagcaacaggtgacctgttaccccttcaaagatgtcaataactggtggattgtaaaggatcccaggaggcaccagctggtggtgagcagccctccgagacctgtgaggcacggggacatggtgcagctggtccacggcatgaccacccgctccctgaacacgcatgatgttgcagcccccctgagcccccattcacaggaggtctcctgctacattgactataacatctccatgcccgcccagaacctctggagactggaaattgtgaacagaggatctgacacagacgtctggaagaccatcctctcagaggtccgctttgtgcacgtgaacacttccgctgtcttaaagctgagcggggctcacctccctgactgggggtatcggcaactggagatcgtcggggagaagctgtcccggggctaccacgggagcacggtgtggaacgtggaggagcaccgatacggcgcgagccaggagcagagggagcgggaacgggagctgcactcacctgcgcaggtggacgtcagcaggaacctcagcttcatggcgagattctcggagctgcagtggaggatgctggcgctgagaagtgatgactcggaacacaagtacagctccagcccactggagtgggtcaccctggacaccaatattgcctactggctgcaccccaggaccagcgctcagatccacctacttggaaacatagtgatctgggtttcgggcagcctcgctctggccatctacgccctgctgtccttgtggtacctgctccgacggcgaagaaatgtccatgacctccctcaggatgcctggctgcgctgggtgctggctggggcgctgtgtgccggtggctgggcagtgaactacctcccgttcttcctgatggagaagacactcttcctctaccactacctgcccgcactcaccttccaaatccttctgctccctgtggtcctgcagcacatcagcgaccacctgtgcaggtcccagctccagaggagcatcttcagcgccctggtggtggcctggtactcctccgcgtgccacgtgtccaacacgctgcgcccactcacctacggggacaagtcactctcgccacatgaactcaaggcccttcgctggaaagacagctgggacatcttgatccgaaaacactagaacaagagtgtggcaaagaacacccgtgctggggtcgggatgaggttgaagggtcttggtcaatgtacgtaatgagcagggtgggccccacgctgggaggacacgggctgggctgagcagggcctctagtggaacacatgggggtctcattgaaaagctctctgatgagcacctccttttgtgcaaagttaattttttctcgacaataaagatattccgtgtctttacccctgaactaagacacagggagtatttcagaggccagcgtaggagtcattgacaacaaaaagccgagaacccagggccagcagtggagcctcagcagaccagggcctggtccttgctaactgctgcagggtggagtttgatctggcagacccgatcctccttcatgaacacccagcaacctgagcaagtcccggccctgccctcagcgagcccggcaggcgtcctgggacagctcagtgttggagggccacctgaaccacgagccagggctggggcttgcatgtcattgtctatgacagcgtcaagactggcccttggcaccgtgctgtgtggaaaccctcccctctgagactccactgagacgtggctgagtgaaatcttcctcgtcagtggtcaaggtgtgtcatccatacagctccatgcctttgtcttttttaaatgtaattaaaaaaggaaccaactggcgtttgta

SEQ ID NO: 24771 - DNA, 691 bp, Homo sapiens
  source 1..691: mol_type = unassigned DNA
gtcggacggttccgaggcgttgccgggagccgggcgcggctctgtgtggactcggagaaacgcgggttatttaggaggattcgatggcaattttttgtggaacagaattggagcagaatacagtagcaacgtgcctgtgtggtccctgcgcctgctgccagcactcgcgggggccttgtcggtccccatggcctaccagatagtgttggagctccacttttctcattgtgccgccatgggagctgctctgttgatgcttatcgagaatgctctcatcactcagtcaaggctaatgcttttggaatcagtgttaatatttttcaatctattggccgtgttgtcctacctgaagttcttcaactgccaaaagcacagccctttttctctgagctggtggttctggctaacactgacaggggtcgcttgttcctgtgcagtgggcatcaagtacatgggtgtgttcacgtacgtgctcgtgctgggtgttgcagctgtccatgcctggcacctgcttggagaccagactttgtccaatgtctgtgtgttctgtcacttgctcgcccgagcagtggctttgctggtcatcccggtcgtcctgtacttactgttcttctacgtccacttgattctagtcttccgctctgggccccacgaccaaatcatgtccagtgccttccaggccagcttagag

SEQ ID NO: 24772 - DNA, 1168 bp, Homo sapiens
  source 1..1168: mol_type = unassigned DNA
gtctggccccgcaggctcggtgaatcgaacgttgagcagggcggtgggtggtgcggagtgccgagcggcctcacccccaaccgtcggcccagtcggacggttccgaggcgttgccgggagccgggcgcggctctgtgtggactcggagaaacgcgggttatttaggaggattcgatggcaattttttgtggaacagaattggagcagaatacagtagcaacgtgcctgtgtggtccctgcgcctgctgccagcactcgcgggggccttgtcggtccccatggcctaccagatagtgttggagctccacttttctcattgtgccgccatgggagctgctctgttgatgcttatcgagaatgctctcatcactcagtcaaggctaatgcttttggaatcagtgttaatatttttcaatctattggccgtgttgtcctacctgaagttcttcaactgccaaaagcacagccctttttctctgagctggtggttctggctaacactgacaggggtcgcttgttcctgtgcagtgggcatcaagtacatgggtgtgttcacgtacgtgctcgtgctgggtgttgcagctgtccatgcctggcacctgcttggagaccagactttgtccaatgtaggtgctgatgtccagtgctgcatgaggccggcctgtatggggcagatgcagatgtcacagggggtctgtgtgttctgtcacttgctcgcccgagcagtggctttgctggtcatcccggtcgtcctgtacttactgttcttctacgtccacttgattctagtcttccgctctgggccccacgaccaaatcatgtccagtgccttccaggccagcttagagggaggactagctcggatcactcagggtcagccactggaggtggcctttgggtcccaggtcactctgaggaacgtctttgggaaacctgtgccctgctggcttcattcccaccaggacacctaccccatgatatatgagaacggccgaggcagctcccaccagcaacaggtgacctgttaccccttcaaagatgtcaataactggtggattgtaaaggatcccaggaggcaccagctggtggtgagcagccctccgagacctgtgaggcacggggacatggtgcagctggtccacggcatgaccacccgctccctgaacac

SEQ ID NO: 24773 - DNA, 791 bp, Homo sapiens
  source 1..791: mol_type = unassigned DNA
ccgagcggcctcacccccaaccgtcggcccagtcggacggttccgaggcgttgccgggagccgggcgcggctctgtgtggactcggagaaacgcggttttgacgaagtatattatgggcagtacatctctttttacatgaaacaaatcttcttcttggatgacagtgggccgccatttggccacatggtgctggccttgggaggttatttaggaggattcgatggcaattttttgtggaacagaattggagcagaatacagtagcaacgtgcctgtgtggtccctgcgcctgctgccagcactcgcgggggccttgtcggtccccatggcctaccagatagtgttggagctccacttttctcattgtgccgccatgggagctgctctgttgatgcttatcgagaatgctctcatcactcagtcaaggctaatgcttttggaatcagtgttaatatttttcaatctattggccgtgttgtcctacctgaagttcttcaactgccaaaagcacagccctttttctctgagctggtggttctggctaacactgacaggggtcgcttgttcctgtgcagtgggcatcaagtacatgggtgtgttcacgtacgtgctcgtgctgggtgttgcagctgtccatgcctggcacctgcttggagaccagactttgtccaatgtaggtgctgatgtccagtgctgcatgaggccggcctgtatggggcagatgcagatgtcacagggggtctgtgtgttctgtcacttgctcgcccgagcagtggctttgctggtcatcc

SEQ ID NO: 24774 - DNA, 1587 bp, Homo sapiens
  source 1..1587: mol_type = unassigned DNA
aacgttgagcagggcggtgggtggtgcggagtgccgagcggcctcacccccaaccgtcggcccagtcggacggttccgaggcgttgccgggagccgggcgcggctctgtgtggactcggagaaacgcgggttatttaggaggattcgatggcaattttttgtggaacagaattggagcaggtctgtgtgttctgtcacttgctcgcccgagcagtggctttgctggtcatcccggtcgtcctgtacttactgttcttctacgtccacttgattctagtcttccgctctgggccccacgaccaaatcatgtccagtgccttccaggccagcttagagggaggactagctcggatcactcagggtcagccactggaggtggcctttgggtcccaggtcactctgaggaacgtctttgggaaacctgtgccctgctggcttcattcccaccaggacacctaccccatgatatatgagaacggccgaggcagctcccaccagcaacaggtgacctgttaccccttcaaagatgtcaataactggtggattgtaaaggatcccaggaggcaccagctggtggtgagcagccctccgagacctgtgaggcacggggacatggtgcagctggtccacggcatgaccacccgctccctgaacacgcatgatgttgcagcccccctgagcccccattcacaggaggtctcctgctacattgactataacatctccatgcccgcccagaacctctggagactggaaattgtgaacagaggatctgacacagacgtctggaagaccatcctctcagaggtccgctttgtgcacgtgaacacttccgctgtcttaaagctgagcggggctcacctccctgactgggggtatcggcaactggagatcgtcggggagaagctgtcccggggctaccacgggagcacggtgtggaacgtggaggagcaccgatacggcgcgagccaggagcagagggagcgggaacgggagctgcactcacctgcgcaggtggacgtcagcaggaacctcagcttcatggcgagattctcggagctgcaggctcagatccacctacttggaaacatagtgatctgggtttcgggcagcctcgctctggccatctacgccctgctgtccttgtggtacctgctccgacggcgaagaaatgtccatgacctccctcaggatgcctggctgcgctgggtgctggctggggcgctgtgtgccggtggctgggcagtgaactacctcccgttcttcctgatggagaagacactcttcctctaccactacctgcccgcactcaccttccaaatccttctgctccctgtggtcctgcagcacatcagcgaccacctgtgcaggtcccagctccagaggagcatcttcagcgccctggtggtggcctggtactcctccgcgtgccacgtgtccaacacgctgcgcccactcacctacggggacaagtcactctcgccacatgaactcaaggcccttcgctggaaagacagctgggacatcttgatccgaaaacactagaacaagagtgtggcaaagaacacccgtgctggggtcgggatg

SEQ ID NO: 24775 - DNA, 4876 bp, Homo sapiens
  source 1..4876: mol_type = unassigned DNA
tgcgcctcctgccgcctcctagcggcccgggccgcgaccacgctgcccgccccgccccgagcccggggccccgcgctccgctgcagtgaagggcgttgcatttcccggggtaccccgagctgccctcttgtgactccttggcggggcggctggtcagacaaagtgtgcctccgggccggagggcgacccagaggagggggaagatgccgccggccacgggcggaggcctggcagagtccgagctgcgtccccggaggggccgctgtggcccccaggctgctagggccgcaggccgggacgtggccgctgaggctgtggcgcgaagccccaaacggcctgcttggggctcacggcgcttcgaggcggtcggctggtgggccctgctggccttggtgacgctgctgtccttcgccacccgcttccaccgcttggacgagccgccgcacatctgttgggatgagactcactttggaaaaatgggaagttactatatcaaccgtacatttttctttgatgtgcacccgcccctgggaaagatgctgataggtcttgctggctacctgagtggatatgatggtacctttttgttccagaagcctggggataaatatgagcatcacagctacatgggaatgagaggattctgtgcattccttggctcctggctggtcccctttgcctacctcactgtactggatctgtccaagtccctctcggcagcactgctcacagctgccctcctcacctttgacacgggatgcctcactctgtcccagtacatcctccttgaccccatcctgatgttcttcatcatggctgccatgctgagcatggtcaagtacaactcttgcgccgacaggcccttctctgccccctggtggttctggctcagcctgactggcgttagtcttgctggtgctttaggggtcaagtttgttggcctctttatcatccttcaagtggggctgaacaccattgcagacctttggtacctgttcggagacctcagtctttcattggtgactgtgggaaaacacctgactgctcgtgtcctgtgcctcatagtgctgcccctggctctctatacagccacctttgctgttcacttcatggtgctgagtaaaagtggccctggtgacggtttcttcagttctgccttccaggcccggctttcagggaacaacctgcacaatgcttccatccctgaacacctggcctacggctctgtgatcactgtgaagaacctccggatggccatcggctatctgcactcccacaggcacctctaccccgagggcattggtgcccgtcagcagcaggtcaccacctatttgcacaaggactacaacaacctgtggattatcaagaaacataacacaaactcagatcccctagacccttccttcccagtggagtttgtaagacatggagacattattcgactagaacacaaagaaacttcccggaacttgcacagtcactatcatgaggcccccatgacccggaagcactatcaggtcaccggctatggcataaatggaacaggggactcaaatgatttctggcggattgaggtcgtaaacaggaaatttggaaaccggatcaaagtgctgagaagtcgaattcgcttcatccatttggtcacaggttgtgtcctgggctcctcgggaaaggttctgcccaagtggggctgggagcagttggaagttacttgcaccccatacctgaaagaaaccctcaactccatctggaatgtggaggaccatatcaatcccaagttgccaaacatcagcctggatgtgctacagcccagttttcctgagatcttgctggaatcccacatggtcatgatccgggggaacagtggcctcaaacccaaggacaatgagttcacgtccaaaccctggcactggcctatcaactatcagggcctacgcttctcaggggtcaatgacacagatttccgagtctatctgcttggcaacccggtggtttggtggctgaatctgttgagcatcgccctctacctcctctcagggagcatcattgctgtagccatgcagagaggggcacggctgccagcggaggttgcagggttgtcccaggtcctgcttcgaggaggcggccaggtcctgctcggctggacactccattacttcccgtttttcctgatgggccgggtcctctacttccaccactacttcccagccatgctcttctcaagcatgttgacaggcattctgtgggacaccctcctgcggctctgtgcctggggcttggcctcatggcccctggcgaggggcatacatgtggcgggaatcctgagcctgctcctgggaactgcctacagcttctacctcttccaccctctggcttacgggatggttggtcccctggcccaggacccccaaagtccaatggcaggactaaggtggctggactcatgggacttttgaggccactgcaaagattccagcctgggtccaggaacttcccaggagagccagctgggaagcagtactggaccatccggccatgaggaagctgcctaaggagcccgaagaattctgctgctcaccaggacccagctctgggagtgcagctggaatggaacccagcattggagagagccgggagagagccgcagctccgtccacagcaccacggagaggacagcgcctcttgggctgctccctcgtgcacagcgcaggggaggatgggtgccagagggtgggagtgggtgcgcgtgtgtgtatgtgagggcatgttgtccatatccctgtggaatacagaccgtgtaactggacagctgagtgtcataaactctaaaatagtccaggctatagtaatattttctggtatttttttctgttggatttctttggttttggtttgtaagatccatcaaaaattctcagacctctgagagggccttgagggcagagaatactgacctcaccttgggatgtcaccaaaggcagagcagatgggactgtcaaagttgtgctgccctccctcccacaaacaaatgaatccagcgtggaggaaggcgcgccgccccgagctggagggcctggctcccaccatgccccccagtggctgcaggtagctggacttcctgcctgtgacgcacagagagcagcggactccggagcgtcagcctgccttagcccttggttcctcgttttttgggattgtcacactgtgacactcgggaggaacgatgtcctatcctgggctgctcagtgttcccaggccctgtgtgccagaggccaggtctctccaagtgcatctagcctggcctggagggcaaggcagatgcattctcctggctgctgggagagcccatgggaaccttgcttagcgcccaaggtagatgagagacagggcagggaatctgcgtggtgctgggatgtggggactctggcctctccagactaatgttcctgtcacctgctgagctttcccagtgtcacttctgcagtcctcctctgctcacccctccctcactccgtgggcaattccctttctctctgtcactgcttcagcagtgaagacccatggcacctagaaatgcatgccagcttcctgcgtctaccactctgcagctcaaacaagaagctcagagctgccccttccacttcctccccaaaagggatgaagaaaaccctgtggtagaaccaaaccacccaaggccagcccttaagcctgcctccaccttcctggtgcatgacaaaatatttcttttgtctcagaggactttgatgcttcaatatttaatgatgaatccgccacactccattttccctcctctgaagctcccaacaactctgacagggtcagatctctttaaagcatcttcaggaggcggttgccacggagactggatattggtcccagggacaggctgtgctacctactgggtggtggggagggaagcttctggccatgcttgggcattcagaccaaccatcattaatgttaatagaggaaatgcagcaacgtcaaaagcaaggcaggttggttaattagatctggggcccgatgacctccctttcccactgctacagcccttttgacttcccccagcaggaagcgctgtctgtgcggctgagtctgggccacttgcttaattgcatttctggcagggaaggagaggagggatggagaagctctgctcgctgcttccacctcaccgtgtgtcctcccctcccctcccttcctctcctccccacaggcggaattgctttcttctgagccgggtgggctctcctgcagggagaatgcaggggtctgtgcttggctcttagcaaagcaggtggcccacagtgacctccaggaggtggctgattttcctttgtgccttcttatttctcagtaggaacttggaagggaagagctctgaaggagccagaggggcagccaccttgcatgagggtgaggaaggagaagcccagccagcctctacccatccctccctcccaattaggctgcactggggccgaacgcttccctgggctcccactgccttctaaggagccaaggagaattccctgcccactttctgttcctccatgcccaaactggcagatgcttctctgggagcaaggccacatgggctgatgcagctttgagtgctcaggttctgttttctggaagttgctggagaagggctgtcagggtgcttctatgaatatgggcttcagctgtagcacttggcagaaacgtgatgtgtcccacaaactgctggtggaggaagaagatgttcgtcagccaattcaacctccagccagcttcttgagcctatttggtttaaaaaaaaaaagtcttctaatcagaagccactgattttataataaataacacttgttttgaa

SEQ ID NO: 24776 - DNA, 1424 bp, Homo sapiens
  source 1..1424: mol_type = unassigned DNA
aggaagcaaagaaggacctgggctttgggaagatctaaagacccaggaaggtctctgggtgggataaagccaagatgaaactccccttacttctggctcttctatttggggcagtttctgctcttcatctaaggtctgagacttccacctttgagacccctttgggtgctaagacgctgcctgaggatgaggagacaccagagcaggagatggaggagaccccttgcagggagctggaggaagaggaggagtggggctctggaagtgaagatgcctccaagaaagatggggctgttgagtctatctcagtgccagatatggtggacaaaaaccttacgtgtcctgaggaagaggacacagtaaaagtggtgggcatccctgggtgccagacctgccgctacctcctggtgagaagtcttcagacgtttagtcaagcttggtttacttgccggaggtgctacaggggcaacctggtttccatccacaacttcaatattaattatcgaatccagtgttctgtcagcgcgctcaaccagggtcaagtctggattggaggcaggatcacaggctcgggtcgctgcagacgctttcagtgggttgacggcagccgctggaactttgcatactgggctgctcaccagccctggtcccgcggtggtcactgcgtggccctgtgtacccgaggaggccactggcgtcgagcccactgcctcagaagacttcctttcatctgttcctactgagctggtcccagccagcagttcagagctgccctctcctgggcagctgcctcccctcctctgcttgccatccctccctccacctccctgcaataaaatgggttttactgaaatggatttattttctcctctgatcgcggatccactctgcttagccctcattgaaacttcttccttatcatctctccccacaccacaactttcatagaagtgtcagaagctactactccttgaggaggaggatggagggtggagttgggtctatggagccttttggagatggaggaatgggctcagctagttctcttcatagaacacctgattactgggcacctgcatagtgctgccaggacctttcaaggttgtaggtagactcccaatggcccagtttgcatctctgtaaccaaaggccttttctctctctctctccaaccccagaactgtggttggttttatatgtaaggaagttaacatgtccctgggaacagtccacaacattcaggaatgaatgtataagtaccgcaatccccggcccctcaagtggaataaatctaacatgtattgggcaccatttcccagtggcctgctgtggtagttggccttattccatgcatttttatgggctgccttcccttcctcaactgcattctctgctccttcctactctctgcaactcccaaataa

SEQ ID NO: 24777 - DNA, 1367 bp, Homo sapiens
  source 1..1367: mol_type = unassigned DNA
gctttgggaagatctaaagacccaggaaggtctctgggtgggtgagtgctttctctgctgtggtggagctggtgacagtttattctcccaggaggtccctggctgtggctgacagtttctggagggctggcaggcgtctacctgtggctttcaggataaagccaagatgaaactccccttacttctggctcttctatttggggcagtttctgctcttcatctaaggtctgagacttccacctttgagacccctttgggtgctaagacgctgcctgaggatgaggagacaccagagcaggagatggaggagaccccttgcagggagctggaggaagaggaggagtggggctctggaagtgaagatgcctccaagaaagatggggctgttgagtctatctcagtgccagatatggtggacaaaaaccttacgtgtcctgaggaagaggacacagtaaaagtggtgggcatccctgggtgccagacctgccgctacctcctggtgagaagtcttcagacgtttagtcaagcttggtttacttgccggaggtgctacaggggcaacctggtttccatccacaacttcaatattaattatcgaatccagtgttctgtcagcgcgctcaaccagggtcaagtctggattggaggcaggatcacaggctcgggtcgctgcagacgctttcagtgggttgacggcagccgctggaactttgcatactgggctgctcaccagccctggtcccgcggtggtcactgcgtggccctgtgtacccgaggaggccactggcgtcgagcccactgcctcagaagacttcctttcatctgttcctactgagctggtcccagccagcagttcagagctgccctctcctgggcagctgcctcccctcctctgcttgccatccctccctccacctccctgcaataaaatgggttttactgaaatggatttattttctcctctgatcgcggatccactctgcttagccctcattgaaacttcttccttatcatctctccccacaccacaactttcatagaagtgtcagaagctactactccttgaggaggaggatggagggtggagttgggtctatggagccttttggagatggaggaatgggctcagctagttctcttcatagaacacctgattactgggcacctgcatagtgctgccaggacctttcaaggttgtaggtagactcccaatggcccagtttgcatctctgtaaccaaaggccttttctctctctctctccaaccccagaactgtggttggttttatatgtaaggaagttaacatgtccctgggaacagtccacaacattcaggaatgaatgtataagtaccgcaatccccggccc

SEQ ID NO: 24778 - DNA, 1350 bp, Homo sapiens
  source 1..1350: mol_type = unassigned DNA
ggctttgggaagatctaaagacccaggaaggtctctgggtgggataaagccaagatgaaactccccttacttctggctcttctatttggggcagtttctgctcttcatctaaggtctgagacttccacctttgagacccctttgggtgctaagacgctgcctgaggatgaggagacaccagagcaggagatggaggagaccccttgcagggagctggaggaagaggaggagtggggctctggaagtgaagatgcctccaagaaagatggggctgttgagtctatctcagtgccagatatggtggacaaaaaccttacgtgtcctgaggaagaggacacagtaaaagtggtgggcatccctgggtgccagacctgccgctacctcctgtttacttgccggaggtgctacaggggcaacctggtttccatccacaacttcaatattaattatcgaatccagtgttctgtcagcgcgctcaaccagggtcaagtctggattggaggcaggatcacaggctcgggtcgctgcagacgctttcagtgggttgacggcagccgctggaactttgcatactgggctgctcaccagccctggtcccgcggtggtcactgcgtggccctgtgtacccgaggaggccactggcgtcgagcccactgcctcagaagacttcctttcatctgttcctactgagctggtcccagccagcagttcagagctgccctctcctgggcagctgcctcccctcctctgcttgccatccctccctccacctccctgcaataaaatgggttttactgaaatggatttattttctcctctgatcgcggatccactctgcttagccctcattgaaacttcttccttatcatctctccccacaccacaactttcatagaagtgtcagaagctactactccttgaggaggaggatggagggtggagttgggtctatggagccttttggagatggaggaatgggctcagctagttctcttcatagaacacctgattactgggcacctgcatagtgctgccaggacctttcaaggttgtaggtagactcccaatggcccagtttgcatctctgtaaccaaaggccttttctctctctctctccaaccccagaactgtggttggttttatatgtaaggaagttaacatgtccctgggaacagtccacaacattcaggaatgaatgtataagtaccgcaatccccggcccctcaagtggaataaatctaacatgtattgggcaccatttcccagtggcctgctgtggtagttggccttattccatgcatttttatgggctgccttcccttcctcaactgcattctctgctccttccta

SEQ ID NO: 24779 - DNA, 869 bp, Homo sapiens
  source 1..869: mol_type = unassigned DNA
agaggcactgagagtggaggtctcagactcttggaaggggctatactagacacacaaagacagccccaagaaggacggtggagtagtgtcctcgctaaaagacagtagatatgcaatgcctcttgctcctgccctttctcctgctgggaacagtttctgctcttcatctggagaatgatgccccccatctggagagcctagagacacaggcagacctaggccaggatctggatagttcaaaggagcaggagagagacttggctctgacggaggaggtgattcaggcagagggagaggaggtcaaggcttctgcctgtcaagacaactttgaggatgaggaagccatggagtcggacccagctgccttagacaaggacttccagtgccccagggaagaagacattgttgaagtgcagggaagtccaaggtgcaagatctgccgctacctattggtgcggactcctaaaacttttgcagaagctcagaatgtctgcagcagatgctacggaggcaaccttgtctctatccatgacttcaacttcaactatcgcattcagtgctgcactagcacagtcaaccaagcccaggtctggattggaggcaacctcaggggctggttcctgtggaagcggttttgctggactgatgggagccactggaattttgcttactggtccccagggcaacctgggaatgggcaaggctcctgtgtggccctatgcaccaaaggaggttattggcgacgagctcaatgcgacaagcaactgcccttcgtctgctccttctaagccagcggcacggagaccctgccagcagctccctcccgtcccccaacctctcctgctcataaatccagacttcccacagca

SEQ ID NO: 24780 - DNA, 4921 bp, Homo sapiens
  source 1..4921: mol_type = unassigned DNA
atctatcctttacggcaagggtacctacggtacctgaaaacaacgatggcatggaaaacacttcccatttacctgttgttgctgctgtctgttttcgtgattcagcaagtttcatctcaagagctttcctgtaaaggccgctgctttgagtccttcgagagagggagggagtgtgactgcgacgcccaatgtaagaagtatgacaagtgctgtcccgattatgagagtttctgtgcagaagtgcataatcccacatcaccaccatcttcaaagaaagcacctccaccttcaggagcatctcaaaccatcaaatcaacaaccaaacgttcacccaaaccaccaaacaagaagaagactaagaaagttatagaatcagaggaaataacagaagaacattctgtttctgaaaatcaagagtcctcctcctcctcctcctcttcctcttcttcttcaacaattcggaaaatcaagtcttccaaaaattcagctgctaatagagaattacagaagaaactcaaagtaaaagataacaagaagaacagaactaaaaagaaacctacccccaaaccaccagttgtagatgaagctggaagtggattggacaatggtgacttcaaggtcacaactcctgacacgtctaccacccaacacaataaagtcagcacatctcccaagatcacaacagcaaaaccaataaatcccagacccagtcttccacctaattctgatacatctaaagagacgtctttgacagtgaataaagagacaacagttgaaactaaagaaactactacaacaaataaacagacttcaactgatggaaaagagaagactacttccgctaaagagacacaaagtatagagaaaacatctgctaaagatttagcacccacatctaaagtgctggctaaacctacacccaaagctgaaactacaaccaaaggccctgctctcaccactcccaaggagcccacgcccaccactcccaaggagcctgcatctaccacacccaaagagcccacacctaccaccatcaagtctgcacccaccacccccaaggagcctgcacccaccaccaccaagtctgcacccaccactcccaaggagcctgcacccaccaccaccaaggagcctgcacccaccactcccaaggagcctgcacccaccaccaccaaggagcctgcacccaccaccaccaagtctgcacccaccactcccaaggagcctgcacccaccacccccaagaagcctgccccaactacccccaaggagcctgcacccaccactcccaaggagcctacacccaccactcccaaggagcctgcacccaccaccaaggagcctgcacccaccactcccaaagagcctgcacccactgcccccaagaagcctgccccaactacccccaaggagcctgcacccaccactcccaaggagcctgcacccaccaccaccaaggagccttcacccaccactcccaaggagcctgcacccaccaccaccaagtctgcacccaccactaccaaggagcctgcacccaccactaccaagtctgcacccaccactcccaaggagccttcacccaccaccaccaaggagcctgcacccaccactcccaaggagcctgcacccaccacccccaagaagcctgccccaactacccccaaggagcctgcacccaccactcccaaggaacctgcacccaccaccaccaagaagcctgcacccaccactcccaaagagcctgccccaactacccccaaggagactgcacccaccacccccaagaagctcacgcccaccacccccgagaagctcgcacccaccacccctgagaagcccgcacccaccacccctgaggagctcgcacccaccacccctgaggagcccacacccaccacccctgaggagcctgctcccaccactcccaaggcagcggctcccaacacccctaaggagcctgctccaactacccctaaggagcctgctccaactacccctaaggagcctgctccaactacccctaaggagactgctccaactacccctaaagggactgctccaactaccctcaaggaacctgcacccactactcccaagaagcctgcccccaaggagcttgcacccaccaccaccaaggagcccacatccaccacctgtgacaagcccgctccaactacccctaaggggactgctccaactacccctaaggagcctgctccaactacccctaaggagcctgctccaactacccctaaggggactgctccaactaccctcaaggaacctgcacccactactcccaagaagcctgcccccaaggagcttgcacccaccaccaccaaggggcccacatccaccacctctgacaagcctgctccaactacacctaaggagactgctccaactacccccaaggagcctgcacccactacccccaagaagcctgctccaactactcctgagacacctcctccaaccacttcagaggtctctactccaactaccaccaaggagcctaccactatccacaaaagccctgatgaatcaactcctgagctttctgcagaacccacaccaaaagctcttgaaaacagtcccaaggaacctggtgtacctacaactaagactcctgcagcgactaaacctgaaatgactacaacagctaaagacaagacaacagaaagagacttacgtactacacctgaaactacaactgctgcacctaagatgacaaaagagacagcaactacaacagaaaaaactaccgaatccaaaataacagctacaaccacacaagtaacatctaccacaactcaagataccacaccattcaaaattactactcttaaaacaactactcttgcacccaaagtaactacaacaaaaaagacaattactaccactgagattatgaacaaacctgaagaaacagctaaaccaaaagacagagctactaattctaaagcgacaactcctaaacctcaaaagccaaccaaagcacccaaaaaacccacttctaccaaaaagccaaaaacaatgcctagagtgagaaaaccaaagacgacaccaactccccgcaagatgacatcaacaatgccagaattgaaccctacctcaagaatagcagaagccatgctccaaaccaccaccagacctaaccaaactccaaactccaaactagttgaagtaaatccaaagagtgaagatgcaggtggtgctgaaggagaaacacctcatatgcttctcaggccccatgtgttcatgcctgaagttactcccgacatggattacttaccgagagtacccaatcaaggcattatcatcaatcccatgctttccgatgagaccaatatatgcaatggtaagccagtagatggactgactactttgcgcaatgggacattagttgcattccgaggtcattatttctggatgctaagtccattcagtccaccatctccagctcgcagaattactgaagtttggggtattccttcccccattgatactgtttttactaggtgcaactgtgaaggaaaaactttcttctttaaggattctcagtactggcgttttaccaatgatataaaagatgcagggtaccccaaaccaattttcaaaggatttggaggactaactggacaaatagtggcagcgctttcaacagctaaatataagaactggcctgaatctgtgtattttttcaagagaggtggcagcattcagcagtatatttataaacaggaacctgtacagaagtgccctggaagaaggcctgctctaaattatccagtgtatggagaaacgacacaggttaggagacgtcgctttgaacgtgctataggaccttctcaaacacacaccatcagaattcaatattcacctgccagactggcttatcaagacaaaggtgtccttcataatgaagttaaagtgagtatactgtggagaggacttccaaatgtggttacctcagctatatcactgcccaacatcagaaaacctgacggctatgattactatgccttttctaaagatcaatactataacattgatgtgcctagtagaacagcaagagcaattactactcgttctgggcagaccttatccaaagtctggtacaactgtccttagactgatgagcaaaggaggagtcaactaatgaagaaatgaataataaattttgacactgaaaaacattttattaataaagaatattgacatgagtataccagtttatatataaaaatgtttttaaacttgacaatcattacactaaaacagatttgataatcttattcacagttgttattgtttacagaccatttaattaatatttcctctgtttattcctcctctccctcccattgcatggctcacacctgtaaaagaaaaaagaatcaaattgaatatatcttttaagaattcaaaactagtgtattcacttaccctagttcattataaaaaatatctaggcattgtggatataaaactgttgggtattctacaacttcaatggaaattattacaagcagattaatccctctttttgtgacacaagtacaatctaaaagttatattggaaaacatggaaatattaaaattttacacttttactagctaaaacataatcacaaagctttatcgtgttgtataaaaaaattaacaatataatggcaataggtagagatacaacaaatgaatataacactataacacttcatattttccaaatcttaatttggatttaaggaagaaatcaataaatataaaatataagcacatatttattatatatctaaggtatacaaatctgtctacatgaagtttacagattggtaaatatcacctgctcaacatgtaattatttaataaaactttggaacattaaaaaaataaattggaggcttaaggatta

SEQ ID NO: 24781 - DNA, 3629 bp, Homo sapiens
  source 1..3629: mol_type = unassigned DNA
aaactcatctatcctttacggcaagggtacctacggtacctgaaaacaacgatggcatggaaaacacttcccatttacctgttgttgctgctgtctgttttcgtgattcagcaagtttcatctcaagagctttcctgtaaaggccgctgctttgagtccttcgagagagggagggagtgtgactgcgacgcccaatgtaagaagtatgacaagtgctgtcccgattatgagagtttctgtgcagaagtgcataatcccacatcaccaccatcttcaaagaaagcacctccaccttcaggagcatctcaaaccatcaaatcaacaaccaaacgttcacccaaaccaccaaacaagaagaagactaagaaagttatagaatcagaggaaataacagaagaacattctgtttctgaaaatcaagagtcctcctcctcctcctcctcttcctcttcttcttcaacaattcggaaaatcaagtcttccaaaaattcagctgctaatagagaattacagaagaaactcaaagtaaaagataacaagaagaacagaactaaaaagaaacctacccccaaaccaccagttgtagatgaagctggaagtggattggacaatggtgacttcaaggtcacaactcctgacacgtctaccacccaacacaataaagtcagcacatctcccaagatcacaacagcaaaaccaataaatcccagacccagtcttccacctaattctgatacatctaaagagacgtctttgacagtgaataaagagacaacagttgaaactaaagaaactactacaacaaataaacagacttcaactgatggaaaagagaagactacttccgctaaagagacacaaagtatagagaaaacatctgctaaagatttagcacccacatctaaagtgctggctaaacctacacccaaagctgaaactacaaccaaaggccctgctctcaccactcccaaggagcccacgcccaccactcccaaggagcctgcatctaccacacccaaagagcccacacctaccaccatcaagtctgcacccaccacccccaaggagcctgcacccaccaccaccaagtctgcacccaccactcccaaggagcctgcacccaccaccaccaaggagcctgcacccactacccccaagaagcctgctccaactactcctgagacacctcctccaaccacttcagaggtctctactccaactaccaccaaggagcctaccactatccacaaaagccctgatgaatcaactcctgagctttctgcagaacccacaccaaaagctcttgaaaacagtcccaaggaacctggtgtacctacaactaagactcctgcagcgactaaacctgaaatgactacaacagctaaagacaagacaacagaaagagacttacgtactacacctgaaactacaactgctgcacctaagatgacaaaagagacagcaactacaacagaaaaaactaccgaatccaaaataacagctacaaccacacaagtaacatctaccacaactcaagataccacaccattcaaaattactactcttaaaacaactactcttgcacccaaagtaactacaacaaaaaagacaattactaccactgagattatgaacaaacctgaagaaacagctaaaccaaaagacagagctactaattctaaagcgacaactcctaaacctcaaaagccaaccaaagcacccaaaaaacccacttctaccaaaaagccaaaaacaatgcctagagtgagaaaaccaaagacgacaccaactccccgcaagatgacatcaacaatgccagaattgaaccctacctcaagaatagcagaagccatgctccaaaccaccaccagacctaaccaaactccaaactccaaactagttgaagtaaatccaaagagtgaagatgcaggtggtgctgaaggagaaacacctcatatgcttctcaggccccatgtgttcatgcctgaagttactcccgacatggattacttaccgagagtacccaatcaaggcattatcatcaatcccatgctttccgatgagaccaatatatgcaatggtaagccagtagatggactgactactttgcgcaatgggacattagttgcattccgaggtcattatttctggatgctaagtccattcagtccaccatctccagctcgcagaattactgaagtttggggtattccttcccccattgatactgtttttactaggtgcaactgtgaaggaaaaactttcttctttaaggattctcagtactggcgttttaccaatgatataaaagatgcagggtaccccaaaccaattttcaaaggatttggaggactaactggacaaatagtggcagcgctttcaacagctaaatataagaactggcctgaatctgtgtattttttcaagagaggtggcagcattcagcagtatatttataaacaggaacctgtacagaagtgccctggaagaaggcctgctctaaattatccagtgtatggagaaacgacacaggttaggagacgtcgctttgaacgtgctataggaccttctcaaacacacaccatcagaattcaatattcacctgccagactggcttatcaagacaaaggtgtccttcataatgaagttaaagtgagtatactgtggagaggacttccaaatgtggttacctcagctatatcactgcccaacatcagaaaacctgacggctatgattactatgccttttctaaagatcaatactataacattgatgtgcctagtagaacagcaagagcaattactactcgttctgggcagaccttatccaaagtctggtacaactgtccttagactgatgagcaaaggaggagtcaactaatgaagaaatgaataataaattttgacactgaaaaacattttattaataaagaatattgacatgagtataccagtttatatataaaaatgtttttaaacttgacaatcattacactaaaacagatttgataatcttattcacagttgttattgtttacagaccatttaattaatatttcctctgtttattcctcctctccctcccattgcatggctcacacctgtaaaagaaaaaagaatcaaattgaatatatcttttaagaattcaaaactagtgtattcacttaccctagttcattataaaaaatatctaggcattgtggatataaaactgttgggtattctacaacttcaatggaaattattacaagcagattaatccctctttttgtgacacaagtacaatctaaaagttatattggaaaacatggaaatattaaaattttacacttttactagctaaaacataatcacaaagctttatcgtgttgtataaaaaaattaacaatataatggcaataggtagagatacaacaaatgaatataacactataacacttcatattttccaaatcttaatttggatttaaggaagaaatcaataaatataaaatataagcacatatttattatatatctaaggtatacaaatctgtctacatgaagtttacagattggtaaatatcacctgctcaacatgtaattatttaataaaactttggaacattaaaaaaataaattggaggctt

SEQ ID NO: 24782 - DNA, 4765 bp, Homo sapiens
  source 1..4765: mol_type = unassigned DNA
atctatcctttacggcaagggtacctacggtacctgaaaacaacgatggcatggaaaacacttcccatttacctgttgttgctgctgtctgttttcgtgattcagcaagtttcatctcaagatttatcaagctgtgcagggagatgtggggaagggtattctagagatgccacctgcaactgtgattataactgtcaacactacatggagtgctgccctgatttcaagagagtctgcactgcggagctttcctgtaaaggccgctgctttgagtccttcgagagagggagggagtgtgactgcgacgcccaatgtaagaagtatgacaagtgctgtcccgattatgagagtttctgtgcagaagtaaaagataacaagaagaacagaactaaaaagaaacctacccccaaaccaccagttgtagatgaagctggaagtggattggacaatggtgacttcaaggtcacaactcctgacacgtctaccacccaacacaataaagtcagcacatctcccaagatcacaacagcaaaaccaataaatcccagacccagtcttccacctaattctgatacatctaaagagacgtctttgacagtgaataaagagacaacagttgaaactaaagaaactactacaacaaataaacagacttcaactgatggaaaagagaagactacttccgctaaagagacacaaagtatagagaaaacatctgctaaagatttagcacccacatctaaagtgctggctaaacctacacccaaagctgaaactacaaccaaaggccctgctctcaccactcccaaggagcccacgcccaccactcccaaggagcctgcatctaccacacccaaagagcccacacctaccaccatcaagtctgcacccaccacccccaaggagcctgcacccaccaccaccaagtctgcacccaccactcccaaggagcctgcacccaccaccaccaaggagcctgcacccaccactcccaaggagcctgcacccaccaccaccaaggagcctgcacccaccaccaccaagtctgcacccaccactcccaaggagcctgcacccaccacccccaagaagcctgccccaactacccccaaggagcctgcacccaccactcccaaggagcctacacccaccactcccaaggagcctgcacccaccaccaaggagcctgcacccaccactcccaaagagcctgcacccactgcccccaagaagcctgccccaactacccccaaggagcctgcacccaccactcccaaggagcctgcacccaccaccaccaaggagccttcacccaccactcccaaggagcctgcacccaccaccaccaagtctgcacccaccactaccaaggagcctgcacccaccactaccaagtctgcacccaccactcccaaggagccttcacccaccaccaccaaggagcctgcacccaccactcccaaggagcctgcacccaccacccccaagaagcctgccccaactacccccaaggagcctgcacccaccactcccaaggaacctgcacccaccaccaccaagaagcctgcacccaccactcccaaagagcctgccccaactacccccaaggagactgcacccaccacccccaagaagctcacgcccaccacccccgagaagctcgcacccaccacccctgagaagcccgcacccaccacccctgaggagctcgcacccaccacccctgaggagcccacacccaccacccctgaggagcctgctcccaccactcccaaggcagcggctcccaacacccctaaggagcctgctccaactacccctaaggagcctgctccaactacccctaaggagcctgctccaactacccctaaggagactgctccaactacccctaaagggactgctccaactaccctcaaggaacctgcacccactactcccaagaagcctgcccccaaggagcttgcacccaccaccaccaaggagcccacatccaccacctgtgacaagcccgctccaactacccctaaggggactgctccaactacccctaaggagcctgctccaactacccctaaggagcctgctccaactacccctaaggggactgctccaactaccctcaaggaacctgcacccactactcccaagaagcctgcccccaaggagcttgcacccaccaccaccaaggggcccacatccaccacctctgacaagcctgctccaactacacctaaggagactgctccaactacccccaaggagcctgcacccactacccccaagaagcctgctccaactactcctgagacacctcctccaaccacttcagaggtctctactccaactaccaccaaggagcctaccactatccacaaaagccctgatgaatcaactcctgagctttctgcagaacccacaccaaaagctcttgaaaacagtcccaaggaacctggtgtacctacaactaagactcctgcagcgactaaacctgaaatgactacaacagctaaagacaagacaacagaaagagacttacgtactacacctgaaactacaactgctgcacctaagatgacaaaagagacagcaactacaacagaaaaaactaccgaatccaaaataacagctacaaccacacaagtaacatctaccacaactcaagataccacaccattcaaaattactactcttaaaacaactactcttgcacccaaagtaactacaacaaaaaagacaattactaccactgagattatgaacaaacctgaagaaacagctaaaccaaaagacagagctactaattctaaagcgacaactcctaaacctcaaaagccaaccaaagcacccaaaaaacccacttctaccaaaaagccaaaaacaatgcctagagtgagaaaaccaaagacgacaccaactccccgcaagatgacatcaacaatgccagaattgaaccctacctcaagaatagcagaagccatgctccaaaccaccaccagacctaaccaaactccaaactccaaactagttgaagtaaatccaaagagtgaagatgcaggtggtgctgaaggagaaacacctcatatgcttctcaggccccatgtgttcatgcctgaagttactcccgacatggattacttaccgagagtacccaatcaaggcattatcatcaatcccatgctttccgatgagaccaatatatgcaatggtaagccagtagatggactgactactttgcgcaatgggacattagttgcattccgaggtcattatttctggatgctaagtccattcagtccaccatctccagctcgcagaattactgaagtttggggtattccttcccccattgatactgtttttactaggtgcaactgtgaaggaaaaactttcttctttaaggattctcagtactggcgttttaccaatgatataaaagatgcagggtaccccaaaccaattttcaaaggatttggaggactaactggacaaatagtggcagcgctttcaacagctaaatataagaactggcctgaatctgtgtattttttcaagagaggtggcagcattcagcagtatatttataaacaggaacctgtacagaagtgccctggaagaaggcctgctctaaattatccagtgtatggagaaacgacacaggttaggagacgtcgctttgaacgtgctataggaccttctcaaacacacaccatcagaattcaatattcacctgccagactggcttatcaagacaaaggtgtccttcataatgaagttaaagtgagtatactgtggagaggacttccaaatgtggttacctcagctatatcactgcccaacatcagaaaacctgacggctatgattactatgccttttctaaagatcaatactataacattgatgtgcctagtagaacagcaagagcaattactactcgttctgggcagaccttatccaaagtctggtacaactgtccttagactgatgagcaaaggaggagtcaactaatgaagaaatgaataataaattttgacactgaaaaacattttattaataaagaatattgacatgagtataccagtttatatataaaaatgtttttaaacttgacaatcattacactaaaacagatttgataatcttattcacagttgttattgtttacagaccatttaattaatatttcctctgtttattcctcctctccctcccattgcatggctcacacctgtaaaagaaaaaagaatcaaattgaatatatcttttaagaattcaaaactagtgtattcacttaccctagttcattataaaaaatatctaggcattgtggatataaaactgttgggtattctacaacttcaatggaaattattacaagcagattaatccctctttttgtgacacaagtacaatctaaaagttatattggaaaacatggaaatattaaaattttacacttttactagctaaaacataatcacaaagctttatcgtgttgtataaaaaaattaacaatataatggcaataggtagagatacaacaaatgaatataacactataacacttcatattttccaaatcttaatttggatttaaggaagaaatcaataaatataaaatataagcacatatttattatatatctaaggtatacaaatctgtctacatgaagtttacagattggtaaatatcacctgctcaacatgtaattatttaataaaactttggaacattaaaaaaataaattggaggcttaaggatta

SEQ ID NO: 24783 - DNA, 4913 bp, Homo sapiens
  source 1..4913: mol_type = unassigned DNA
aaactcatctatcctttacggcaagggtacctacggtacctgaaaacaacgatggcatggaaaacacttcccatttacctgttgttgctgctgtctgttttcgtgattcagcaagtttcatctcaagatttatcaagctgtgcagggagatgtggggaagggtattctagagatgccacctgcaactgtgattataactgtcaacactacatggagtgctgccctgatttcaagagagtctgcactgcggagctttcctgtaaaggccgctgctttgagtccttcgagagagggagggagtgtgactgcgacgcccaatgtaagaagtatgacaagtgctgtcccgattatgagagtttctgtgcagaagtgcataatcccacatcaccaccatcttcaaagaaagcacctccaccttcaggagcatctcaaaccatcaaatcaacaaccaaacgttcacccaaaccaccaaacaagaagaagactaagaaagttatagaatcagaggaaataacagaagtaaaagataacaagaagaacagaactaaaaagaaacctacccccaaaccaccagttgtagatgaagctggaagtggattggacaatggtgacttcaaggtcacaactcctgacacgtctaccacccaacacaataaagtcagcacatctcccaagatcacaacagcaaaaccaataaatcccagacccagtcttccacctaattctgatacatctaaagagacgtctttgacagtgaataaagagacaacagttgaaactaaagaaactactacaacaaataaacagacttcaactgatggaaaagagaagactacttccgctaaagagacacaaagtatagagaaaacatctgctaaagatttagcacccacatctaaagtgctggctaaacctacacccaaagctgaaactacaaccaaaggccctgctctcaccactcccaaggagcccacgcccaccactcccaaggagcctgcatctaccacacccaaagagcccacacctaccaccatcaagtctgcacccaccacccccaaggagcctgcacccaccaccaccaagtctgcacccaccactcccaaggagcctgcacccaccaccaccaaggagcctgcacccaccactcccaaggagcctgcacccaccaccaccaaggagcctgcacccaccaccaccaagtctgcacccaccactcccaaggagcctgcacccaccacccccaagaagcctgccccaactacccccaaggagcctgcacccaccactcccaaggagcctacacccaccactcccaaggagcctgcacccaccaccaaggagcctgcacccaccactcccaaagagcctgcacccactgcccccaagaagcctgccccaactacccccaaggagcctgcacccaccactcccaaggagcctgcacccaccaccaccaaggagccttcacccaccactcccaaggagcctgcacccaccaccaccaagtctgcacccaccactaccaaggagcctgcacccaccactaccaagtctgcacccaccactcccaaggagccttcacccaccaccaccaaggagcctgcacccaccactcccaaggagcctgcacccaccacccccaagaagcctgccccaactacccccaaggagcctgcacccaccactcccaaggaacctgcacccaccaccaccaagaagcctgcacccaccactcccaaagagcctgccccaactacccccaaggagactgcacccaccacccccaagaagctcacgcccaccacccccgagaagctcgcacccaccacccctgagaagcccgcacccaccacccctgaggagctcgcacccaccacccctgaggagcccacacccaccacccctgaggagcctgctcccaccactcccaaggcagcggctcccaacacccctaaggagcctgctccaactacccctaaggagcctgctccaactacccctaaggagcctgctccaactacccctaaggagactgctccaactacccctaaagggactgctccaactaccctcaaggaacctgcacccactactcccaagaagcctgcccccaaggagcttgcacccaccaccaccaaggagcccacatccaccacctgtgacaagcccgctccaactacccctaaggggactgctccaactacccctaaggagcctgctccaactacccctaaggagcctgctccaactacccctaaggggactgctccaactaccctcaaggaacctgcacccactactcccaagaagcctgcccccaaggagcttgcacccaccaccaccaaggggcccacatccaccacctctgacaagcctgctccaactacacctaaggagactgctccaactacccccaaggagcctgcacccactacccccaagaagcctgctccaactactcctgagacacctcctccaaccacttcagaggtctctactccaactaccaccaaggagcctaccactatccacaaaagccctgatgaatcaactcctgagctttctgcagaacccacaccaaaagctcttgaaaacagtcccaaggaacctggtgtacctacaactaagactcctgcagcgactaaacctgaaatgactacaacagctaaagacaagacaacagaaagagacttacgtactacacctgaaactacaactgctgcacctaagatgacaaaagagacagcaactacaacagaaaaaactaccgaatccaaaataacagctacaaccacacaagtaacatctaccacaactcaagataccacaccattcaaaattactactcttaaaacaactactcttgcacccaaagtaactacaacaaaaaagacaattactaccactgagattatgaacaaacctgaagaaacagctaaaccaaaagacagagctactaattctaaagcgacaactcctaaacctcaaaagccaaccaaagcacccaaaaaacccacttctaccaaaaagccaaaaacaatgcctagagtgagaaaaccaaagacgacaccaactccccgcaagatgacatcaacaatgccagaattgaaccctacctcaagaatagcagaagccatgctccaaaccaccaccagacctaaccaaactccaaactccaaactagttgaagtaaatccaaagagtgaagatgcaggtggtgctgaaggagaaacacctcatatgcttctcaggccccatgtgttcatgcctgaagttactcccgacatggattacttaccgagagtacccaatcaaggcattatcatcaatcccatgctttccgatgagaccaatatatgcaatggtaagccagtagatggactgactactttgcgcaatgggacattagttgcattccgaggtcattatttctggatgctaagtccattcagtccaccatctccagctcgcagaattactgaagtttggggtattccttcccccattgatactgtttttactaggtgcaactgtgaaggaaaaactttcttctttaaggattctcagtactggcgttttaccaatgatataaaagatgcagggtaccccaaaccaattttcaaaggatttggaggactaactggacaaatagtggcagcgctttcaacagctaaatataagaactggcctgaatctgtgtattttttcaagagaggtggcagcattcagcagtatatttataaacaggaacctgtacagaagtgccctggaagaaggcctgctctaaattatccagtgtatggagaaacgacacaggttaggagacgtcgctttgaacgtgctataggaccttctcaaacacacaccatcagaattcaatattcacctgccagactggcttatcaagacaaaggtgtccttcataatgaagttaaagtgagtatactgtggagaggacttccaaatgtggttacctcagctatatcactgcccaacatcagaaaacctgacggctatgattactatgccttttctaaagatcaatactataacattgatgtgcctagtagaacagcaagagcaattactactcgttctgggcagaccttatccaaagtctggtacaactgtccttagactgatgagcaaaggaggagtcaactaatgaagaaatgaataataaattttgacactgaaaaacattttattaataaagaatattgacatgagtataccagtttatatataaaaatgtttttaaacttgacaatcattacactaaaacagatttgataatcttattcacagttgttattgtttacagaccatttaattaatatttcctctgtttattcctcctctccctcccattgcatggctcacacctgtaaaagaaaaaagaatcaaattgaatatatcttttaagaattcaaaactagtgtattcacttaccctagttcattataaaaaatatctaggcattgtggatataaaactgttgggtattctacaacttcaatggaaattattacaagcagattaatccctctttttgtgacacaagtacaatctaaaagttatattggaaaacatggaaatattaaaattttacacttttactagctaaaacataatcacaaagctttatcgtgttgtataaaaaaattaacaatataatggcaataggtagagatacaacaaatgaatataacactataacacttcatattttccaaatcttaatttggatttaaggaagaaatcaataaatataaaatataagcacatatttattatatatctaaggtatacaaatctgtctacatgaagtttacagattggtaaatatcacctgctcaacatgtaattatttaataaaactttggaacattaaaaaaataaattggaggctt

SEQ ID NO: 24784 - DNA, 5044 bp, Homo sapiens
  source 1..5044: mol_type = unassigned DNA
atctatcctttacggcaagggtacctacggtacctgaaaacaacgatggcatggaaaacacttcccatttacctgttgttgctgctgtctgttttcgtgattcagcaagtttcatctcaagatttatcaagctgtgcagggagatgtggggaagggtattctagagatgccacctgcaactgtgattataactgtcaacactacatggagtgctgccctgatttcaagagagtctgcactgcggagctttcctgtaaaggccgctgctttgagtccttcgagagagggagggagtgtgactgcgacgcccaatgtaagaagtatgacaagtgctgtcccgattatgagagtttctgtgcagaagtgcataatcccacatcaccaccatcttcaaagaaagcacctccaccttcaggagcatctcaaaccatcaaatcaacaaccaaacgttcacccaaaccaccaaacaagaagaagactaagaaagttatagaatcagaggaaataacagaagaacattctgtttctgaaaatcaagagtcctcctcctcctcctcctcttcctcttcttcttcaacaattcggaaaatcaagtcttccaaaaattcagctgctaatagagaattacagaagaaactcaaagtaaaagataacaagaagaacagaactaaaaagaaacctacccccaaaccaccagttgtagatgaagctggaagtggattggacaatggtgacttcaaggtcacaactcctgacacgtctaccacccaacacaataaagtcagcacatctcccaagatcacaacagcaaaaccaataaatcccagacccagtcttccacctaattctgatacatctaaagagacgtctttgacagtgaataaagagacaacagttgaaactaaagaaactactacaacaaataaacagacttcaactgatggaaaagagaagactacttccgctaaagagacacaaagtatagagaaaacatctgctaaagatttagcacccacatctaaagtgctggctaaacctacacccaaagctgaaactacaaccaaaggccctgctctcaccactcccaaggagcccacgcccaccactcccaaggagcctgcatctaccacacccaaagagcccacacctaccaccatcaagtctgcacccaccacccccaaggagcctgcacccaccaccaccaagtctgcacccaccactcccaaggagcctgcacccaccaccaccaaggagcctgcacccaccactcccaaggagcctgcacccaccaccaccaaggagcctgcacccaccaccaccaagtctgcacccaccactcccaaggagcctgcacccaccacccccaagaagcctgccccaactacccccaaggagcctgcacccaccactcccaaggagcctacacccaccactcccaaggagcctgcacccaccaccaaggagcctgcacccaccactcccaaagagcctgcacccactgcccccaagaagcctgccccaactacccccaaggagcctgcacccaccactcccaaggagcctgcacccaccaccaccaaggagccttcacccaccactcccaaggagcctgcacccaccaccaccaagtctgcacccaccactaccaaggagcctgcacccaccactaccaagtctgcacccaccactcccaaggagccttcacccaccaccaccaaggagcctgcacccaccactcccaaggagcctgcacccaccacccccaagaagcctgccccaactacccccaaggagcctgcacccaccactcccaaggaacctgcacccaccaccaccaagaagcctgcacccaccactcccaaagagcctgccccaactacccccaaggagactgcacccaccacccccaagaagctcacgcccaccacccccgagaagctcgcacccaccacccctgagaagcccgcacccaccacccctgaggagctcgcacccaccacccctgaggagcccacacccaccacccctgaggagcctgctcccaccactcccaaggcagcggctcccaacacccctaaggagcctgctccaactacccctaaggagcctgctccaactacccctaaggagcctgctccaactacccctaaggagactgctccaactacccctaaagggactgctccaactaccctcaaggaacctgcacccactactcccaagaagcctgcccccaaggagcttgcacccaccaccaccaaggagcccacatccaccacctgtgacaagcccgctccaactacccctaaggggactgctccaactacccctaaggagcctgctccaactacccctaaggagcctgctccaactacccctaaggggactgctccaactaccctcaaggaacctgcacccactactcccaagaagcctgcccccaaggagcttgcacccaccaccaccaaggggcccacatccaccacctctgacaagcctgctccaactacacctaaggagactgctccaactacccccaaggagcctgcacccactacccccaagaagcctgctccaactactcctgagacacctcctccaaccacttcagaggtctctactccaactaccaccaaggagcctaccactatccacaaaagccctgatgaatcaactcctgagctttctgcagaacccacaccaaaagctcttgaaaacagtcccaaggaacctggtgtacctacaactaagactcctgcagcgactaaacctgaaatgactacaacagctaaagacaagacaacagaaagagacttacgtactacacctgaaactacaactgctgcacctaagatgacaaaagagacagcaactacaacagaaaaaactaccgaatccaaaataacagctacaaccacacaagtaacatctaccacaactcaagataccacaccattcaaaattactactcttaaaacaactactcttgcacccaaagtaactacaacaaaaaagacaattactaccactgagattatgaacaaacctgaagaaacagctaaaccaaaagacagagctactaattctaaagcgacaactcctaaacctcaaaagccaaccaaagcacccaaaaaacccacttctaccaaaaagccaaaaacaatgcctagagtgagaaaaccaaagacgacaccaactccccgcaagatgacatcaacaatgccagaattgaaccctacctcaagaatagcagaagccatgctccaaaccaccaccagacctaaccaaactccaaactccaaactagttgaagtaaatccaaagagtgaagatgcaggtggtgctgaaggagaaacacctcatatgcttctcaggccccatgtgttcatgcctgaagttactcccgacatggattacttaccgagagtacccaatcaaggcattatcatcaatcccatgctttccgatgagaccaatatatgcaatggtaagccagtagatggactgactactttgcgcaatgggacattagttgcattccgaggtcattatttctggatgctaagtccattcagtccaccatctccagctcgcagaattactgaagtttggggtattccttcccccattgatactgtttttactaggtgcaactgtgaaggaaaaactttcttctttaaggattctcagtactggcgttttaccaatgatataaaagatgcagggtaccccaaaccaattttcaaaggatttggaggactaactggacaaatagtggcagcgctttcaacagctaaatataagaactggcctgaatctgtgtattttttcaagagaggtggcagcattcagcagtatatttataaacaggaacctgtacagaagtgccctggaagaaggcctgctctaaattatccagtgtatggagaaacgacacaggttaggagacgtcgctttgaacgtgctataggaccttctcaaacacacaccatcagaattcaatattcacctgccagactggcttatcaagacaaaggtgtccttcataatgaagttaaagtgagtatactgtggagaggacttccaaatgtggttacctcagctatatcactgcccaacatcagaaaacctgacggctatgattactatgccttttctaaagatcaatactataacattgatgtgcctagtagaacagcaagagcaattactactcgttctgggcagaccttatccaaagtctggtacaactgtccttagactgatgagcaaaggaggagtcaactaatgaagaaatgaataataaattttgacactgaaaaacattttattaataaagaatattgacatgagtataccagtttatatataaaaatgtttttaaacttgacaatcattacactaaaacagatttgataatcttattcacagttgttattgtttacagaccatttaattaatatttcctctgtttattcctcctctccctcccattgcatggctcacacctgtaaaagaaaaaagaatcaaattgaatatatcttttaagaattcaaaactagtgtattcacttaccctagttcattataaaaaatatctaggcattgtggatataaaactgttgggtattctacaacttcaatggaaattattacaagcagattaatccctctttttgtgacacaagtacaatctaaaagttatattggaaaacatggaaatattaaaattttacacttttactagctaaaacataatcacaaagctttatcgtgttgtataaaaaaattaacaatataatggcaataggtagagatacaacaaatgaatataacactataacacttcatattttccaaatcttaatttggatttaaggaagaaatcaataaatataaaatataagcacatatttattatatatctaaggtatacaaatctgtctacatgaagtttacagattggtaaatatcacctgctcaacatgtaattatttaataaaactttggaacattaaaaaaataaattggaggcttaaggatta

SEQ ID NO: 24785 - DNA, 3002 bp, Homo sapiens
  source 1..3002: mol_type = unassigned DNA
caggagaagaggacaaagatactcagagagaaaaagtaaaagaccgaagaaggaggctggagagaccaggatccttccagctgaacaaagtcagccacaaagcagactagccagccggctacaattggagtcagagtcccaaagacatgggcttgttagagtgctgtgcaagatgtctggtaggggccccctttgcttccctggtggccactggattgtgtttctttggggtggcactgttctgtggctgtggacatgaagccctcactggcacagaaaagctaattgagacctatttctccaaaaactaccaagactatgagtatctcatcaatgtgatccatgccttccagtatgtcatctatggaactgcctctttcttcttcctttatggggccctcctgctggctgagggcttctacaccaccggcgcagtcaggcagatctttggcgactacaagaccaccatctgcggcaagggcctgagcgcaacggtaacagggggccagaaggggaggggttccagaggccaacatcaagctcattctttggagcgggtgtgtcattgtttgggaaaatggctaggacatcccgacaagtttgtgggcatcacctatgccctgaccgttgtgtggctcctggtgtttgcctgctctgctgtgcctgtgtacatttacttcaacacctggaccacctgccagtctattgccttccccagcaagacctctgccagtataggcagtctctgtgctgatgccagaatgtatggtgttctcccatggaatgctttccctggcaaggtttgtggctccaaccttctgtccatctgcaaaacagctgagttccaaatgaccttccacctgtttattgctgcatttgtgggggctgcagctacactggtttccctgctcaccttcatgattgctgccacttacaactttgccgtccttaaactcatgggccgaggcaccaagttctgatcccccgtagaaatccccctttctctaatagcgaggctctaaccacacagcctacaatgctgcgtctcccatcttaactctttgcctttgccaccaactggccctcttcttacttgatgagtgtaacaagaaaggagagtcttgcagtgattaaggtctctctttggactctcccctcttatgtacctcttttagtcattttgcttcatagctggttcctgctagaaatgggaaatgcctaagaagatgacttcccaactgcaagtcacaaaggaatggaggctctaattgaattttcaagcatctcctgaggatcagaaagtaatttcttctcaaagggtacttccactgatggaaacaaagtggaaggaaagatgctcaggtacagagaaggaatgtctttggtcctcttgccatctataggggccaaatatattctctttggtgtacaaaatggaattcattctggtctctctattaccactgaagatagaagaaaaaagaatgtcagaaaaacaataagagcgtttgcccaaatctgcctattgcagctgggagaagggggtcaaagcaaggatctttcacccacagaaagagagcactgaccccgatggcgatggactactgaagccctaactcagccaaccttacttacagcataagggagcgtagaatctgtgtagacgaagggggcatctggccttacacctcgttagggaagagaaacagggtgttgtcagcatcttctcactcccttctccttgataacagctaccatgacaaccctgtggtttccaaggagctgagaatagaaggaaactagcttacatgagaacagactggcctgaggagcagcagttgctggtggctaatggtgtaacctgagatggccctctggtagacacaggatagataactctttggatagcatgtctttttttctgttaattagttgtgtactctggcctctgtcatatcttcacaatggtgctcatttcatgggggtattatccattcagtcatcgtaggtgatttgaaggtcttgatttgttttagaatgatgcacatttcatgtattccagtttgtttattacttatttggggttgcatcagaaatgtctggagaataattctttgattatgactgttttttaaactaggaaaattggacattaagcatcacaaatgatattaaaaattggctagttgaatctattgggattttctacaagtattctgcctttgcagaaacagatttggtgaatttgaatctcaatttgagtaatctgatcgttctttctagctaatggaaaatgattttacttagcaatgttatcttggtgtgttaagagttaggtttaacataaaggttattttctcctgatatagatcacataacagaatgcaccagtcatcagctattcagttggtaagcttccaggaaaaaggacaggcagaaagagtttgagacctgaatagctcccagatttcagtcttttcctgtttttgttaactttgggttaaaaaaaaaaaaagtctgattggttttaattgaaggaaagatttgtactacagttcttttgttgtaaagagttgtgttgttcttttcccccaaagtggtttcagcaatatttaaggagatgtaagagctttacaaaaagacacttgatacttgttttcaaaccagtatacaagataagcttccaggctgcatagaaggaggagagggaaaatgttttgtaagaaaccaatcaagataaaggacagtgaagtaatccgtaccttgtgttttgttttgatttaataacataacaaataaccaacccttccctgaaaacctcacatgcatacatacacatatatacacacacaaagagagttaatcaactgaaagtgtttccttcatttctgatatagaattgcaattttaacacacataaaggataaacttttagaaacttatcttacaaagtgtattttataaaattaaagaaaataaaattaagaatgttctcaatcaaa

SEQ ID NO: 24786 - DNA, 2897 bp, Homo sapiens
  source 1..2897: mol_type = unassigned DNA
caggagaagaggacaaagatactcagagagaaaaagtaaaagaccgaagaaggaggctggagagaccaggatccttccagctgaacaaagtcagccacaaagcagactagccagccggctacaattggagtcagagtcccaaagacatgggcttgttagagtgctgtgcaagatgtctggtaggggccccctttgcttccctggtggccactggattgtgtttctttggggtggcactgttctgtggctgtggacatgaagccctcactggcacagaaaagctaattgagacctatttctccaaaaactaccaagactatgagtatctcatcaatgtgatccatgccttccagtatgtcatctatggaactgcctctttcttcttcctttatggggccctcctgctggctgagggcttctacaccaccggcgcagtcaggcagatctttggcgactacaagaccaccatctgcggcaagggcctgagcgcaacgtttgtgggcatcacctatgccctgaccgttgtgtggctcctggtgtttgcctgctctgctgtgcctgtgtacatttacttcaacacctggaccacctgccagtctattgccttccccagcaagacctctgccagtataggcagtctctgtgctgatgccagaatgtatggtgttctcccatggaatgctttccctggcaaggtttgtggctccaaccttctgtccatctgcaaaacagctgagttccaaatgaccttccacctgtttattgctgcatttgtgggggctgcagctacactggtttccctgctcaccttcatgattgctgccacttacaactttgccgtccttaaactcatgggccgaggcaccaagttctgatcccccgtagaaatccccctttctctaatagcgaggctctaaccacacagcctacaatgctgcgtctcccatcttaactctttgcctttgccaccaactggccctcttcttacttgatgagtgtaacaagaaaggagagtcttgcagtgattaaggtctctctttggactctcccctcttatgtacctcttttagtcattttgcttcatagctggttcctgctagaaatgggaaatgcctaagaagatgacttcccaactgcaagtcacaaaggaatggaggctctaattgaattttcaagcatctcctgaggatcagaaagtaatttcttctcaaagggtacttccactgatggaaacaaagtggaaggaaagatgctcaggtacagagaaggaatgtctttggtcctcttgccatctataggggccaaatatattctctttggtgtacaaaatggaattcattctggtctctctattaccactgaagatagaagaaaaaagaatgtcagaaaaacaataagagcgtttgcccaaatctgcctattgcagctgggagaagggggtcaaagcaaggatctttcacccacagaaagagagcactgaccccgatggcgatggactactgaagccctaactcagccaaccttacttacagcataagggagcgtagaatctgtgtagacgaagggggcatctggccttacacctcgttagggaagagaaacagggtgttgtcagcatcttctcactcccttctccttgataacagctaccatgacaaccctgtggtttccaaggagctgagaatagaaggaaactagcttacatgagaacagactggcctgaggagcagcagttgctggtggctaatggtgtaacctgagatggccctctggtagacacaggatagataactctttggatagcatgtctttttttctgttaattagttgtgtactctggcctctgtcatatcttcacaatggtgctcatttcatgggggtattatccattcagtcatcgtaggtgatttgaaggtcttgatttgttttagaatgatgcacatttcatgtattccagtttgtttattacttatttggggttgcatcagaaatgtctggagaataattctttgattatgactgttttttaaactaggaaaattggacattaagcatcacaaatgatattaaaaattggctagttgaatctattgggattttctacaagtattctgcctttgcagaaacagatttggtgaatttgaatctcaatttgagtaatctgatcgttctttctagctaatggaaaatgattttacttagcaatgttatcttggtgtgttaagagttaggtttaacataaaggttattttctcctgatatagatcacataacagaatgcaccagtcatcagctattcagttggtaagcttccaggaaaaaggacaggcagaaagagtttgagacctgaatagctcccagatttcagtcttttcctgtttttgttaactttgggttaaaaaaaaaaaaagtctgattggttttaattgaaggaaagatttgtactacagttcttttgttgtaaagagttgtgttgttcttttcccccaaagtggtttcagcaatatttaaggagatgtaagagctttacaaaaagacacttgatacttgttttcaaaccagtatacaagataagcttccaggctgcatagaaggaggagagggaaaatgttttgtaagaaaccaatcaagataaaggacagtgaagtaatccgtaccttgtgttttgttttgatttaataacataacaaataaccaacccttccctgaaaacctcacatgcatacatacacatatatacacacacaaagagagttaatcaactgaaagtgtttccttcatttctgatatagaattgcaattttaacacacataaaggataaacttttagaaacttatcttacaaagtgtattttataaaattaaagaaaataaaattaagaatgttctcaatcaaa

SEQ ID NO: 24787 - DNA, 3133 bp, Homo sapiens
  source 1..3133: mol_type = unassigned DNA
atggcttctcacgcttgtgctgcatatcccacaccaattagacccaaggatcagttggaagtttccaggacatcttcattttatttccaccctcaatccacatttccagatgtctctgcagcaaagcgaaattccaggagaagaggacaaagatactcagagagaaaaagtaaaagaccgaagaaggaggctggagagaccaggatccttccagctgaacaaagtcagccacaaagcagactagccagccggctacaattggagtcagagtcccaaagacatgggcttgttagagtgctgtgcaagatgtctggtaggggccccctttgcttccctggtggccactggattgtgtttctttggggtggcactgttctgtggctgtggacatgaagccctcactggcacagaaaagctaattgagacctatttctccaaaaactaccaagactatgagtatctcatcaatgtgatccatgccttccagtatgtcatctatggaactgcctctttcttcttcctttatggggccctcctgctggctgagggcttctacaccaccggcgcagtcaggcagatctttggcgactacaagaccaccatctgcggcaagggcctgagcgcaacggtaacagggggccagaaggggaggggttccagaggccaacatcaagctcattctttggagcgggtgtgtcattgtttgggaaaatggctaggacatcccgacaagtttgtgggcatcacctatgccctgaccgttgtgtggctcctggtgtttgcctgctctgctgtgcctgtgtacatttacttcaacacctggaccacctgccagtctattgccttccccagcaagacctctgccagtataggcagtctctgtgctgatgccagaatgtatggtgttctcccatggaatgctttccctggcaaggtttgtggctccaaccttctgtccatctgcaaaacagctgagttccaaatgaccttccacctgtttattgctgcatttgtgggggctgcagctacactggtttccctgctcaccttcatgattgctgccacttacaactttgccgtccttaaactcatgggccgaggcaccaagttctgatcccccgtagaaatccccctttctctaatagcgaggctctaaccacacagcctacaatgctgcgtctcccatcttaactctttgcctttgccaccaactggccctcttcttacttgatgagtgtaacaagaaaggagagtcttgcagtgattaaggtctctctttggactctcccctcttatgtacctcttttagtcattttgcttcatagctggttcctgctagaaatgggaaatgcctaagaagatgacttcccaactgcaagtcacaaaggaatggaggctctaattgaattttcaagcatctcctgaggatcagaaagtaatttcttctcaaagggtacttccactgatggaaacaaagtggaaggaaagatgctcaggtacagagaaggaatgtctttggtcctcttgccatctataggggccaaatatattctctttggtgtacaaaatggaattcattctggtctctctattaccactgaagatagaagaaaaaagaatgtcagaaaaacaataagagcgtttgcccaaatctgcctattgcagctgggagaagggggtcaaagcaaggatctttcacccacagaaagagagcactgaccccgatggcgatggactactgaagccctaactcagccaaccttacttacagcataagggagcgtagaatctgtgtagacgaagggggcatctggccttacacctcgttagggaagagaaacagggtgttgtcagcatcttctcactcccttctccttgataacagctaccatgacaaccctgtggtttccaaggagctgagaatagaaggaaactagcttacatgagaacagactggcctgaggagcagcagttgctggtggctaatggtgtaacctgagatggccctctggtagacacaggatagataactctttggatagcatgtctttttttctgttaattagttgtgtactctggcctctgtcatatcttcacaatggtgctcatttcatgggggtattatccattcagtcatcgtaggtgatttgaaggtcttgatttgttttagaatgatgcacatttcatgtattccagtttgtttattacttatttggggttgcatcagaaatgtctggagaataattctttgattatgactgttttttaaactaggaaaattggacattaagcatcacaaatgatattaaaaattggctagttgaatctattgggattttctacaagtattctgcctttgcagaaacagatttggtgaatttgaatctcaatttgagtaatctgatcgttctttctagctaatggaaaatgattttacttagcaatgttatcttggtgtgttaagagttaggtttaacataaaggttattttctcctgatatagatcacataacagaatgcaccagtcatcagctattcagttggtaagcttccaggaaaaaggacaggcagaaagagtttgagacctgaatagctcccagatttcagtcttttcctgtttttgttaactttgggttaaaaaaaaaaaaagtctgattggttttaattgaaggaaagatttgtactacagttcttttgttgtaaagagttgtgttgttcttttcccccaaagtggtttcagcaatatttaaggagatgtaagagctttacaaaaagacacttgatacttgttttcaaaccagtatacaagataagcttccaggctgcatagaaggaggagagggaaaatgttttgtaagaaaccaatcaagataaaggacagtgaagtaatccgtaccttgtgttttgttttgatttaataacataacaaataaccaacccttccctgaaaacctcacatgcatacatacacatatatacacacacaaagagagttaatcaactgaaagtgtttccttcatttctgatatagaattgcaattttaacacacataaaggataaacttttagaaacttatcttacaaagtgtattttataaaattaaagaaaataaaattaagaatgttctcaatc

SEQ ID NO: 24788 - DNA, 588 bp, Homo sapiens
  source 1..588: mol_type = unassigned DNA
aaggcaaaatcacaggaaaagttccaggagaccataccttccttctccggagtcttccaacaggagaagaggacaaagatactcagagagaaaaagtaaaagaccgaagaaggaggctggagagaccaggatccttccagctgaacaaagtcagccacaaagcagactagccagccggctacaattggagtcagagtcccaaagacatgggcttgttagagtgctgtgcaagatgtctggtaggggccccctttgcttccctggtggccactggattgtgtttctttggggtggcactgttctgtggctgtggacatgaagccctcactggcacagaaaagctaattgagacctatttctccaaaaactaccaagactatgagtatctcatcaatgtgatccatgccttccagtatgtcatctatggaactgcctctttcttcttcctttatggggccctcctgctggctgagggcttctacaccaccggcgcagtcaggcagatctttggcgactacaagaccaccatctgcggcaagggcctgagcgcaacggtaacagggggccagaaggggaggggttccagag

SEQ ID NO: 24789 - DNA, 1442 bp, Homo sapiens
  source 1..1442: mol_type = unassigned DNA
agagagaaaaagtaaaagaccgaagaaggaggctggagagaccaggatccttccagctgaacaaagtcagccacaaagcagactagccagccggctacaattggagtcagagtcccaaagacatgggcttgttagagtgctgtgcaagatgtctggtaggggccccctttgcttccctggtggccactggattgtgtttctttggggtggcactgttctgtggctgtggacatgaagccctcactggcacagaaaagctaattgagacctatttctccaaaaactaccaagactatgagtatctcatcaatgtgatccatgccttccagtatgtcatctatggaactgcctctttcttcttcctttatggggccctcctgctggctgagggcttctacaccaccggcgcagtcaggcagaaggggaggggttccagaggccaacatcaagctcattctttggagcgggtgtgtcattgtttgggaaaatggctaggacatcccgacaagtttgtgggcatcacctatgccctgaccgttgtgtggctcctggtgtttgcctgctctgctgtgcctgtgtacatttacttcaacacctggaccacctgccagtctattgccttccccagcaagacctctgccagtataggcagtctctgtgctgatgccagaatgtatggtgttctcccatggaatgctttccctggcaaggtttgtggctccaaccttctgtccatctgcaaaacagctgagttccaaatgaccttccacctgtttattgctgcatttgtgggggctgcagctacactggtttccctgctcaccttcatgattgctgccacttacaactttgccgtccttaaactcatgggccgaggcaccaagttctgatcccccgtagaaatccccctttctctaatagcgaggctctaaccacacagcctacaatgctgcgtctcccatcttaactctttgcctttgccaccaactggccctcttcttacttgatgagtgtaacaagaaaggagagtcttgcagtgattaaggtctctctttggactctcccctcttatgtacctcttttagtcattttgcttcatagctggttcctgctagaaatgggaaatgcctaagaagatgacttcccaactgcaagtcacaaaggaatggaggctctaattgaattttcaagcatctcctgaggatcagaaagtaatttcttctcaaagggtacttccactgatggaaacaaagtggaaggaaagatgctcaggtacagagaaggaatgtctttggtcctcttgccatctataggggccaaatatattctctttggtgtacaaaatggaattcattctggtctctctattaccactgaagatagaagaaaaaagaatgtcagaaaaacaataagagcgtttgcccaaatctgcctattgcagc

SEQ ID NO: 24790 - DNA, 623 bp, Homo sapiens
  source 1..623: mol_type = unassigned DNA
gggctctggaggacctggaagataccctatgaggtctgtagggagccctcaggaaaggtctgctgacgaggagaagaggacaaagatactcagagagaaaaagtaaaagaccgaagaaggaggctggagagaccaggatccttccagctgaacaaagtcagccacaaagcagactagccagccggctacaattggagtcagagtcccaaagacatgggcttgttagagtgctgtgcaagatgtctggtaggggccccctttgcttccctggtggccactggattgtgtttctttggggtggcactgttctgtggctgtggacatgaagccctcactggcacagaaaagctaattgagacctatttctccaaaaactaccaagactatgagtatctcatcaatgtgatccatgccttccagtatgtcatctatggaactgcctctttcttcttcctttatggggccctcctgctggctgagggcttctacaccaccggcgcagtcaggcagatctttggcgactacaagaccaccatctgcggcaagggcctgagcgcaacggtaacagggggccagaaggggaggggttccagaggccaacatcaagctcattctttggagcg

SEQ ID NO: 24791 - DNA, 587 bp, Homo sapiens
  source 1..587: mol_type = unassigned DNA
acttcatggcttctcacgcttgtgctgcatatcccacaccaattagacccaaggatcagttggaagtttccaggacatcttcattttatttccaccctcaatccacatttccagatgtctctgcagcaaagcgaaattccaggagaagaggacaaagatactcagagagaaaaagtaaaagaccgaagaaggaggctggagagaccaggatccttccagctgaacaaagtcagccacaaagcagactagccagccggctacaattggagtcagagtcccaaagacatgggcttgttagagtgctgtgcaagatgtctggtaggggccccctttgcttccctggtggccactggattgtgtttctttggggtggcactgttctgtggctgtggacatgaagccctcactggcacagaaaagctaattgagacctatttctccaaaaactaccaagactatgagtatctcatcaatgtgatccatgccttccagtatgtcatctatggaactgcctctttcttcttcctttatggggccctcctgctggctgagggcttctacaccaccggcgcagtcaggcagatctt

SEQ ID NO: 24792 - DNA, 786 bp, Homo sapiens
  source 1..786: mol_type = unassigned DNA
agtcttctatgccagggctaggaaagctgccttccaaaatttggtctgggaagacattatcctgggaatgagaagcaaagcctcagctctagaagcccaaataatagcagatgacccaggctttcactggcacccagtacaggcagcaggctgcaccaagaaggctggcagtgcctcttgaggaatcccttggcagtgcaggagcctagctggactcaagaatattttgccaagggcacccagcagaaccaatggaagcagaatcacagaaataggagaagaggacaaagatactcagagagaaaaagtaaaagaccgaagaaggaggctggagagaccaggatccttccagctgaacaaagtcagccacaaagcagactagccagccggctacaattggagtcagagtcccaaagacatgggcttgttagagtgctgtgcaagatgtctggtaggggccccctttgcttccctggtggccactggattgtgtttctttggggtggcactgttctgtggctgtggacatgaagccctcactggcacagaaaagctaattgagacctatttctccaaaaactaccaagactatgagtatctcatcaatgtgatccatgccttccagtatgtcatctatggaactgcctctttcttcttcctttatggggccctcctgctggctgagggcttctacaccaccggcgcagtcaggcagatctttggcgactacaagaccaccatctgcggcaagggcctgagcgcaacggtaacagggggccagaaggg

SEQ ID NO: 24793 - DNA, 608 bp, Homo sapiens
  source 1..608: mol_type = unassigned DNA
agatgtctctgcagcaaagcgaaattccaggcaagccttagggaaaaaaggaaaaacaaagaaaatgaaacaattggcagtgaaaggcagaaagagaagatggagcccttagagaagggagtatccctgagagaagaggacaaagatactcagagagaaaaagtaaaagaccgaagaaggaggctggagagaccaggatccttccagctgaacaaagtcagccacaaagcagactagccagccggctacaattggagtcagagtcccaaagacatgggcttgttagagtgctgtgcaagatgtctggtaggggccccctttgcttccctggtggccactggattgtgtttctttggggtggcactgttctgtggctgtggacatgaagccctcactggcacagaaaagctaattgagacctatttctccaaaaactaccaagactatgagtatctcatcaatgtgatccatgccttccagtatgtcatctatggaactgcctctttcttcttcctttatggggccctcctgctggctgagggcttctacaccaccggcgcagtcaggcagatctttggcgactacaagaccaccatctgcggcaaggg

SEQ ID NO: 24794 - DNA, 580 bp, Homo sapiens
  source 1..580: mol_type = unassigned DNA
aatcttgcctttctcccaccccaggaaggagaagaggacaaagatactcagagagaaaaagtaaaagaccgaagaaggaggctggagagaccaggatccttccagctgaacaaagtcagccacaaagcagactagccagccggctacaattggagtcagagtcccaaagacatgggcttgttagagtgctgtgcaagatgtctggtaggggccccctttgcttccctggtggccactggattgtgtttctttggggtggcactgttctgtggctgtggacatgaagccctcactggcacagaaaagctaattgagacctatttctccaaaaactaccaagactatgagtatctcatcaatgtgatccatgccttccagtatgtcatctatggaactgcctctttcttcttcctttatggggccctcctgctggctgagggcttctacaccaccggcgcagtcaggcagatctttggcgactacaagaccaccatctgcggcaagggcctgagcgcaacggtaacagggggccagaaggggaggggttccagaggccaacatcaagctcattctttggagc

SEQ ID NO: 24795 - DNA, 620 bp, Homo sapiens
  source 1..620: mol_type = unassigned DNA
ctgggtgtacagcgtcctcgaaaccacgagcaagtgagcagatcctccgaggcaccagggactccagcccatgccatggcggattctgagcgcctctcggctcctggctgctgggccgcctgcaccaacttctcgcgcactcgaaagggaatcctcctgtttgctgagattatattatgcctggtgatcctgatctgcttcagtgcctccacaccaggctactcctccctgtcggtgattgagatgatccttgctgctattttctttgttgtctacatgtgtgacctgcacaccaagataccattcatcaactggccctggagtgatttcttccgaaccctcatagcggcaatcctctacctgatcacctccattgttgtccttgttgagagaggaaaccactccaaaatcgtcgcaggggtaaaggccatgggagcagctctgaagcacagagcgaagggtttgaggagccagggaccatttctgcctttgcttctggcagaaatcgtgtgacccacagcaagtcacacttgtcctcagacatggaggaaagtctggcccaggacttggttttgcctcccaaggtcttcatttgctgtgaagggaagtcccttgtcaga

SEQ ID NO: 24796 - DNA, 1079 bp, Homo sapiens
  source 1..1079: mol_type = unassigned DNA
ctgggtgtacagcgtcctcgaaaccacgagcaagtgagcagatcctccgaggcaccagggactccagcccatgccatggcggattctgagcgcctctcggctcctggctgctgggccgcctgcaccaacttctcgcgcactcgaaagggaatcctcctgtttgctgagattatattatgcctggtgatcctgatctgcttcagtgcctccacaccaggctactcctccctgtcggtgattgagatgatccttgctgctattttctttgttgtctacatgtgtgacctgcacaccaagataccattcatcaactggccctggagtgatttcttccgaaccctcatagcggcaatcctctacctgatcacctccattgttgtccttgttgagagaggaaaccactccaaaatcgtcgcaggggtactgggcctaatcgctacgtgcctctttggctatgatgcctatgtcaccttccccgttcggcagccaagacatacagcagcccccactgaccccgcagatggcccggtgtaggcgaacttccctcatttctctctgcaatctgcaaataactcctccattgaaataactcctccccaccccaacaacaacattcccagcagaccaactcccaccccctctttgaggtaaaagtgcctttattgggagacttttgtcttccagcctgccaatcaaccctcctgggtgtggccaccatatgtgtgtgcctaggtcctccttctgcacgatccaataggagacaccagttctgactgaaccatgcccccacctaagtcacaaaatgagggaagtggggagttagatttcagagtccaggccctaggttgggacccactccaaataatctcctcggtgtgggtggtggttctatagagggataaatgaataataaacattgttaaaatatacgataatgaataaagtaatcctttcatcaaatgtgggtaaatttcaagcatcaggagggggaaatggagtggaaacagctggggcaaggaggcaaagaagccaggcctgttttacaacaaatattaaattacttcaataatacaaacgag

SEQ ID NO: 24797 - DNA, 1212 bp, Homo sapiens
  source 1..1212: mol_type = unassigned DNA
cgcgtgagtcccccactggctgctctgaaaagccatctttgcattgttcctcatccgcctccttgctcgccgcagccgcctccgccgcgcgcctcctccgccgccgcggactccggcagctttatcgccagagtccctgaactctcgctttctttttaatcccctgcatcggatcaccggcgtgccccaccatgtcagacgcagccgtagacaccagctccgaaatcaccaccaaggacttaaaggagaagaaggaagttgtggaagaggcagaaaatggaagagacgcccctgctaacgggaatgctgagaatgaggaaaatggggagcaggaggctgacaatgaggtagacgaagaagaggaagaaggtggggaggaagaggaggaggaagaagaaggtgatggtgaggaagaggatggagatgaagatgaggaagctgagtcagctacgggcaagcgggcagctgaagatgatgaggatgacgatgtcgataccaagaagcagaagaccgacgaggatgactagacagcaaaaaaggaaaagttaaactaaaaaaaaaaaggccgccgtgacctattcaccctccacttcccgtctcagaatctaaacgtggtcaccttcgagtagagaggcccgcccgcccaccgtgggcagtgccacccgcagatgacacgcgctctccaccacccaacccaaaccatgagaatttgcaacaggggaggaaaaaagaaccaaaacttccaaggccctgctttttttcttaaaagtactttaaaaaggaaatttgtttgtattttttatttacattttatatttttgtacatattgttagggtcagccatttttaatgatctcggatgaccaaaccagccttcggagcgttctctgtcctacttctgactttacttgtggtgtgaccatgttcattataatctcaaaggagaaaaaaaaccttgtaaaaaaagcaaaaatgacaacagaaaaacaatcttattccgagcattccagtaacttttttgtgtatgtacttagctgtactataagtagttggtttgtatgagatggttaaaaaggccaaagataaaaggtttctttttttttccttttttgtctatgaagttgctgtttattttttttggcctgtttgatgtatgtgtgaaacaatgttgtccaacaataaacaggaattttattttgctgagttgttcta

SEQ ID NO: 24798 - DNA, 811 bp, Homo sapiens
  source 1..811: mol_type = unassigned DNA
agactgactggctctttcttaatatttcggccctcgtccgcgcccgtcgtgcccctgcagggattggcgcgagtcaccttggcgtctccttaacccttgtgtccctggcgtcatctctgactctcccaggggcgacttcttggcagagcggagctcggggcccggatctccacaggggctctcagtgaccccttctggactcagtccgggaatgagtttgtggggtgagaacaccgtccccagtgcggggcctggctgttcgattttctccgaagcaccaaaaggtgacttcccgcgagggcgatgagtagtagcccgagaggcgcatccccgacagtctcggacctacgcagcccggtggactttggggcgacctcccgtgggacttggcccgccgaatgcagacattcgggcctgccggggtggcggcagtggggcgtcgagtcgagagcccggccgaccgacgcgcgacccgcgcgtgccactgcaagctctgcctgccggccgggagtctccaaggacttaaaggagaagaaggaagtgtggaagaggcagaaaatggaagagacgcccctgctaacgggaatgctaatgaggaaaatggggagcaggaggctgacaatgaggtagacgaagaagaggaagaaggtggggaggaagaggaggaggaagaagaaggtgatggtgaggaagaggatggagatgaagatgaggaagctgagtcagctacgggcaagcgggcagctgaagatgatgaggatgacgatgtcgataccaagaagcagaagaccgacgaggatgactagacagc

SEQ ID NO: 24799 - DNA, 1221 bp, Homo sapiens
  source 1..1221: mol_type = unassigned DNA
ctggcgccgcgtgagtcccccactggctgctctgaaaagccatctttgcattgttcctcatccgcctccttgctcgccgcagccgcctccgccgcgcgcctcctccgccgccgcggactccggcagctttatcgccagagtccctgaactctcgctttctttttaatcccctgcatcggatcaccggcgtgccccaccatgtcagacgcagccgtagacaccagctccgaaatcaccaccaaggacttaaaggagaagaaggaagttgtggaagaggcagaaaatggaagagacgcccctgctaacgggaatgctaatgaggaaaatggggagcaggaggctgacaatgaggtagacgaagaagaggaagaaggtggggaggaagaggaggaggaagaagaaggtgatggtgaggaagaggatggagatgaagatgaggaagctgagtcagctacgggcaagcgggcagctgaagatgatgaggatgacgatgtcgataccaagaagcagaagaccgacgaggatgactagacagcaaaaaaggaaaagttaaactaaaaaaaaaaaggccgccgtgacctattcaccctccacttcccgtctcagaatctaaacgtggtcaccttcgagtagagaggcccgcccgcccaccgtgggcagtgccacccgcagatgacacgcgctctccaccacccaacccaaaccatgagaatttgcaacaggggaggaaaaaagaaccaaaacttccaaggccctgctttttttcttaaaagtactttaaaaaggaaatttgtttgtattttttatttacattttatatttttgtacatattgttagggtcagccatttttaatgatctcggatgaccaaaccagccttcggagcgttctctgtcctacttctgactttacttgtggtgtgaccatgttcattataatctcaaaggagaaaaaaaaccttgtaaaaaaagcaaaaatgacaacagaaaaacaatcttattccgagcattccagtaacttttttgtgtatgtacttagctgtactataagtagttggtttgtatgagatggttaaaaaggccaaagataaaaggtttctttttttttccttttttgtctatgaagttgctgtttattttttttggcctgtttgatgtatgtgtgaaacaatgttgtccaacaataaacaggaattttattttgctgagttgttctaacaaa

SEQ ID NO: 24800 - DNA, 4530 bp, Homo sapiens
  source 1..4530: mol_type = unassigned DNA
acacactcggggagcgggagcgcggcgcggacgcaaagccgccgggctgctgcgcccagagccagccggagccggagccggagcccgaactgcagctccagccccagccgtgcggagccgcagcccaggccggggccggcggcggctcatggacagcggggcgggcggccggcgctgcccggaggcggccctcctgattctggggcctcccaggatggagcacctgaggcacagcccaggccctggggggcaacggctactgctgccctccatgctgctagcactgctgctcctgctggctccatccccaggccacgccactcgggtagtgtacaaggtgccggaggaacagccacccaacaccctcattgggagcctcgcagccgactatggttttccagatgtggggcacctgtacaagctagaggtgggtgccccgtaccttcgcgtggatggcaagacaggtgacattttcaccaccgagacctccatcgaccgtgaggggctccgtgaatgccagaaccagctccctggtgatccctgcatcctggagtttgaggtatctatcacagacctcgtgcagaatggcagcccccggctgctagagggccagatagaagtacaagacatcaatgacaacacacccaacttcgcctcaccagtcatcactctggccatccctgagaacaccaacatcggctcactcttccccatcccgctggcttcagaccgtgatgctggtcccaacggtgtggcatcctatgagctgcaggctgggcctgaggcccaggagctatttgggctgcaggtggcagaggaccaggaggagaagcaaccacagctcattgtgatgggcaacctggaccgtgagcgctgggactcctatgacctcaccatcaaggtgcaggatggcggcagccccccacgcgccagcagtgccctgctgcgtgtcaccgtgcttgacaccaatgacaacgcccccaagtttgagcggccctcctatgaggccgaactatctgagaatagccccataggccactcggtcatccaggtgaaggccaatgactcagaccaaggtgccaatgcagaaatcgaatacacattccaccaggcgcccgaagttgtgaggcgtcttcttcgactggacaggaacactggacttatcactgttcagggcccggtggaccgtgaggacctaagcaccctgcgcttctcagtgcttgctaaggaccgaggcaccaaccccaagagtgcccgtgcccaggtggttgtgaccgtgaaggacatgaatgacaatgcccccaccattgagatccggggcatagggctagtgactcatcaagatgggatggctaacatctcagaggatgtggcagaggagacagctgtggccctggtgcaggtgtctgaccgagatgagggagagaatgcagctgtcacctgtgtggtggcaggtgatgtgcccttccagctgcgccaggccagtgagacaggcagtgacagcaagaagaagtatttcctgcagactaccaccccgctagactacgagaaggtcaaagactacaccattgagattgtggctgtggactctggcaaccccccactctccagcactaactccctcaaggtgcaggtggtggacgtcaatgacaacgcacctgtcttcactcagagtgtcactgaggtcgccttcccggaaaacaacaagcctggtgaagtgattgctgagatcactgccagtgatgctgactctggctctaatgctgagctggtttactctctggagcctgagccggctgctaagggcctcttcaccatctcacccgagactggagagatccaggtgaagacatctctggatcgggaacagcgggagagctatgagttgaaggtggtggcagctgaccggggcagtcctagcctccagggcacagccactgtccttgtcaatgtgctggactgcaatgacaatgaccccaaatttatgctgagtggctacaacttctcagtgatggagaacatgccagcactgagtccagtgggcatggtgactgtcattgatggagacaagggggagaatgcccaggtgcagctctcagtggagcaggacaacggtgactttgttatccagaatggcacaggcaccatcctatccagcctgagctttgatcgagagcaacaaagcacctacaccttccagctgaaggcagtggatggtggcgtcccacctcgctcagcttacgttggtgtcaccatcaatgtgctggacgagaatgacaacgcaccctatatcactgccccttctaacacctctcacaagctgctgaccccccagacacgtcttggtgagacggtcagccaggtggcagccgaggactttgactctggtgtcaatgctgagctgatctacagcattgcaggtggcaacccttatggactcttccagattgggtcacattcaggtgccatcaccctggagaaggagattgagcggcgccaccatgggctacaccgcctggtggtgaaggtcagtgaccgcggcaagcccccacgctatggcacagccttggtccatctttatgtcaatgagactctggccaaccgcacgctgctggagaccctcctgggccacagcctggacacgccgctggatattgacattgctggggatccagaatatgagcgctccaagcagcgtggcaacattctctttggtgtggtggctggtgtggtggccgtggccttgctcatcgccctggcggttcttgtgcgctactgcagacagcgggaggccaaaagtggttaccaggctggtaagaaggagaccaaggacctgtatgcccccaagcccagtggcaaggcctccaagggaaacaaaagcaaaggcaagaagagcaagtccccaaagcccgtgaagccagtggaggacgaggatgaggccgggctgcagaagtccctcaagttcaacctgatgagcgatgcccctggggacagtccccgcatccacctgcccctcaactacccaccaggcagccctgacctgggccgccactatcgctctaactccccactgccttccatccagctgcagccccagtcaccctcagcctccaagaagcaccaggtggtacaggacctgccacctgcaaacacattcgtgggcaccggggacaccacgtccacgggctctgagcagtactccgactacagctaccgcaccaacccccccaaataccccagcaagcagttacctcaccgccgcgtcaccttctcggccaccagccaggcccaggagctgcaggacccatcccagcacagttactatgacagtggcctggaggagtctgagacgccgtccagcaagtcatcctcagggcctcgactcggtcccctggccctgcctgaggatcactatgagcgcaccacccctgatggcagcataggagagatggagcaccccgagaatgaccttcgccctttgcctgatgtcgccatgacaggcacatgtacccgggagtgcagtgagtttggccactctgacacatgctggatgcctggccagtcatctcccagccgccggaccaagagcagcgccctcaaactctccaccttcgtgccttaccaggaccgaggagggcaggagcctgcgggcgccggcagccccagccccccggaagaccggaacaccaaaacggcccccgtgcgcctcctgccctcctacagtgccttctcccacagtagccatgattcctgcaaggactcggccaccttggaggaaatccccctgacccagacctcggacttcccacccgcagccacaccggcatctgcccagacggccaagcgcgagatctacctgtgagccccctactggccggccggcccccctcccccagccgccggccagctcccaaatggcccattccagggcctcactctccaccccttcagcgtggacttcctggccagggccccaagtgggggtatcactgacctcatgaccacgctggcccttctcccatgcagggtccaggtcctctcccctcatttccatctcccagcccccaggggccccttcccctttatggggcttcccccatctgatgcccaagagggctcctctgcaatgactgggctccttcccttgacttccagggagcaccccctcgatttgggcagatggtggagtcaagggtgggcagcgtacttctaactcattgtttccctcatggccgaccagggcggggatagcatgcccaattttagccctgaagcagggctgaactggggagcccctttccctgggagctcccagaggaaactcttgaccaccagtggctccctgaagggcttttgttaccaaaggtggggtagggacgggggtgggagtggagcggaggccttgttttcccgtgctgctcctggactggcccacctgcctgccacatgcccacgcctagtcccatctgggcccccattccctgctggtcatgcagtgtctgtatataaggaccttggaatgacgtcccc

SEQ ID NO: 24801 - DNA, 3819 bp, Homo sapiens
  source 1..3819: mol_type = unassigned DNA
ggggagcgggagcgcggcgcggacgcaaagccgccgggctgctgcgcccagagccagccggagccggagccggagcccgaactgcagctccagccccagccgtgcggagccgcagcccaggccggggccggcggcggctcatggacagcggggcgggcggccggcgctgcccggaggcggccctcctgattctggggcctcccaggatggagcacctgaggcacagcccaggccctggggggcaacggctactgctgccctccatgctgctagcactgctgctcctgctggctccatccccaggccacgccactcgggtagtgtacaaggtgccggaggaacagccacccaacaccctcattgggagcctcgcagccgactatggttttccagatgtggggcacctgtacaagctagaggtgggtgccccgtaccttcgcgtggatggcaagacaggtgacattttcaccaccgagacctccatcgaccgtgaggggctccgtgaatgccagaaccagctccctggtgatccctgcatcctggagtttgaggtatctatcacagacctcgtgcagaatggcagcccccggctgctagagggccagatagaagtacaagacatcaatgacaacacacccaacttcgcctcaccagtcatcactctggccatccctgagaacaccaacatcggctcactcttccccatcccgctggcttcagaccgtgatgctggtcccaacggtgtggcatcctatgagctgcaggctgggcctgaggcccaggagctatttgggctgcaggtggcagaggaccaggaggagaagcaaccacagctcattgtgatgggcaacctggaccgtgagcgctgggactcctatgacctcaccatcaaggtgcaggatggcggcagccccccacgcgccagcagtgccctgctgcgtgtcaccgtgcttgacaccaatgacaacgcccccaagtttgagcggccctcctatgaggccgaactatctgagaatagccccataggccactcggtcatccaggtgaaggccaatgactcagaccaaggtgccaatgcagaaatcgaatacacattccaccaggcgcccgaagttgtgaggcgtcttcttcgactggacaggaacactggacttatcactgttcagggcccggtggaccgtgaggacctaagcaccctgcgcttctcagtgcttgctaaggaccgaggcaccaaccccaagagtgcccgtgcccaggtggttgtgaccgtgaaggacatgaatgacaatgcccccaccattgagatccggggcatagggctagtgactcatcaagatgggatggctaacatctcagaggatgtggcagaggagacagctgtggccctggtgcaggtgtctgaccgagatgagggagagaatgcagctgtcacctgtgtggtggcaggtgatgtgcccttccagctgcgccaggccagtgagacaggcagtgacagcaagaagaagtatttcctgcagactaccaccccgctagactacgagaaggtcaaagactacaccattgagattgtggctgtggactctggcaaccccccactctccagcactaactccctcaaggtgcaggtggtggacgtcaatgacaacgcacctgtcttcactcagagtgtcactgaggtcgccttcccggaaaacaacaagcctggtgaagtgattgctgagatcactgccagtgatgctgactctggctctaatgctgagctggtttactctctggagcctgagccggctgctaagggcctcttcaccatctcacccgagactggagagatccaggtgaagacatctctggatcgggaacagcgggagagctatgagttgaaggtggtggcagctgaccggggcagtcctagcctccagggcacagccactgtccttgtcaatgtgctggactgcaatgacaatgaccccaaatttatgctgagtggctacaacttctcagtgatggagaacatgccagcactgagtccagtgggcatggtgactgtcattgatggagacaagggggagaatgcccaggtgcagctctcagtggagcaggacaacggtgactttgttatccagaatggcacaggcaccatcctatccagcctgagctttgatcgagagcaacaaagcacctacaccttccagctgaaggcagtggatggtggcgtcccacctcgctcagcttacgttggtgtcaccatcaatgtgctggacgagaatgacaacgcaccctatatcactgccccttctaacacctctcacaagctgctgaccccccagacacgtcttggtgagacggtcagccaggtggcagccgaggactttgactctggtgtcaatgctgagctgatctacagcattgcaggtggcaacccttatggactcttccagattgggtcacattcaggtgccatcaccctggagaaggagattgagcggcgccaccatgggctacaccgcctggtggtgaaggtcagtgaccgcggcaagcccccacgctatggcacagccttggtccatctttatgtcaatgagactctggccaaccgcacgctgctggagaccctcctgggccacagcctggacacgccgctggatattgacattgctggggatccagaatatgagcgctccaagcagcgtggcaacattctctttggtgtggtggctggtgtggtggccgtggccttgctcatcgccctggcggttcttgtgcgctactgcagacagcgggaggccaaaagtggttaccaggctggtaagaaggagaccaaggacctgtatgcccccaagcccagtggcaaggcctccaagggaaacaaaagcaaaggcaagaagagcaagtccccaaagcccgtgaagccagtggaggacgaggatgaggccgggctgcagaagtccctcaagttcaacctgatgagcgatgcccctggggacagtccccgcatccacctgcccctcaactacccaccaggcagccctgacctgggccgccactatcgctctaactccccactgccttccatccagctgcagccccagtcaccctcagcctccaagaagcaccaggtggtacaggacctgccacctgcaaacacattcgtgggcaccggggacaccacgtccacgggctctgagcagtactccgactacagctaccgcaccaacccccccaaataccccagcaagcaggtaggccagccctttcagctcagcacaccccagcccctaccccacccctaccacggagccatctggaccgaggtgtgggagtgatggagcaggtttactgtgcctgcccgtgttgggggccagcctgagccagcagtgggaggtggggccttagtgcctcaccgggcacacggattaggctgagtgaagattaagggagggtgtgctctgtggtctcctccctgccctctccccactggggagagacctgtgatttgccaagtccctggaccctggaccagctactgggccttatgggttgggggtggtaggcaggtgagcgtaagtggggagggaaatgggtaagaagtctactccaaacctaggtctctatgtcagaccagacctaggtgcttctctaggagggaaacagggagacctggggtcctgtggataactgagtggggagtctgccaggggagggcaccttcccattgtgccttctgtgtgtattgtgcattaacctcttcctcaccactaggcttctggggctgggtcccacatgcccttgaccctgacaataaagttctctatttttgga

SEQ ID NO: 24802 - DNA, 3769 bp, Homo sapiens
  source 1..3769: mol_type = unassigned DNA
gcggcgcggacgcaaagccgccgggctgctgcgcccagagccagccggagccggagccggagcccgaactgcagctccagccccagccgtgcggagccgcagcccaggccggggccggcggcggctcatggacagcggggcgggcggccggcgctgcccggaggcggccctcctgattctggggcctcccaggatggagcacctgaggcacagcccaggccctggggggcaacggctactgctgccctccatgctgctagcactgctgctcctgctggctccatccccaggccacgccactcgggtagtgtacaaggtgccggaggaacagccacccaacaccctcattgggagcctcgcagccgactatggttttccagatgtggggcacctgtacaagctagaggtgggtgccccgtaccttcgcgtggatggcaagacaggtgacattttcaccaccgagacctccatcgaccgtgaggggctccgtgaatgccagaaccagctccctggtgatccctgcatcctggagtttgaggtatctatcacagacctcgtgcagaatggcagcccccggctgctagagggccagatagaagtacaagacatcaatgacaacacacccaacttcgcctcaccagtcatcactctggccatccctgagaacaccaacatcggctcactcttccccatcccgctggcttcagaccgtgatgctggtcccaacggtgtggcatcctatgagctgcaggtggcagaggaccaggaggagaagcaaccacagctcattgtgatgggcaacctggaccgtgagcgctgggactcctatgacctcaccatcaaggtgcaggatggcggcagccccccacgcgccagcagtgccctgctgcgtgtcaccgtgcttgacaccaatgacaacgcccccaagtttgagcggccctcctatgaggccgaactatctgagaatagccccataggccactcggtcatccaggtgaaggccaatgactcagaccaaggtgccaatgcagaaatcgaatacacattccaccaggcgcccgaagttgtgaggcgtcttcttcgactggacaggaacactggacttatcactgttcagggcccggtggaccgtgaggacctaagcaccctgcgcttctcagtgcttgctaaggaccgaggcaccaaccccaagagtgcccgtgcccaggtggttgtgaccgtgaaggacatgaatgacaatgcccccaccattgagatccggggcatagggctagtgactcatcaagatgggatggctaacatctcagaggatgtggcagaggagacagctgtggccctggtgcaggtgtctgaccgagatgagggagagaatgcagctgtcacctgtgtggtggcaggtgatgtgcccttccagctgcgccaggccagtgagacaggcagtgacagcaagaagaagtatttcctgcagactaccaccccgctagactacgagaaggtcaaagactacaccattgagattgtggctgtggactctggcaaccccccactctccagcactaactccctcaaggtgcaggtggtggacgtcaatgacaacgcacctgtcttcactcagagtgtcactgaggtcgccttcccggaaaacaacaagcctggtgaagtgattgctgagatcactgccagtgatgctgactctggctctaatgctgagctggtttactctctggagcctgagccggctgctaagggcctcttcaccatctcacccgagactggagagatccaggtgaagacatctctggatcgggaacagcgggagagctatgagttgaaggtggtggcagctgaccggggcagtcctagcctccagggcacagccactgtccttgtcaatgtgctggactgcaatgacaatgaccccaaatttatgctgagtggctacaacttctcagtgatggagaacatgccagcactgagtccagtgggcatggtgactgtcattgatggagacaagggggagaatgcccaggtgcagctctcagtggagcaggacaacggtgactttgttatccagaatggcacaggcaccatcctatccagcctgagctttgatcgagagcaacaaagcacctacaccttccagctgaaggcagtggatggtggcgtcccacctcgctcagcttacgttggtgtcaccatcaatgtgctggacgagaatgacaacgcaccctatatcactgccccttctaacacctctcacaagctgctgaccccccagacacgtcttggtgagacggtcagccaggtggcagccgaggactttgactctggtgtcaatgctgagctgatctacagcattgcaggtggcaacccttatggactcttccagattgggtcacattcaggtgccatcaccctggagaaggagattgagcggcgccaccatgggctacaccgcctggtggtgaaggtcagtgaccgcggcaagcccccacgctatggcacagccttggtccatctttatgtcaatgagactctggccaaccgcacgctgctggagaccctcctgggccacagcctggacacgccgctggatattgacattgctggggatccagaatatgagcgctccaagcagcgtggcaacattctctttggtgtggtggctggtgtggtggccgtggccttgctcatcgccctggcggttcttgtgcgctactgcagacagcgggaggccaaaagtggttaccaggctggtaagaaggagaccaaggacctgtatgcccccaagcccagtggcaaggcctccaagggaaacaaaagcaaaggcaagaagagcaagtccccaaagcccgtgaagccagtggaggacgaggatgaggccgggctgcagaagtccctcaagttcaacctgatgagcgatgcccctggggacagtccccgcatccacctgcccctcaactacccaccaggcagccctgacctgggccgccactatcgctctaactccccactgccttccatccagctgcagccccagtcaccctcagcctccaagaagcaccaggtggtacaggacctgccacctgcaaacacattcgtgggcaccggggacaccacgtccacgggctctgagcagtactccgactacagctaccgcaccaacccccccaaataccccagcaagcaggtaggccagccctttcagctcagcacaccccagcccctaccccacccctaccacggagccatctggaccgaggtgtgggagtgatggagcaggtttactgtgcctgcccgtgttgggggccagcctgagccagcagtgggaggtggggccttagtgcctcaccgggcacacggattaggctgagtgaagattaagggagggtgtgctctgtggtctcctccctgccctctccccactggggagagacctgtgatttgccaagtccctggaccctggaccagctactgggccttatgggttgggggtggtaggcaggtgagcgtaagtggggagggaaatgggtaagaagtctactccaaacctaggtctctatgtcagaccagacctaggtgcttctctaggagggaaacagggagacctggggtcctgtggataactgagtggggagtctgccaggggagggcaccttcccattgtgccttctgtgtgtattgtgcattaacctcttcctcaccactaggcttctggggctgggtcccacatgcccttgaccctgacaataaagttctctatttttgg

SEQ ID NO: 24803 - DNA, 3307 bp, Homo sapiens
  source 1..3307: mol_type = unassigned DNA
ctgagtttctggaatcggggttctgtgctgggactgactgctcttgtggagaatcgtgtgtcagtgggagaggccctcctgattctggggcctcccaggatggagcacctgaggcacagcccaggccctggggggcaacggctactgctgccctccatgctgctagcactgctgctcctgctggctccatccccaggccacgccactcgggtagtgtacaaggtgccggaggaacagccacccaacaccctcattgggagcctcgcagccgactatggttttccagatgtggggcacctgtacaagctagaggtgggtgccccgtaccttcgcgtggatggcaagacaggtgacattttcaccaccgagacctccatcgaccgtgaggggctccgtgaatgccagaaccagctccctggtgatccctgcatcctggagtttgaggtatctatcacagacctcgtgcagaatggcagcccccggctgctagagggccagatagaagtacaagacatcaatgacaacacacccaacttcgcctcaccagtcatcactctggccatccctgagaacaccaacatcggctcactcttccccatcccgctggcttcagaccgtgatgctggtcccaacggtgtggcatcctatgagctgcaggctgggcctgaggcccaggagctatttgggctgcaggtggcagaggaccaggaggagaagcaaccacagctcattgtgatgggcaacctggaccgtgagcgctgggactcctatgacctcaccatcaaggtgcaggatggcggcagccccccacgcgccagcagtgccctgctgcgtgtcaccgtgcttgacaccaatgacaacgcccccaagtttgagcggccctcctatgaggccgaactatctgagaatagccccataggccactcggtcatccaggtgaaggccaatgactcagaccaaggtgccaatgcagaaatcgaatacacattccaccaggcgcccgaagttgtgaggcgtcttcttcgactggacaggaacactggacttatcactgttcagggcccggtggaccgtgaggacctaagcaccctgcgcttctcagtgcttgctaaggaccgaggcaccaaccccaagagtgcccgtgcccaggtggttgtgaccgtgaaggacatgaatgacaatgcccccaccattgagatccggggcatagggctagtgactcatcaagatgggatggctaacatctcagaggatgtggcagaggagacagctgtggccctggtgcaggtgtctgaccgagatgagggagagaatgcagctgtcacctgtgtggtggcaggtgatgtgcccttccagctgcgccaggccagtgagacaggcagtgacagcaagaagaagtatttcctgcagactaccaccccgctagactacgagaaggtcaaagactacaccattgagattgtggctgtggactctggcaaccccccactctccagcactaactccctcaaggtgcaggtggtggacgtcaatgacaacgcacctgtcttcactcagagtgtcactgaggtcgccttcccggaaaacaacaagcctggtgaagtgattgctgagatcactgccagtgatgctgactctggctctaatgctgagctggtttactctctggagcctgagccggctgctaagggcctcttcaccatctcacccgagactggagagatccaggtgaagacatctctggatcgggaacagcgggagagctatgagttgaaggtggtggcagctgaccggggcagtcctagcctccagggcacagccactgtccttgtcaatgtgctggactgcaatgacaatgaccccaaatttatgctgagtggctacaacttctcagtgatggagaacatgccagcactgagtccagtgggcatggtgactgtcattgatggagacaagggggagaatgcccaggtgcagctctcagtggagcaggacaacggtgactttgttatccagaatggcacaggcaccatcctatccagcctgagctttgatcgagagcaacaaagcacctacaccttccagctgaaggcagtggatggtggcgtcccacctcgctcagcttacgttggtgtcaccatcaatgtgctggacgagaatgacaacgcaccctatatcactgccccttctaacacctctcacaagctgctgaccccccagacacgtcttggtgagacggtcagccaggtggcagccgaggactttgactctggtgtcaatgctgagctgatctacagcattgcaggtggcaacccttatggactcttccagattgggtcacattcaggtgccatcaccctggagaaggagattgagcggcgccaccatgggctacaccgcctggtggtgaaggtcagtgaccgcggcaagcccccacgctatggcacagccttggtccatctttatgtcaatgagactctggccaaccgcacgctgctggagaccctcctgggccacagcctggacacgccgctggatattgacattgctggggatccagaatatgagcgctccaagcagcgtggcaacattctctttggtgtggtggctggtgtggtggccgtggccttgctcatcgccctggcggttcttgtgcgctactgcagacagcgggaggccaaaagtggttaccaggctggtaagaaggagaccaaggacctgtatgcccccaagcccagtggcaaggcctccaagggaaacaaaagcaaaggcaagaagagcaagtccccaaagcccgtgaagccagtggaggacgaggatgaggccgggctgcagaagtccctcaagttcaacctgatgagcgatgcccctggggacagtccccgcatccacctgcccctcaactacccaccaggcagccctgacctgggccgccactatcgctctaactccccactgccttccatccagctgcagccccagtcaccctcagcctccaagaagcaccaggtggtacaggacctgccacctgcaaacacattcgtgggcaccggggacaccacgtccacgggctctgagcagtactccgactacagctaccgcaccaacccccccaaataccccagcaagcaggtaggccagccctttcagctcagcacaccccagcccctaccccacccctaccacggagccatctggaccgaggtgtgggagtgatggagcaggtttactgtgcctgcccgtgttgggggccagcctgagccagcagtgggaggtggggccttagtgcctcaccgggcacacggat

SEQ ID NO: 24804 - DNA, 5366 bp, Homo sapiens
  source 1..5366: mol_type = unassigned DNA
caggctcagaggctgaagcaggaggaaggaaggactggaaggaaaaagagacaggttagagggaaagaggcttgggaagaaaacagcagaaaagaaactgctcattacacttacagagaggcaagtaacggtggagatgaggacagagggaaccaagactctgaaagacaaaaaatacaaatagagcgaaagaggaaaaaaatgtcaagaagaacatccatccggagaaatgaagagaatgaaagttttaagctgcagagccgttctgtgcttttccggcacaaaattatatcgctgattttaagcccttttgcatttgccagccgttgacattaagaggcatgtttaacggtgccaacagcatctccttttccttctcctcttcctcttcttcttcttcctcctcctcctcctctttttcctcctcctcgttctcctcccatcagcaagaagacaaaccgaggacagtcttgaaatatcgaaatttcctctttgggatttgccagcgccaagactgtcggaataaaggacgctgactattgtattattgttattttattaattagtcagtggaaagattacagatgaggaaaggggacgcctgtcacccttcctgtgctaagatttaaaaaaaaatgaggctggattgcgggaagctctaaaatgaagcaaaaggagtaagatttttaaagacagaaagccacaggagcccccacgtagcgcacttttatttgtattttttcagatttttttttgtttcgtggtggtgggggaggtgattgggtggctgactggctgcgggaagctacttcctttccttttggagatgattgtgctattattgtttgccttgctctggatggtggaaggagtcttttcccagcttcactacacggtacaggaggagcaggaacatggcactttcgtggggaatatcgctgaagatctgggtctggacattacaaaactttcggctcgcgggtttcagacggtgcccaactcaaggaccccttacttagacctcaacctggagacaggggtgctgtacgtgaacgagaaaatagaccgcgaacaaatctgcaaacagagcccctcctgtgtcctgcacctggaggtctttctggagaaccccctggagctgttccaggtggagatcgaggtgctggacattaatgacaaccccccctctttcccggagccagacctgacggtggaaatctctgagagcgccacgccaggcactcgcttccccttggagagcgcattcgacccagacgtgggcaccaactccttgcgcgactacgagatcacccccaacagctacttctccctggacgtgcagacccagggggatggcaaccgattcgctgagctggtgctggagaagccactggaccgagagcagcaagcggtgcaccgctacgtgctgaccgcggtggacggaggaggtgggggaggagtaggagaaggagggggaggtggcgggggagcaggcctgcccccccagcagcagcgcaccggcacggccctactcaccatccgagtgctggactccaatgacaatgtgcccgctttcgaccaacccgtctacactgtgtccctaccagagaactctcccccaggcactctcgtgatccagctcaacgccaccgacccggacgagggccagaacggtgaggtcgtgtactccttcagcagccacatttcgccccgggcgcgggagcttttcggactctcgccgcgcactggcagactggaggtaagcggcgagttggactatgaagagagcccagtgtaccaagtgtacgtgcaagccaaggacctgggccccaacgccgtgcctgcgcactgcaaggtgctagtgcgagtactggatgctaatgacaacgcgccagagatcagcttcagcaccgtgaaggaagcggtgagtgagggcgcggcgcccggcactgtggtggcccttttcagcgtgactgaccgcgactcagaggagaatgggcaggtgcagtgcgagctactgggagacgtgcctttccgcctcaagtcttcctttaagaattactacaccatcgttaccgaagcccccctggaccgagaggcgggggactcctacaccctgactgtagtggctcgggaccggggcgagcctgcgctctccaccagtaagtcgatccaggtacaagtgtcggatgtgaacgacaacgcgccgcgtttcagccagccggtctacgacgtgtatgtgactgaaaacaacgtgcctggcgcctacatctacgcggtgagcgccaccgaccgggatgagggcgccaacgcccagcttgcctactctatcctcgagtgccagatccagggcatgagcgtcttcacctacgtttctatcaactctgagaacggctacttgtacgccctgcgctccttcgactatgagcagctgaaggacttcagttttcaggtggaagcccgggacgctggcagcccccaggcgctggctggtaacgccactgtcaacatcctcatagtggatcaaaatgacaacgcccctgccatcgtggcgcctctaccagggcgcaacgggactccagcgcgtgaggtgctgccccgctcggcggagccgggttacctgctcacccgcgtggccgccgtggacgcggacgacggcgagaacgcccggctcacttacagcatcgtgcgtggcaacgaaatgaacctctttcgcatggactggcgcaccggggagctgcgcacagcacgccgagtcccggccaagcgcgacccccagcggccttatgagctggtgatcgaggtgcgcgaccatgggcagccgcccctttcctccaccgccaccctggtggttcagctggtggatggcgccgtggagccccagggcgggggcgggagcggaggcggagggtcaggagagcaccagcgccccagtcgctctggcggcggggaaacctcgctagacctcaccctcatcctcatcatcgcgttgggctcggtgtccttcatcttcctgctggccatgatcgtgctggccgtgcgttgccaaaaagagaagaagctcaacatctatacttgtctggccagcgattgctgcctctgctgctgctgctgcggtggcggaggttcgacctgctgtggccgccaagcccgggcgcgcaagaagaaactcagcaagtcagacatcatgctggtgcagagctccaatgtacccagtaacccggcccaggtgccgatagaggagtccgggggctttggctcccaccaccacaaccagaattactgctatcaggtatgcctgacccctgagtccgccaagaccgacctgatgtttcttaagccctgcagcccttcgcggagtacggacactgagcacaacccctgcggggccatcgtcaccggttacaccgaccagcagcctgatatcatctccaacggaagcattttgtccaacgagactaaacaccagcgagcagagctcagctatctagttgacagacctcgccgagttaacagttctgcattccaggaagccgacatagtaagctctaaggacagtggtcatggagacagtgaacagggagatagtgatcatgatgccaccaaccgtgcccagtcagctggtatggatctcttctccaattgcactgaggaatgtaaagctctgggccactcagatcggtgctggatgccttcttttgtcccttctgatggacgccaggctgctgattatcgcagcaatctgcatgttcctggcatggactctgttccagacactgaggtgtttgaaactccagaagcccagcctggggcagagcggtccttttccacctttggcaaagagaaggcccttcacagcactctggagaggaaggagctggatggactgctgactaatacgcgagcgccttacaaaccaccatatttgacacggaaaaggatatgctagtcaattctacaggacttacctgaagcagcatgatttgcacaaagtcgaccaacaaaagcatcaacttttcaacttcattatcttggccatccagttagtcatgtgtaactgagtattagatttcggatggagtcatcatggccaattataggacctaattgctctcagcaggcctgagaaatgagttgaaatgtgcagaactgtagaaactttagaggcaacagattttgcctccccgatcagtgtgtgcctgtttacagcactatctatctttctctctccaaatgtcactgagccctttagatgtttatattcaccacgagaagccagtcataaagataaaggaaatttgtgcattataaatgcaatatcactgttttaaacttgactgttttatattatttttgtgtgatcaagtgttccgcaagctattccaactttacaagagaaattgtgattatgttcttttcacctgtgggttataaaaaatgttgtattctgaagacccacaaaatatcaaagacattctgtagtttatacaccgtgttgcaaagtgtttactgtactatttcaaagcttctaaataaatataaaatatatatattatattatataattttcctaaaatgtggtacaactcagttggtttttaaatggatgcatacagtccacatcatacaataaaataaaaggtaattcagggtcccaaagacaaacttactaagaaaaaatcattaatagttttctcccaatttccatatcttactcaaccgtgtttttccttgtttaaaagaaaatgatgctctaagctacaaaattttgtcaaaaactcatattgaattttcaatgccaaagatgtagctattgatgttatcagacagagcactgactatgtactatcaaactatctaacaatctgcataagtctgattctatttctatgactttgaatttagaatcacttaaagcttttataaagaatcgataaattcacctgtatttgttgttagaaaaaaactgggtgtctgtacattttgtggtgtaaaatatgtaattgaagattactattttaagaagtcatcagtcatatcactcacacagaattttattttacatagttttgtgacttaattacacatgaatataaaatctataattctatatgaatatatagagatatagaaacatctgaactggtaaagaataactataaaatatgaaagctctaaatttaaaataaatttagagatagaatcatggtacattattgtttcagtattccatgtgaaaattttatagcttaaatgtagtcagtgtttgattaatgaaaaaattcttcatgagtcagccttcaaaagttaagcttgccttttacttttatgtcaacaatattaattattaaatttagtaagacgca

SEQ ID NO: 24805 - DNA, 3946 bp, Homo sapiens
  source 1..3946: mol_type = unassigned DNA
caggctcagaggctgaagcaggaggaaggaaggactggaaggaaaaagagacaggttagagggaaagaggcttgggaagaaaacagcagaaaagaaactgctcattacacttacagagaggcaagtaacggtggagatgaggacagagggaaccaagactctgaaagacaaaaaatacaaatagagcgaaagaggaaaaaaatgtcaagaagaacatccatccggagaaatgaagagaatgaaagttttaagctgcagagccgttctgtgcttttccggcacaaaattatatcgctgattttaagcccttttgcatttgccagccgttgacattaagaggcatgtttaacggtgccaacagcatctccttttccttctcctcttcctcttcttcttcttcctcctcctcctcctctttttcctcctcctcgttctcctcccatcagcaagaagacaaaccgaggacagtcttgaaatatcgaaatttcctctttgggatttgccagcgccaagactgtcggaataaaggacgctgactattgtattattgttattttattaattagtcagtggaaagattacagatgaggaaaggggacgcctgtcacccttcctgtgctaagatttaaaaaaaaatgaggctggattgcgggaagctctaaaatgaagcaaaaggagtaagatttttaaagacagaaagccacaggagcccccacgtagcgcacttttatttgtattttttcagatttttttttgtttcgtggtggtgggggaggtgattgggtggctgactggctgcgggaagctacttcctttccttttggagatgattgtgctattattgtttgccttgctctggatggtggaaggagtcttttcccagcttcactacacggtacaggaggagcaggaacatggcactttcgtggggaatatcgctgaagatctgggtctggacattacaaaactttcggctcgcgggtttcagacggtgcccaactcaaggaccccttacttagacctcaacctggagacaggggtgctgtacgtgaacgagaaaatagaccgcgaacaaatctgcaaacagagcccctcctgtgtcctgcacctggaggtctttctggagaaccccctggagctgttccaggtggagatcgaggtgctggacattaatgacaaccccccctctttcccggagccagacctgacggtggaaatctctgagagcgccacgccaggcactcgcttccccttggagagcgcattcgacccagacgtgggcaccaactccttgcgcgactacgagatcacccccaacagctacttctccctggacgtgcagacccagggggatggcaaccgattcgctgagctggtgctggagaagccactggaccgagagcagcaagcggtgcaccgctacgtgctgaccgcggtggacggaggaggtgggggaggagtaggagaaggagggggaggtggcgggggagcaggcctgcccccccagcagcagcgcaccggcacggccctactcaccatccgagtgctggactccaatgacaatgtgcccgctttcgaccaacccgtctacactgtgtccctaccagagaactctcccccaggcactctcgtgatccagctcaacgccaccgacccggacgagggccagaacggtgaggtcgtgtactccttcagcagccacatttcgccccgggcgcgggagcttttcggactctcgccgcgcactggcagactggaggtaagcggcgagttggactatgaagagagcccagtgtaccaagtgtacgtgcaagccaaggacctgggccccaacgccgtgcctgcgcactgcaaggtgctagtgcgagtactggatgctaatgacaacgcgccagagatcagcttcagcaccgtgaaggaagcggtgagtgagggcgcggcgcccggcactgtggtggcccttttcagcgtgactgaccgcgactcagaggagaatgggcaggtgcagtgcgagctactgggagacgtgcctttccgcctcaagtcttcctttaagaattactacaccatcgttaccgaagcccccctggaccgagaggcgggggactcctacaccctgactgtagtggctcgggaccggggcgagcctgcgctctccaccagtaagtcgatccaggtacaagtgtcggatgtgaacgacaacgcgccgcgtttcagccagccggtctacgacgtgtatgtgactgaaaacaacgtgcctggcgcctacatctacgcggtgagcgccaccgaccgggatgagggcgccaacgcccagcttgcctactctatcctcgagtgccagatccagggcatgagcgtcttcacctacgtttctatcaactctgagaacggctacttgtacgccctgcgctccttcgactatgagcagctgaaggacttcagttttcaggtggaagcccgggacgctggcagcccccaggcgctggctggtaacgccactgtcaacatcctcatagtggatcaaaatgacaacgcccctgccatcgtggcgcctctaccagggcgcaacgggactccagcgcgtgaggtgctgccccgctcggcggagccgggttacctgctcacccgcgtggccgccgtggacgcggacgacggcgagaacgcccggctcacttacagcatcgtgcgtggcaacgaaatgaacctctttcgcatggactggcgcaccggggagctgcgcacagcacgccgagtcccggccaagcgcgacccccagcggccttatgagctggtgatcgaggtgcgcgaccatgggcagccgcccctttcctccaccgccaccctggtggttcagctggtggatggcgccgtggagccccagggcgggggcgggagcggaggcggagggtcaggagagcaccagcgccccagtcgctctggcggcggggaaacctcgctagacctcaccctcatcctcatcatcgcgttgggctcggtgtccttcatcttcctgctggccatgatcgtgctggccgtgcgttgccaaaaagagaagaagctcaacatctatacttgtctggccagcgattgctgcctctgctgctgctgctgcggtggcggaggttcgacctgctgtggccgccaagcccgggcgcgcaagaagaaactcagcaagtcagacatcatgctggtgcagagctccaatgtacccagtaacccggcccaggtgccgatagaggagtccgggggctttggctcccaccaccacaaccagaattactgctatcaggtatgcctgacccctgagtccgccaagaccgacctgatgtttcttaagccctgcagcccttcgcggagtacggacactgagcacaacccctgcggggccatcgtcaccggttacaccgaccagcagcctgatatcatctccaacggaagcattttgtccaacgagactaaacaccagcgagcagagctcagctatctagttgacagacctcgccgagttaacagttctgcattccaggaagccgacatagtaagctctaaggacagtggtcatggagacagtgaacagggagatagtgatcatgatgccaccaaccgtgcccagtcagctggtatggatctcttctccaattgcactgaggaatgtaaagctctgggccactcagatcggtgctggatgccttcttttgtcccttctgatggacgccaggctgctgattatcgcagcaatctgcatgttcctggcatggactctgttccagacactgaggtgtttgaaactccagaagcccagcctggggcagagcggtccttttccacctttggcaaagagaaggcccttcacagcactctggagaggaaggagctggatggactgctgactaatacgcgagcgccttacaaaccaccatatttgagaaaaaaacagagatgc

SEQ ID NO: 24806 - DNA, 3933 bp, Homo sapiens
  source 1..3933: mol_type = unassigned DNA
atggacttgttgtccgggacgtacattttcgcggtcctgctagcatgcgtggtgttccactctggcgcccaggagaaaaactacaccatccgagaagaaatgccagaaaacgtcctgataggcgacttgttgaaagaccttaacttgtcgctgattccaaacaagtccttgacaactgctatgcagttcaagctagtgtacaagaccggagatgtgccactgattcgaattgaagaggatactggtgagatcttcactactggcgctcgcattgatcgtgagaaattatgtgctggtatcccaagggatgagcattgcttttatgaagtggaggttgccattttgccggatgaaatatttagactggttaagatacgttttctgatagaagatataaatgataatgcaccattgttcccagcaacagttatcaacatatcaattccagagaactcggctataaactctaaatatactctcccagcggctgttgatcctgacgtaggaataaacggagttcaaaactacgaactaattaagagtcaaaacatttttggcctcgatgtcattgaaacaccagaaggagacaagatgccacaactgattgttcaaaaggagttagatagggaagagaaggatacctacgtgatgaaagtaaaggttgaagatggtggctttcctcaaagatccagtactgctattttgcaagtgagtgttactgatacaaatgacaaccacccagtctttaaggagacagagattgaagtcagtataccagaaaatgctcctgtaggcacttcagtgacacagctccatgccacagatgctgacataggtgaaaatgccaagatccacttctctttcagcaatctagtctccaacattgccaggagattatttcacctcaatgccaccactggacttatcacaatcaaagaaccactggatagggaagaaacaccaaaccacaagttactggttttggcaagtgatggtggattgatgccagcaagagcaatggtgctggtaaatgttacagatgtcaatgataatgtcccatccattgacataagatacatcgtcaatcctgtcaatgacacagttgttctttcagaaaatattccactcaacaccaaaattgctctcataactgtgacggataaggatgcggaccataatggcagggtgacatgcttcacagatcatgaaatccctttcagattaaggccagtattcagtaatcagttcctcctggagactgcagcatatcttgactatgagtccacaaaagaatatgccattaaattactggctgcagatgctggcaaacctcctttgaatcagtcagcaatgctcttcatcaaagtgaaagatgaaaatgacaatgctccagttttcacccagtctttcgtaactgtttctattcctgagaataactctcctggcatccagttgacgaaagtaagtgcaatggatgcagacagtgggcctaatgctaagatcaattacctgctaggccctgatgctccacctgaattcagcctggattgtcgtacaggcatgctgactgtagtgaagaaactagatagagaaaaagaggataaatatttattcacaattctggcaaaagataacggggtaccacccttaaccagcaatgtcacagtctttgtaagcattattgatcagaatgacaatagcccagttttcactcacaatgaatacaacttctatgtcccagaaaaccttccaaggcatggtacagtaggactaatcactgtaactgatcctgattatggagacaattctgcagttacgctctccattttagatgagaatgatgacttcaccattgattcacaaactggtgtcatccgaccaaatatttcatttgatagagaaaaacaagaatcttacactttctatgtaaaggctgaggatggtggtagagtatcacgttcttcaagtgccaaagtaaccataaatgtggttgatgtcaatgacaacaaaccagttttcattgtccctccttccaactgttcttatgaattggttctaccgtccactaatccaggcacagtggtctttcaggtaattgctgttgacaatgacactggcatgaatgcagaggttcgttacagcattgtaggaggaaacacaagagatctgtttgcaatcgaccaagaaacaggcaacataacattgatggagaaatgtgatgttacagaccttggtttacacagagtgttggtcaaagctaatgacttaggacagcctgattctctcttcagtgttgtaattgtcaatctgttcgtgaatgagtcggtgaccaatgctacactgattaatgaactggtgcgcaaaagcactgaagcaccagtgaccccaaatactgagatagctgatgtatcctcaccaactagtgactatgtcaagatcctggttgcagctgttgctggcaccataactgtcgttgtagttattttcatcactgctgtagtaagatgtcgccaggcaccacaccttaaggctgctcagaaaaacaagcagaattctgaatgggctaccccaaacccagaaaacaggcagatgataatgatgaagaaaaagaaaaagaagaagaagcattcccctaagaacttgctgcttaattttgtcactattgaagaaactaaggcagatgatgttgacagtgatggaaacagagtcacactagaccttcctattgatctagaagagcaaacaatgggaaagtacaattgggtaactacacctactactttcaagcccgacagccctgatttggcccgacactacaaatctgcctctccacagcctgccttccaaattcagcctgaaactcccctgaattcgaagcaccacatcatccaagaactgcctctcgataacacctttgtggcctgtgactctatctccaagtgttcctcaagcagttcagatccctacagcgtttctgactgtggctatccagtgacgaccttcgaggtacctgtgtccgtacacaccagaccgtcccagcggcgtgtcacatttcacctgccagaaggctctcaggaaagcagcagtgatggtggactgggagaccatgatgcaggcagccttaccagcacatctcatggcctgccccttggctatcctcaggaggagtactttgatcgtgctacacccagcaatcgcactgaaggggatggcaactccgatcctgaatctaccttcatcccaaggagcccaacagctgcagaaataactgttcaaccaactgtggaagaggcctctgacaactgcactcaagaatgtctcatctatggccattctgatgcctgctggatgccggcatctctggatcattccagctcttcgcaagcacaggcctctgctctatgccacagcccaccactgtcacaggcctctactcagcaccacagcccacgagtgacacagaccattgctctctgccacagccctccagtgacacagaccatcgcattgtgccacagcccaccaccgatacaggtgtctgctctccaccacagtcctcctctagtgcaggctactgcacttcaccacagcccaccatcagcacaggcctcagccctctgctacagccctcctttagcacaggctgctgcaatcagccacagctctcctctgccacaggttattgccctccatcgtagtcaggcccaatcatcagtcagtttgcagcaaggttgggtgcaaggtgctgatgggctatgctctgttgatcagggagtgcaaggtagtgcaacatctcagttttacaccatgtctgaaagacttcatcccagtgatgattcaattaaagtcattcctttgacaaccttcactccacgccaacaggccagaccgtccagaggtgattcccccattatggaagaacatcccttgtaa

SEQ ID NO: 24807 - DNA, 4044 bp, Homo sapiens
  source 1..4044: mol_type = unassigned DNA
atggacttgttgtccgggacgtacattttcgcggtcctgctagcatgcgtggtgttccactctggcgcccaggagaaaaactacaccatccgagaagaaatgccagaaaacgtcctgataggcgacttgttgaaagaccttaacttgtcgctgattccaaacaagtccttgacaactgctatgcagttcaagctagtgtacaagaccggagatgtgccactgattcgaattgaagaggatactggtgagatcttcactactggcgctcgcattgatcgtgagaaattatgtgctggtatcccaagggatgagcattgcttttatgaagtggaggttgccattttgccggatgaaatatttagactggttaagatacgttttctgatagaagatataaatgataatgcaccattgttcccagcaacagttatcaacatatcaattccagagaactcggctataaactctaaatatactctcccagcggctgttgatcctgacgtaggaataaacggagttcaaaactacgaactaattaagagtcaaaacatttttggcctcgatgtcattgaaacaccagaaggagacaagatgccacaactgattgttcaaaaggagttagatagggaagagaaggatacctacgtgatgaaagtaaaggttgaagatggtggctttcctcaaagatccagtactgctattttgcaagtgagtgttactgatacaaatgacaaccacccagtctttaaggagacagagattgaagtcagtataccagaaaatgctcctgtaggcacttcagtgacacagctccatgccacagatgctgacataggtgaaaatgccaagatccacttctctttcagcaatctagtctccaacattgccaggagattatttcacctcaatgccaccactggacttatcacaatcaaagaaccactggatagggaagaaacaccaaaccacaagttactggttttggcaagtgatggtggattgatgccagcaagagcaatggtgctggtaaatgttacagatgtcaatgataatgtcccatccattgacataagatacatcgtcaatcctgtcaatgacacagttgttctttcagaaaatattccactcaacaccaaaattgctctcataactgtgacggataaggatgcggaccataatggcagggtgacatgcttcacagatcatgaaatccctttcagattaaggccagtattcagtaatcagttcctcctggagactgcagcatatcttgactatgagtccacaaaagaatatgccattaaattactggctgcagatgctggcaaacctcctttgaatcagtcagcaatgctcttcatcaaagtgaaagatgaaaatgacaatgctccagttttcacccagtctttcgtaactgtttctattcctgagaataactctcctggcatccagttgacgaaagtaagtgcaatggatgcagacagtgggcctaatgctaagatcaattacctgctaggccctgatgctccacctgaattcagcctggattgtcgtacaggcatgctgactgtagtgaagaaactagatagagaaaaagaggataaatatttattcacaattctggcaaaagataacggggtaccacccttaaccagcaatgtcacagtctttgtaagcattattgatcagaatgacaatagcccagttttcactcacaatgaatacaacttctatgtcccagaaaaccttccaaggcatggtacagtaggactaatcactgtaactgatcctgattatggagacaattctgcagttacgctctccattttagatgagaatgatgacttcaccattgattcacaaactggtgtcatccgaccaaatatttcatttgatagagaaaaacaagaatcttacactttctatgtaaaggctgaggatggtggtagagtatcacgttcttcaagtgccaaagtaaccataaatgtggttgatgtcaatgacaacaaaccagttttcattgtccctccttccaactgttcttatgaattggttctaccgtccactaatccaggcacagtggtctttcaggtaattgctgttgacaatgacactggcatgaatgcagaggttcgttacagcattgtaggaggaaacacaagagatctgtttgcaatcgaccaagaaacaggcaacataacattgatggagaaatgtgatgttacagaccttggtttacacagagtgttggtcaaagctaatgacttaggacagcctgattctctcttcagtgttgtaattgtcaatctgttcgtgaatgagtcggtgaccaatgctacactgattaatgaactggtgcgcaaaagcactgaagcaccagtgaccccaaatactgagatagctgatgtatcctcaccaactagtgactatgtcaagatcctggttgcagctgttgctggcaccataactgtcgttgtagttattttcatcactgctgtagtaagatgtcgccaggcaccacaccttaaggctgctcagaaaaacaagcagaattctgaatgggctaccccaaacccagaaaacaggcagatgataatgatgaagaaaaagaaaaagaagaagaagcattcccctaagaacttgctgcttaattttgtcactattgaagaaactaaggcagatgatgttgacagtgatggaaacagagtcacactagaccttcctattgatctagaagagcaaacaatgggaaagtacaattgggtaactacacctactactttcaagcccgacagccctgatttggcccgacactacaaatctgcctctccacagcctgccttccaaattcagcctgaaactcccctgaattcgaagcaccacatcatccaagaactgcctctcgataacacctttgtggcctgtgactctatctccaagtgttcctcaagcagttcagatccctacagcgtttctgactgtggctatccagtgacgaccttcgaggtacctgtgtccgtacacaccagaccgccaatgaaggaggttgtgcgatcttgcacccccatgaaagagtctacaactatggagatctggattcatccccaaccacagcggaaatctgaagggaaagtggcaggaaagtcccagcggcgtgtcacatttcacctgccagaaggctctcaggaaagcagcagtgatggtggactgggagaccatgatgcaggcagccttaccagcacatctcatggcctgccccttggctatcctcaggaggagtactttgatcgtgctacacccagcaatcgcactgaaggggatggcaactccgatcctgaatctaccttcatcccaaggagcccaacagctgcagaaataactgttcaaccaactgtggaagaggcctctgacaactgcactcaagaatgtctcatctatggccattctgatgcctgctggatgccggcatctctggatcattccagctcttcgcaagcacaggcctctgctctatgccacagcccaccactgtcacaggcctctactcagcaccacagcccacgagtgacacagaccattgctctctgccacagccctccagtgacacagaccatcgcattgtgccacagcccaccaccgatacaggtgtctgctctccaccacagtcctcctctagtgcaggctactgcacttcaccacagcccaccatcagcacaggcctcagccctctgctacagccctcctttagcacaggctgctgcaatcagccacagctctcctctgccacaggttattgccctccatcgtagtcaggcccaatcatcagtcagtttgcagcaaggttgggtgcaaggtgctgatgggctatgctctgttgatcagggagtgcaaggtagtgcaacatctcagttttacaccatgtctgaaagacttcatcccagtgatgattcaattaaagtcattcctttgacaaccttcactccacgccaacaggccagaccgtccagaggtgattcccccattatggaagaacatcccttgtaa

SEQ ID NO: 24808 - DNA, 3990 bp, Homo sapiens
  source 1..3990: mol_type = unassigned DNA
atggacttgttgtccgggacgtacattttcgcggtcctgctagcatgcgtggtgttccactctggcgcccaggagaaaaactacaccatccgagaagaaatgccagaaaacgtcctgataggcgacttgttgaaagaccttaacttgtcgctgattccaaacaagtccttgacaactgctatgcagttcaagctagtgtacaagaccggagatgtgccactgattcgaattgaagaggatactggtgagatcttcactactggcgctcgcattgatcgtgagaaattatgtgctggtatcccaagggatgagcattgcttttatgaagtggaggttgccattttgccggatgaaatatttagactggttaagatacgttttctgatagaagatataaatgataatgcaccattgttcccagcaacagttatcaacatatcaattccagagaactcggctataaactctaaatatactctcccagcggctgttgatcctgacgtaggaataaacggagttcaaaactacgaactaattaagagtcaaaacatttttggcctcgatgtcattgaaacaccagaaggagacaagatgccacaactgattgttcaaaaggagttagatagggaagagaaggatacctacgtgatgaaagtaaaggttgaagatggtggctttcctcaaagatccagtactgctattttgcaagtgagtgttactgatacaaatgacaaccacccagtctttaaggagacagagattgaagtcagtataccagaaaatgctcctgtaggcacttcagtgacacagctccatgccacagatgctgacataggtgaaaatgccaagatccacttctctttcagcaatctagtctccaacattgccaggagattatttcacctcaatgccaccactggacttatcacaatcaaagaaccactggatagggaagaaacaccaaaccacaagttactggttttggcaagtgatggtggattgatgccagcaagagcaatggtgctggtaaatgttacagatgtcaatgataatgtcccatccattgacataagatacatcgtcaatcctgtcaatgacacagttgttctttcagaaaatattccactcaacaccaaaattgctctcataactgtgacggataaggatgcggaccataatggcagggtgacatgcttcacagatcatgaaatccctttcagattaaggccagtattcagtaatcagttcctcctggagactgcagcatatcttgactatgagtccacaaaagaatatgccattaaattactggctgcagatgctggcaaacctcctttgaatcagtcagcaatgctcttcatcaaagtgaaagatgaaaatgacaatgctccagttttcacccagtctttcgtaactgtttctattcctgagaataactctcctggcatccagttgacgaaagtaagtgcaatggatgcagacagtgggcctaatgctaagatcaattacctgctaggccctgatgctccacctgaattcagcctggattgtcgtacaggcatgctgactgtagtgaagaaactagatagagaaaaagaggataaatatttattcacaattctggcaaaagataacggggtaccacccttaaccagcaatgtcacagtctttgtaagcattattgatcagaatgacaatagcccagttttcactcacaatgaatacaacttctatgtcccagaaaaccttccaaggcatggtacagtaggactaatcactgtaactgatcctgattatggagacaattctgcagttacgctctccattttagatgagaatgatgacttcaccattgattcacaaactggtgtcatccgaccaaatatttcatttgatagagaaaaacaagaatcttacactttctatgtaaaggctgaggatggtggtagagtatcacgttcttcaagtgccaaagtaaccataaatgtggttgatgtcaatgacaacaaaccagttttcattgtccctccttccaactgttcttatgaattggttctaccgtccactaatccaggcacagtggtctttcaggtaattgctgttgacaatgacactggcatgaatgcagaggttcgttacagcattgtaggaggaaacacaagagatctgtttgcaatcgaccaagaaacaggcaacataacattgatggagaaatgtgatgttacagaccttggtttacacagagtgttggtcaaagctaatgacttaggacagcctgattctctcttcagtgttgtaattgtcaatctgttcgtgaatgagtcggtgaccaatgctacactgattaatgaactggtgcgcaaaagcactgaagcaccagtgaccccaaatactgagatagctgatgtatcctcaccaactagtgactatgtcaagatcctggttgcagctgttgctggcaccataactgtcgttgtagttattttcatcactgctgtagtaagatgtcgccaggcaccacaccttaaggctgctcagaaaaacaagcagaattctgaatgggctaccccaaacccagaaaacaggcagatgataatgatgaagaaaaagaaaaagaagaagaagcattcccctaagaacttgctgcttaattttgtcactattgaagaaactaaggcagatgatgttgacagtgatggaaacagagtcacactagaccttcctattgatctagaagagcaaacaatgggaaagtacaattgggtaactacacctactactttcaagcccgacagccctgatttggcccgacactacaaatctgcctctccacagcctgccttccaaattcagcctgaaactcccctgaattcgaagcaccacatcatccaagaactgcctctcgataacacctttgtggcctgtgactctatctccaagtgttcctcaagcagttcagatccctacagcgtttctgactgtggctatccagtgacgaccttcgaggtacctgtgtccgtacacaccagaccgccaatgaaggaggttgtgcgatcttgcacccccatgaaagagtctacaactatggagatctggattcatccccaaccacagtcccagcggcgtgtcacatttcacctgccagaaggctctcaggaaagcagcagtgatggtggactgggagaccatgatgcaggcagccttaccagcacatctcatggcctgccccttggctatcctcaggaggagtactttgatcgtgctacacccagcaatcgcactgaaggggatggcaactccgatcctgaatctactgcagaaataactgttcaaccaactgtggaagaggcctctgacaactgcactcaagaatgtctcatctatggccattctgatgcctgctggatgccggcatctctggatcattccagctcttcgcaagcacaggcctctgctctatgccacagcccaccactgtcacaggcctctactcagcaccacagcccacgagtgacacagaccattgctctctgccacagccctccagtgacacagaccatcgcattgtgccacagcccaccaccgatacaggtgtctgctctccaccacagtcctcctctagtgcaggctactgcacttcaccacagcccaccatcagcacaggcctcagccctctgctacagccctcctttagcacaggctgctgcaatcagccacagctctcctctgccacaggttattgccctccatcgtagtcaggcccaatcatcagtcagtttgcagcaaggttgggtgcaaggtgctgatgggctatgctctgttgatcagggagtgcaaggtagtgcaacatctcagttttacaccatgtctgaaagacttcatcccagtgatgattcaattaaagtcattcctttgacaaccttcactccacgccaacaggccagaccgtccagaggtgattcccccattatggaagaacatcccttgtaa

SEQ ID NO: 24809 - DNA, 4603 bp, Homo sapiens
  source 1..4603: mol_type = unassigned DNA
ctggtggtccagtacctccaaagatatggaatacactcctgaaatatcctgaaaacttttttttttcagaatcctttaataagcagttatgtcaatctgaaagttgcttacttgtactttatattaatagctattcttgtttttcttatccaaagaaaaatcctctaatccccttttcacatgatagttgttaccatgtttaggcattagtcacatcaacccctctcctctcccaaacttctcttcttcaaatcaaactttattagtccctcctttataatgattccttgcctcgttttatccagatcaattttttttcactttgatgcccagagctgaagaaatggactactgtataaattattcattgccaagagaataattgcattttaaacccatattataacaaagaataatgattatattttgtgatttgtaacaaataccctttattttcccttaactattgaattaaatattttaattatttgtattctctttaactatcttggtatattaaagtattatcttttatatatttatcaatggtggacacttttataggtactctgtgtcatttttgatactgtaggtatcttatttcatttatctttattcttaatgtacgaattcataatatttgattcagaacaaatttatcactaattaacagagtgtcaattatgctaacatctcatttactgattttaatttaaaacagtttttgttaacatgcatgtttagggttggcttcttaataatttcttcttcctcttctctctctcctcttcttttggtcagtgttgtgcgggttaatacaacaaactgtaacaagtgtacctggtatggacttgttgtccgggacgtacattttcgcggtcctgctagcatgcgtggtgttccactctggcgcccaggagaaaaactacaccatccgagaagaaatgccagaaaacgtcctgataggcgacttgttgaaagaccttaacttgtcgctgattccaaacaagtccttgacaactgctatgcagttcaagctagtgtacaagaccggagatgtgccactgattcgaattgaagaggatactggtgagatcttcactactggcgctcgcattgatcgtgagaaattatgtgctggtatcccaagggatgagcattgcttttatgaagtggaggttgccattttgccggatgaaatatttagactggttaagatacgttttctgatagaagatataaatgataatgcaccattgttcccagcaacagttatcaacatatcaattccagagaactcggctataaactctaaatatactctcccagcggctgttgatcctgacgtaggaataaacggagttcaaaactacgaactaattaagagtcaaaacatttttggcctcgatgtcattgaaacaccagaaggagacaagatgccacaactgattgttcaaaaggagttagatagggaagagaaggatacctacgtgatgaaagtaaaggttgaagatggtggctttcctcaaagatccagtactgctattttgcaagtgagtgttactgatacaaatgacaaccacccagtctttaaggagacagagattgaagtcagtataccagaaaatgctcctgtaggcacttcagtgacacagctccatgccacagatgctgacataggtgaaaatgccaagatccacttctctttcagcaatctagtctccaacattgccaggagattatttcacctcaatgccaccactggacttatcacaatcaaagaaccactggatagggaagaaacaccaaaccacaagttactggttttggcaagtgatggtggattgatgccagcaagagcaatggtgctggtaaatgttacagatgtcaatgataatgtcccatccattgacataagatacatcgtcaatcctgtcaatgacacagttgttctttcagaaaatattccactcaacaccaaaattgctctcataactgtgacggataaggatgcggaccataatggcagggtgacatgcttcacagatcatgaaatccctttcagattaaggccagtattcagtaatcagttcctcctggagactgcagcatatcttgactatgagtccacaaaagaatatgccattaaattactggctgcagatgctggcaaacctcctttgaatcagtcagcaatgctcttcatcaaagtgaaagatgaaaatgacaatgctccagttttcacccagtctttcgtaactgtttctattcctgagaataactctcctggcatccagttgacgaaagtaagtgcaatggatgcagacagtgggcctaatgctaagatcaattacctgctaggccctgatgctccacctgaattcagcctggattgtcgtacaggcatgctgactgtagtgaagaaactagatagagaaaaagaggataaatatttattcacaattctggcaaaagataacggggtaccacccttaaccagcaatgtcacagtctttgtaagcattattgatcagaatgacaatagcccagttttcactcacaatgaatacaacttctatgtcccagaaaaccttccaaggcatggtacagtaggactaatcactgtaactgatcctgattatggagacaattctgcagttacgctctccattttagatgagaatgatgacttcaccattgattcacaaactggtgtcatccgaccaaatatttcatttgatagagaaaaacaagaatcttacactttctatgtaaaggctgaggatggtggtagagtatcacgttcttcaagtgccaaagtaaccataaatgtggttgatgtcaatgacaacaaaccagttttcattgtccctccttccaactgttcttatgaattggttctaccgtccactaatccaggcacagtggtctttcaggtaattgctgttgacaatgacactggcatgaatgcagaggttcgttacagcattgtaggaggaaacacaagagatctgtttgcaatcgaccaagaaacaggcaacataacattgatggagaaatgtgatgttacagaccttggtttacacagagtgttggtcaaagctaatgacttaggacagcctgattctctcttcagtgttgtaattgtcaatctgttcgtgaatgagtcggtgaccaatgctacactgattaatgaactggtgcgcaaaagcactgaagcaccagtgaccccaaatactgagatagctgatgtatcctcaccaactagtgactatgtcaagatcctggttgcagctgttgctggcaccataactgtcgttgtagttattttcatcactgctgtagtaagatgtcgccaggcaccacaccttaaggctgctcagaaaaacaagcagaattctgaatgggctaccccaaacccagaaaacaggcagatgataatgatgaagaaaaagaaaaagaagaagaagcattcccctaagaacttgctgcttaattttgtcactattgaagaaactaaggcagatgatgttgacagtgatggaaacagagtcacactagaccttcctattgatctagaagagcaaacaatgggaaagtacaattgggtaactacacctactactttcaagcccgacagccctgatttggcccgacactacaaatctgcctctccacagcctgccttccaaattcagcctgaaactcccctgaattcgaagcaccacatcatccaagaactgcctctcgataacacctttgtggcctgtgactctatctccaagtgttcctcaagcagttcagatccctacagcgtttctgactgtggctatccagtgacgaccttcgaggtacctgtgtccgtacacaccagaccggtaggtatccaagtttctaacacaactttctaactatttttttattattattttcagttgatgtagaactttacaaaatctattgacttcaaagagggatcaaaacaatcatattctacagatgtacccaatagatatatggattcaattaagtttggtagaagatgagaacaaaataactactgatttaggaaaattggatgcagaataataattatagtaggggcaattttgtctgtagatggcagtatgacaattcttgctagagaatatattgaaaaaaacttcaacacaaagggttgtagcactgtcctcagtaccattgtgtgcatgaggatcagaatagtctgggctagatacatcacattaaagcttttcagaatctgataaatagctctaaatactaatgatattgagaagcctagcttcacttgggaaaatctgtggctgttcacagaaattcagcaccaagttattccccccatactctaccaggccttcaggtcctcataaagaaaagtgtcgttttcagattaggaactcaaaattattttggtgcatcaaatctacagtcacacaatataacaagaatgggattagaaaaatgaaagcctactcattctcatctttaagccagagaatgaaatatatatgaggtctctggatagctatttaaatatttgcatatttatgcaaggtattttgagcccttcagaagacattct

SEQ ID NO: 24810 - DNA, 4061 bp, Homo sapiens
  source 1..4061: mol_type = unassigned DNA
atggacttgttgtccgggacgtacattttcgcggtcctgctagcatgcgtggtgttccactctggcgcccaggagaaaaactacaccatccgagaagaaatgccagaaaacgtcctgataggcgacttgttgaaagaccttaacttgtcgctgattccaaacaagtccttgacaactgctatgcagttcaagctagtgtacaagaccggagatgtgccactgattcgaattgaagaggatactggtgagatcttcactactggcgctcgcattgatcgtgagaaattatgtgctggtatcccaagggatgagcattgcttttatgaagtggaggttgccattttgccggatgaaatatttagactggttaagatacgttttctgatagaagatataaatgataatgcaccattgttcccagcaacagttatcaacatatcaattccagagaactcggctataaactctaaatatactctcccagcggctgttgatcctgacgtaggaataaacggagttcaaaactacgaactaattaagagtcaaaacatttttggcctcgatgtcattgaaacaccagaaggagacaagatgccacaactgattgttcaaaaggagttagatagggaagagaaggatacctacgtgatgaaagtaaaggttgaagatggtggctttcctcaaagatccagtactgctattttgcaagtgagtgttactgatacaaatgacaaccacccagtctttaaggagacagagattgaagtcagtataccagaaaatgctcctgtaggcacttcagtgacacagctccatgccacagatgctgacataggtgaaaatgccaagatccacttctctttcagcaatctagtctccaacattgccaggagattatttcacctcaatgccaccactggacttatcacaatcaaagaaccactggatagggaagaaacaccaaaccacaagttactggttttggcaagtgatggtggattgatgccagcaagagcaatggtgctggtaaatgttacagatgtcaatgataatgtcccatccattgacataagatacatcgtcaatcctgtcaatgacacagttgttctttcagaaaatattccactcaacaccaaaattgctctcataactgtgacggataaggatgcggaccataatggcagggtgacatgcttcacagatcatgaaatccctttcagattaaggccagtattcagtaatcagttcctcctggagactgcagcatatcttgactatgagtccacaaaagaatatgccattaaattactggctgcagatgctggcaaacctcctttgaatcagtcagcaatgctcttcatcaaagtgaaagatgaaaatgacaatgctccagttttcacccagtctttcgtaactgtttctattcctgagaataactctcctggcatccagttgacgaaagtaagtgcaatggatgcagacagtgggcctaatgctaagatcaattacctgctaggccctgatgctccacctgaattcagcctggattgtcgtacaggcatgctgactgtagtgaagaaactagatagagaaaaagaggataaatatttattcacaattctggcaaaagataacggggtaccacccttaaccagcaatgtcacagtctttgtaagcattattgatcagaatgacaatagcccagttttcactcacaatgaatacaacttctatgtcccagaaaaccttccaaggcatggtacagtaggactaatcactgtaactgatcctgattatggagacaattctgcagttacgctctccattttagatgagaatgatgacttcaccattgattcacaaactggtgtcatccgaccaaatatttcatttgatagagaaaaacaagaatcttacactttctatgtaaaggctgaggatggtggtagagtatcacgttcttcaagtgccaaagtaaccataaatgtggttgatgtcaatgacaacaaaccagttttcattgtccctccttccaactgttcttatgaattggttctaccgtccactaatccaggcacagtggtctttcaggtaattgctgttgacaatgacactggcatgaatgcagaggttcgttacagcattgtaggaggaaacacaagagatctgtttgcaatcgaccaagaaacaggcaacataacattgatggagaaatgtgatgttacagaccttggtttacacagagtgttggtcaaagctaatgacttaggacagcctgattctctcttcagtgttgtaattgtcaatctgttcgtgaatgagtcggtgaccaatgctacactgattaatgaactggtgcgcaaaagcactgaagcaccagtgaccccaaatactgagatagctgatgtatcctcaccaactagtgactatgtcaagatcctggttgcagctgttgctggcaccataactgtcgttgtagttattttcatcactgctgtagtaagatgtcgccaggcaccacaccttaaggctgctcagaaaaacaagcagaattctgaatgggctaccccaaacccagaaaacaggcagatgataatgatgaagaaaaagaaaaagaagaagaagcattcccctaagaacttgctgcttaattttgtcactattgaagaaactaaggcagatgatgttgacagtgatggaaacagagtcacactagaccttcctattgatctagaagagcaaacaatgggaaagtacaattgggtaactacacctactactttcaagcccgacagccctgatttggcccgacactacaaatctgcctctccacagcctgccttccaaattcagcctgaaactcccctgaattcgaagcaccacatcatccaagaactgcctctcgataacacctttgtggcctgtgactctatctccaagtgttcctcaagcagttcagatccctacagcgtttctgactgtggctatccagtgacgaccttcgaggtacctgtgtccgtacacaccagaccgtcccagcggcgtgtcacatttcacctgccagaaggctctcaggaaagcagcagtgatggtggactgggagaccatgatgcaggcagccttaccagcacatctcatggcctgccccttggctatcctcaggaggagtactttgatcgtgctacacccagcaatcgcactgaaggggatggcaactccgatcctgaatctactttcatacctggactaaagaaagctgcagaaataactgttcaaccaactgtggaagaggcctctgacaactgcactcaagaatgtctcatctatggccattctgatgcctgctggatgccggcatctctggatcattccagctcttcgcaagcacaggcctctgctctatgccacagcccaccactgtcacaggcctctactcagcaccacagcccacgagtgacacagaccattgctctctgccacagccctccagtgacacagaccatcgcattgtgccacagcccaccaccgatacaggtgtctgctctccaccacagtcctcctctagtgcaggctactgcacttcaccacagcccaccatcagcacaggcctcagccctctgctacagccctcctttagcacaggctgctgcaatcagccacagctctcctctgccacaggttattgccctccatcgtagtcaggcccaatcatcagtcagtttgcagcaaggttgggtgcaaggtgctgatgggctatgctctgttgatcagggagtgcaaggtagtgcaacatctcagttttacaccatgtctgaaagacttcatcccagtgatgattcaattaaagtcattcctttgacaaccttcactccacgccaacaggccagaccgtccagaggtgattcccccattatggaagaacatcccttgtaaagctaaaatagttacttcaaattttcagaaaagatgtatatagtcaaaatttaagatacaattccaatgagtattctgattatcagatttgtaaataactatgtaaatagaaacagataccagaataa

SEQ ID NO: 24811 - DNA, 9176 bp, Homo sapiens
  source 1..9176: mol_type = unassigned DNA
ctggtggtccagtacctccaaagatatggaatacactcctgaaatatcctgaaaacttttttttttcagaatcctttaataagcagttatgtcaatctgaaagttgcttacttgtactttatattaatagctattcttgtttttcttatccaaagaaaaatcctctaatccccttttcacatgatagttgttaccatgtttaggcattagtcacatcaacccctctcctctcccaaacttctcttcttcaaatcaaactttattagtccctcctttataatgattccttgcctcgttttatccagatcaattttttttcactttgatgcccagagctgaagaaatggactactgtataaattattcattgccaagagaataattgcattttaaacccatattataacaaagaataatgattatattttgtgatttgtaacaaataccctttattttcccttaactattgaattaaatattttaattatttgtattctctttaactatcttggtatattaaagtattatcttttatatatttatcaatggtggacacttttataggtactctgtgtcatttttgatactgtaggtatcttatttcatttatctttattcttaatgtacgaattcataatatttgattcagaacaaatttatcactaattaacagagtgtcaattatgctaacatctcatttactgattttaatttaaaacagtttttgttaacatgcatgtttagggttggcttcttaataatttcttcttcctcttctctctctcctcttcttttggtcagtgttgtgcgggttaatacaacaaactgtaacaagtgtacctggtatggacttgttgtccgggacgtacattttcgcggtcctgctagcatgcgtggtgttccactctggcgcccaggagaaaaactacaccatccgagaagaaatgccagaaaacgtcctgataggcgacttgttgaaagaccttaacttgtcgctgattccaaacaagtccttgacaactgctatgcagttcaagctagtgtacaagaccggagatgtgccactgattcgaattgaagaggatactggtgagatcttcactactggcgctcgcattgatcgtgagaaattatgtgctggtatcccaagggatgagcattgcttttatgaagtggaggttgccattttgccggatgaaatatttagactggttaagatacgttttctgatagaagatataaatgataatgcaccattgttcccagcaacagttatcaacatatcaattccagagaactcggctataaactctaaatatactctcccagcggctgttgatcctgacgtaggaataaacggagttcaaaactacgaactaattaagagtcaaaacatttttggcctcgatgtcattgaaacaccagaaggagacaagatgccacaactgattgttcaaaaggagttagatagggaagagaaggatacctacgtgatgaaagtaaaggttgaagatggtggctttcctcaaagatccagtactgctattttgcaagtgagtgttactgatacaaatgacaaccacccagtctttaaggagacagagattgaagtcagtataccagaaaatgctcctgtaggcacttcagtgacacagctccatgccacagatgctgacataggtgaaaatgccaagatccacttctctttcagcaatctagtctccaacattgccaggagattatttcacctcaatgccaccactggacttatcacaatcaaagaaccactggatagggaagaaacaccaaaccacaagttactggttttggcaagtgatggtggattgatgccagcaagagcaatggtgctggtaaatgttacagatgtcaatgataatgtcccatccattgacataagatacatcgtcaatcctgtcaatgacacagttgttctttcagaaaatattccactcaacaccaaaattgctctcataactgtgacggataaggatgcggaccataatggcagggtgacatgcttcacagatcatgaaatccctttcagattaaggccagtattcagtaatcagttcctcctggagactgcagcatatcttgactatgagtccacaaaagaatatgccattaaattactggctgcagatgctggcaaacctcctttgaatcagtcagcaatgctcttcatcaaagtgaaagatgaaaatgacaatgctccagttttcacccagtctttcgtaactgtttctattcctgagaataactctcctggcatccagttgacgaaagtaagtgcaatggatgcagacagtgggcctaatgctaagatcaattacctgctaggccctgatgctccacctgaattcagcctggattgtcgtacaggcatgctgactgtagtgaagaaactagatagagaaaaagaggataaatatttattcacaattctggcaaaagataacggggtaccacccttaaccagcaatgtcacagtctttgtaagcattattgatcagaatgacaatagcccagttttcactcacaatgaatacaacttctatgtcccagaaaaccttccaaggcatggtacagtaggactaatcactgtaactgatcctgattatggagacaattctgcagttacgctctccattttagatgagaatgatgacttcaccattgattcacaaactggtgtcatccgaccaaatatttcatttgatagagaaaaacaagaatcttacactttctatgtaaaggctgaggatggtggtagagtatcacgttcttcaagtgccaaagtaaccataaatgtggttgatgtcaatgacaacaaaccagttttcattgtccctccttccaactgttcttatgaattggttctaccgtccactaatccaggcacagtggtctttcaggtaattgctgttgacaatgacactggcatgaatgcagaggttcgttacagcattgtaggaggaaacacaagagatctgtttgcaatcgaccaagaaacaggcaacataacattgatggagaaatgtgatgttacagaccttggtttacacagagtgttggtcaaagctaatgacttaggacagcctgattctctcttcagtgttgtaattgtcaatctgttcgtgaatgagtcggtgaccaatgctacactgattaatgaactggtgcgcaaaagcactgaagcaccagtgaccccaaatactgagatagctgatgtatcctcaccaactagtgactatgtcaagatcctggttgcagctgttgctggcaccataactgtcgttgtagttattttcatcactgctgtagtaagatgtcgccaggcaccacaccttaaggctgctcagaaaaacaagcagaattctgaatgggctaccccaaacccagaaaacaggcagatgataatgatgaagaaaaagaaaaagaagaagaagcattcccctaagaacttgctgcttaattttgtcactattgaagaaactaaggcagatgatgttgacagtgatggaaacagagtcacactagaccttcctattgatctagaagagcaaacaatgggaaagtacaattgggtaactacacctactactttcaagcccgacagccctgatttggcccgacactacaaatctgcctctccacagcctgccttccaaattcagcctgaaactcccctgaattcgaagcaccacatcatccaagaactgcctctcgataacacctttgtggcctgtgactctatctccaagtgttcctcaagcagttcagatccctacagcgtttctgactgtggctatccagtgacgaccttcgaggtacctgtgtccgtacacaccagaccgccaatgaaggaggttgtgcgatcttgcacccccatgaaagagtctacaactatggagatctggattcatccccaaccacagcggaaatctgaagggaaagtggcaggaaagtcccagcggcgtgtcacatttcacctgccagaaggctctcaggaaagcagcagtgatggtggactgggagaccatgatgcaggcagccttaccagcacatctcatggcctgccccttggctatcctcaggaggagtactttgatcgtgctacacccagcaatcgcactgaaggggatggcaactccgatcctgaatctactttcatacctggactaaagaaagctgcagaaataactgttcaaccaactgtggaagaggcctctgacaactgcactcaagaatgtctcatctatggccattctgatgcctgctggatgccggcatctctggatcattccagctcttcgcaagcacaggcctctgctctatgccacagcccaccactgtcacaggcctctactcagcaccacagcccacgagtgacacagaccattgctctctgccacagccctccagtgacacagaccatcgcattgtgccacagcccaccaccgatacaggtgtctgctctccaccacagtcctcctctagtgcaggctactgcacttcaccacagcccaccatcagcacaggcctcagccctctgctacagccctcctttagcacaggctgctgcaatcagccacagctctcctctgccacaggttattgccctccatcgtagtcaggcccaatcatcagtcagtttgcagcaaggttgggtgcaaggtgctgatgggctatgctctgttgatcagggagtgcaaggtagtgcaacatctcagttttacaccatgtctgaaagacttcatcccagtgatgattcaattaaagtcattcctttgacaaccttcactccacgccaacaggccagaccgtccagaggtgattcccccattatggaagaacatcccttgtaaagctaaaatagttacttcaaattttcagaaaagatgtatatagtcaaaatttaagatacaattccaatgagtattctgattatcagatttgtaaataactatgtaaatagaaacagataccagaataaatctacagctagacccttagtcaatagttaaccaaaaaattgcaatttgtttaattcagaatgtgtatttaaaaagaaaaggaatttaacaatttgcatccccttgtacagtaaggcttatcatgacagagcgcactatttctgatgtacagtattttttgttgtttttatcatcatgtgcaatattactgatttgtttccatgctgattgtgtggaaccagtatgtagcaaatggaaagcctagaaatatcttattttctaagtttacctttagtttacctaaacttttgttcagataacgttaaaaggtatacgtactctagcctttttttgggctttctttttgatttttgtttgttgttttcagtttttttgttgttgttagtgagtctcccttcaaaatacgcagtaggtagtgtaaatactgcttgtttgtgtctctctgctgtcatgttttctaccttattccaatactatattgttgataaaatttgtatatacattttcaataaagaatatgtataaactgtacagatctagatctacaacctatttctctactctttagtagagttcgagacacagaagtgcaataactgccctaattaagcaactatttgttaaaaagggcctctttttactttaatagtttagtgtaaagtacatcagaaataaagctgtatctgccattttaagcctgtagtccattattacttgggtctttacttctgggaatttgtatgtaacagcctagaaaattaaaaggaggtggatgcatccaaagcacgagtcacttaaaatatcgacggtaaactactattttgtagagaaactcaggaagatttaaatgttgatttgacagctcaataggctgttaccaaagggtgttcagtaaaaataacaaatacatgtaactgtagataaaaccatatactaaatctataagactaagggatttttgttattctagctcaacttactgaagaaaaccactaataacaacaagaatatcaggaaggaacttttcaagaaatgtaattataaatctacatcaaacagaattttaaggaaaaatgcagagggagaaataaggcacatgactgcttcttgcagtcaacaagaaataccaataacacacacagaacaaaaaccatcaaaatctcatatatgaaataaaatatattcttctaagcaaagaaacagtactattcatagaaaacattagttttcttctgttgtctgttatttccttcttgtatcctcttaactggccattatcttgtatgtgcacattttataaatgtacagaaacatcaccaacttaattttcttccatagcaaaactgagaaaataccttgtttcagtataacactaaaccaagagacaattgatgtttaatgggggcggttggggtgggggggggagtcaatatctcctattgattaacttagacatagattttgtaatgtataacttgatatttaatttatgattaaactgtgtgtaaattttgtaacataaactgtggtaattgcataatttcattggtgaggatttccactgaatattgagaaagtttcttttcatgtgcccagcaggttaagtagcgttttcagaatatacattattcccatccattgtaaagttccttaagtcatatttgactgggcgtgcagaataacttcttaacttttaactatcagagtttgattaataaaattaattaatgttttttctccttcgtgttgttaatgttccaagggatttggagcatactggttttccaggtgcatgtgaatcccgaaggactgatgatatttgaatgtttattaaattattatcatacaaatgtgttgatattgtggctattgttgatgttgaaaattttaaacttggggaagattaagaaaagaaccaatagtgacaaaaatcagtgcttccagtagattttagaacattctttgcctcaaaaaacctgcaaagatgatgtgagattttttcttgtgttttaattattttcacattttctctctgcaaaactttagttttctgatgatctacacacacacacacacacacacgtgcacacacacacacatttaaatgatataaaaagaagaggttgaaagattattaaataacttatcaggcatctcaatggttactatctatgttagtgaaaatcaaataggactcaaagttggatatttgggatttttcttctgacagtataatttattgagttactagggaggttcttaaatcctcatatctggaaacttgtgacgttttgacacctttcctatagatgatataggaatgaaccaatacgcttttattaccctttctaactctgattttataatcagacttagattgtgtttagaatattaaatgactgggcaccctcttcttggtttttaccagagaggctttgaatggaagcaggctgagagtagccaaagaggcaaggggtattagcccagttattctcccctatgccttccttctctttctaagcgtccactaggtctggccttggaaacctgttacttctagggcttcagatctgatgatatctttttcatcacattacaagttatttctctgactgaatagacagtggtataggttgacacagcacacaagtggctattgtgatgtatgatgtatgtagtcctacaactgcaaaacgtcttactgaaccaacaatcaaaaaatggttctgttttaaaaaggattttgtttgatttgaaattaaaacttcaagctgaatgacttatatgagaataatacgttcaatcaaagtagttattctattttgtgtccatattccattagattgtgattattaattttctagctatggtattactatatcacacttgtgagtatgtattcaaatactaagtatcttatatgctacgtgcatacacattcttttcttaaactttacctgtgttttaactaatattgtgtcagtgtattaaaaattagcttttacatatgatatctacaatgtaataaatttagagagtaattttgtgtattcttatttacttaacattttacttttaattatgtaaatttggttagaaaataataataaatggttagtgctattgtgtaatggtagcagttacaaagagcctctgccttcccaaactaatatttatcacacatggtcattaaatgggaaaaaaatagactaaacaaatcacaaattgttcagttcttaaaatgtaattatgtcacacacacaaaaaatccttttcaatcctgagaaaattaaaggcgttttactcacatggctatttcaacattagttttttttgtttgtttctttttcatggtattactgaaggtgtgtatactccctaatacacatttatgaaaatctacttgtttaggcttttatttatactcttctgatttatattttttattataattattatttcttatctttcttcttttatattttttggaaaccaaatttatagttagtttaggtaaactttttattatgaccattagaaactattttgaatgcttccaactggctcaattggccgggaaaacatgggagcaagagaagctgaaatatatttctgcaagaacctttctatattatgtgccaattaccacaccagatcaattttatgcagaggccttaaaatattctttcacagtagctttcttacactaaccgtcatgtgcttttagtaaatatgatttttaaaagcagttcaagttgacaacagcagaaacagtaacaaaaaaatctgctcagaaaaatgtatgtgcacaaataaaaaaaattaatggcaattgtttagtgattgtaagtgatactttttaaagagtaaactgtgtgaaatttatactatccctgcttaaaatattaagatttttatgaaatatgtatttatgtttgtattgtgggaagattcctcctctgtgatatcatacagcatctgaaagtgaacagtatcccaaagcagttccaaccatgctttggaagtaagaaggttgactattgtatggccaaggatggcagtatgtaatccagaagcaaacttgtattaattgttctatttcaggttctgtattgcatgttttcttattaatatatattaataaaagttatgagaaat

SEQ ID NO: 24812 - DNA, 9149 bp, Homo sapiens
  source 1..9149: mol_type = unassigned DNA
ctggtggtccagtacctccaaagatatggaatacactcctgaaatatcctgaaaacttttttttttcagaatcctttaataagcagttatgtcaatctgaaagttgcttacttgtactttatattaatagctattcttgtttttcttatccaaagaaaaatcctctaatccccttttcacatgatagttgttaccatgtttaggcattagtcacatcaacccctctcctctcccaaacttctcttcttcaaatcaaactttattagtccctcctttataatgattccttgcctcgttttatccagatcaattttttttcactttgatgcccagagctgaagaaatggactactgtataaattattcattgccaagagaataattgcattttaaacccatattataacaaagaataatgattatattttgtgatttgtaacaaataccctttattttcccttaactattgaattaaatattttaattatttgtattctctttaactatcttggtatattaaagtattatcttttatatatttatcaatggtggacacttttataggtactctgtgtcatttttgatactgtaggtatcttatttcatttatctttattcttaatgtacgaattcataatatttgattcagaacaaatttatcactaattaacagagtgtcaattatgctaacatctcatttactgattttaatttaaaacagtttttgttaacatgcatgtttagggttggcttcttaataatttcttcttcctcttctctctctcctcttcttttggtcagtgttgtgcgggttaatacaacaaactgtaacaagtgtacctggtatggacttgttgtccgggacgtacattttcgcggtcctgctagcatgcgtggtgttccactctggcgcccaggagaaaaactacaccatccgagaagaaatgccagaaaacgtcctgataggcgacttgttgaaagaccttaacttgtcgctgattccaaacaagtccttgacaactgctatgcagttcaagctagtgtacaagaccggagatgtgccactgattcgaattgaagaggatactggtgagatcttcactactggcgctcgcattgatcgtgagaaattatgtgctggtatcccaagggatgagcattgcttttatgaagtggaggttgccattttgccggatgaaatatttagactggttaagatacgttttctgatagaagatataaatgataatgcaccattgttcccagcaacagttatcaacatatcaattccagagaactcggctataaactctaaatatactctcccagcggctgttgatcctgacgtaggaataaacggagttcaaaactacgaactaattaagagtcaaaacatttttggcctcgatgtcattgaaacaccagaaggagacaagatgccacaactgattgttcaaaaggagttagatagggaagagaaggatacctacgtgatgaaagtaaaggttgaagatggtggctttcctcaaagatccagtactgctattttgcaagtgagtgttactgatacaaatgacaaccacccagtctttaaggagacagagattgaagtcagtataccagaaaatgctcctgtaggcacttcagtgacacagctccatgccacagatgctgacataggtgaaaatgccaagatccacttctctttcagcaatctagtctccaacattgccaggagattatttcacctcaatgccaccactggacttatcacaatcaaagaaccactggatagggaagaaacaccaaaccacaagttactggttttggcaagtgatggtggattgatgccagcaagagcaatggtgctggtaaatgttacagatgtcaatgataatgtcccatccattgacataagatacatcgtcaatcctgtcaatgacacagttgttctttcagaaaatattccactcaacaccaaaattgctctcataactgtgacggataaggatgcggaccataatggcagggtgacatgcttcacagatcatgaaatccctttcagattaaggccagtattcagtaatcagttcctcctggagactgcagcatatcttgactatgagtccacaaaagaatatgccattaaattactggctgcagatgctggcaaacctcctttgaatcagtcagcaatgctcttcatcaaagtgaaagatgaaaatgacaatgctccagttttcacccagtctttcgtaactgtttctattcctgagaataactctcctggcatccagttgacgaaagtaagtgcaatggatgcagacagtgggcctaatgctaagatcaattacctgctaggccctgatgctccacctgaattcagcctggattgtcgtacaggcatgctgactgtagtgaagaaactagatagagaaaaagaggataaatatttattcacaattctggcaaaagataacggggtaccacccttaaccagcaatgtcacagtctttgtaagcattattgatcagaatgacaatagcccagttttcactcacaatgaatacaacttctatgtcccagaaaaccttccaaggcatggtacagtaggactaatcactgtaactgatcctgattatggagacaattctgcagttacgctctccattttagatgagaatgatgacttcaccattgattcacaaactggtgtcatccgaccaaatatttcatttgatagagaaaaacaagaatcttacactttctatgtaaaggctgaggatggtggtagagtatcacgttcttcaagtgccaaagtaaccataaatgtggttgatgtcaatgacaacaaaccagttttcattgtccctccttccaactgttcttatgaattggttctaccgtccactaatccaggcacagtggtctttcaggtaattgctgttgacaatgacactggcatgaatgcagaggttcgttacagcattgtaggaggaaacacaagagatctgtttgcaatcgaccaagaaacaggcaacataacattgatggagaaatgtgatgttacagaccttggtttacacagagtgttggtcaaagctaatgacttaggacagcctgattctctcttcagtgttgtaattgtcaatctgttcgtgaatgagtcggtgaccaatgctacactgattaatgaactggtgcgcaaaagcactgaagcaccagtgaccccaaatactgagatagctgatgtatcctcaccaactagtgactatgtcaagatcctggttgcagctgttgctggcaccataactgtcgttgtagttattttcatcactgctgtagtaagatgtcgccaggcaccacaccttaaggctgctcagaaaaacaagcagaattctgaatgggctaccccaaacccagaaaacaggcagatgataatgatgaagaaaaagaaaaagaagaagaagcattcccctaagaacttgctgcttaattttgtcactattgaagaaactaaggcagatgatgttgacagtgatggaaacagagtcacactagaccttcctattgatctagaagagcaaacaatgggaaagtacaattgggtaactacacctactactttcaagcccgacagccctgatttggcccgacactacaaatctgcctctccacagcctgccttccaaattcagcctgaaactcccctgaattcgaagcaccacatcatccaagaactgcctctcgataacacctttgtggcctgtgactctatctccaagtgttcctcaagcagttcagatccctacagcgtttctgactgtggctatccagtgacgaccttcgaggtacctgtgtccgtacacaccagaccgccaatgaaggaggttgtgcgatcttgcacccccatgaaagagtctacaactatggagatctggattcatccccaaccacagtcccagcggcgtgtcacatttcacctgccagaaggctctcaggaaagcagcagtgatggtggactgggagaccatgatgcaggcagccttaccagcacatctcatggcctgccccttggctatcctcaggaggagtactttgatcgtgctacacccagcaatcgcactgaaggggatggcaactccgatcctgaatctactttcatacctggactaaagaaagctgcagaaataactgttcaaccaactgtggaagaggcctctgacaactgcactcaagaatgtctcatctatggccattctgatgcctgctggatgccggcatctctggatcattccagctcttcgcaagcacaggcctctgctctatgccacagcccaccactgtcacaggcctctactcagcaccacagcccacgagtgacacagaccattgctctctgccacagccctccagtgacacagaccatcgcattgtgccacagcccaccaccgatacaggtgtctgctctccaccacagtcctcctctagtgcaggctactgcacttcaccacagcccaccatcagcacaggcctcagccctctgctacagccctcctttagcacaggctgctgcaatcagccacagctctcctctgccacaggttattgccctccatcgtagtcaggcccaatcatcagtcagtttgcagcaaggttgggtgcaaggtgctgatgggctatgctctgttgatcagggagtgcaaggtagtgcaacatctcagttttacaccatgtctgaaagacttcatcccagtgatgattcaattaaagtcattcctttgacaaccttcactccacgccaacaggccagaccgtccagaggtgattcccccattatggaagaacatcccttgtaaagctaaaatagttacttcaaattttcagaaaagatgtatatagtcaaaatttaagatacaattccaatgagtattctgattatcagatttgtaaataactatgtaaatagaaacagataccagaataaatctacagctagacccttagtcaatagttaaccaaaaaattgcaatttgtttaattcagaatgtgtatttaaaaagaaaaggaatttaacaatttgcatccccttgtacagtaaggcttatcatgacagagcgcactatttctgatgtacagtattttttgttgtttttatcatcatgtgcaatattactgatttgtttccatgctgattgtgtggaaccagtatgtagcaaatggaaagcctagaaatatcttattttctaagtttacctttagtttacctaaacttttgttcagataacgttaaaaggtatacgtactctagcctttttttgggctttctttttgatttttgtttgttgttttcagtttttttgttgttgttagtgagtctcccttcaaaatacgcagtaggtagtgtaaatactgcttgtttgtgtctctctgctgtcatgttttctaccttattccaatactatattgttgataaaatttgtatatacattttcaataaagaatatgtataaactgtacagatctagatctacaacctatttctctactctttagtagagttcgagacacagaagtgcaataactgccctaattaagcaactatttgttaaaaagggcctctttttactttaatagtttagtgtaaagtacatcagaaataaagctgtatctgccattttaagcctgtagtccattattacttgggtctttacttctgggaatttgtatgtaacagcctagaaaattaaaaggaggtggatgcatccaaagcacgagtcacttaaaatatcgacggtaaactactattttgtagagaaactcaggaagatttaaatgttgatttgacagctcaataggctgttaccaaagggtgttcagtaaaaataacaaatacatgtaactgtagataaaaccatatactaaatctataagactaagggatttttgttattctagctcaacttactgaagaaaaccactaataacaacaagaatatcaggaaggaacttttcaagaaatgtaattataaatctacatcaaacagaattttaaggaaaaatgcagagggagaaataaggcacatgactgcttcttgcagtcaacaagaaataccaataacacacacagaacaaaaaccatcaaaatctcatatatgaaataaaatatattcttctaagcaaagaaacagtactattcatagaaaacattagttttcttctgttgtctgttatttccttcttgtatcctcttaactggccattatcttgtatgtgcacattttataaatgtacagaaacatcaccaacttaattttcttccatagcaaaactgagaaaataccttgtttcagtataacactaaaccaagagacaattgatgtttaatgggggcggttggggtgggggggggagtcaatatctcctattgattaacttagacatagattttgtaatgtataacttgatatttaatttatgattaaactgtgtgtaaattttgtaacataaactgtggtaattgcataatttcattggtgaggatttccactgaatattgagaaagtttcttttcatgtgcccagcaggttaagtagcgttttcagaatatacattattcccatccattgtaaagttccttaagtcatatttgactgggcgtgcagaataacttcttaacttttaactatcagagtttgattaataaaattaattaatgttttttctccttcgtgttgttaatgttccaagggatttggagcatactggttttccaggtgcatgtgaatcccgaaggactgatgatatttgaatgtttattaaattattatcatacaaatgtgttgatattgtggctattgttgatgttgaaaattttaaacttggggaagattaagaaaagaaccaatagtgacaaaaatcagtgcttccagtagattttagaacattctttgcctcaaaaaacctgcaaagatgatgtgagattttttcttgtgttttaattattttcacattttctctctgcaaaactttagttttctgatgatctacacacacacacacacacacacgtgcacacacacacacatttaaatgatataaaaagaagaggttgaaagattattaaataacttatcaggcatctcaatggttactatctatgttagtgaaaatcaaataggactcaaagttggatatttgggatttttcttctgacagtataatttattgagttactagggaggttcttaaatcctcatatctggaaacttgtgacgttttgacacctttcctatagatgatataggaatgaaccaatacgcttttattaccctttctaactctgattttataatcagacttagattgtgtttagaatattaaatgactgggcaccctcttcttggtttttaccagagaggctttgaatggaagcaggctgagagtagccaaagaggcaaggggtattagcccagttattctcccctatgccttccttctctttctaagcgtccactaggtctggccttggaaacctgttacttctagggcttcagatctgatgatatctttttcatcacattacaagttatttctctgactgaatagacagtggtataggttgacacagcacacaagtggctattgtgatgtatgatgtatgtagtcctacaactgcaaaacgtcttactgaaccaacaatcaaaaaatggttctgttttaaaaaggattttgtttgatttgaaattaaaacttcaagctgaatgacttatatgagaataatacgttcaatcaaagtagttattctattttgtgtccatattccattagattgtgattattaattttctagctatggtattactatatcacacttgtgagtatgtattcaaatactaagtatcttatatgctacgtgcatacacattcttttcttaaactttacctgtgttttaactaatattgtgtcagtgtattaaaaattagcttttacatatgatatctacaatgtaataaatttagagagtaattttgtgtattcttatttacttaacattttacttttaattatgtaaatttggttagaaaataataataaatggttagtgctattgtgtaatggtagcagttacaaagagcctctgccttcccaaactaatatttatcacacatggtcattaaatgggaaaaaaatagactaaacaaatcacaaattgttcagttcttaaaatgtaattatgtcacacacacaaaaaatccttttcaatcctgagaaaattaaaggcgttttactcacatggctatttcaacattagttttttttgtttgtttctttttcatggtattactgaaggtgtgtatactccctaatacacatttatgaaaatctacttgtttaggcttttatttatactcttctgatttatattttttattataattattatttcttatctttcttcttttatattttttggaaaccaaatttatagttagtttaggtaaactttttattatgaccattagaaactattttgaatgcttccaactggctcaattggccgggaaaacatgggagcaagagaagctgaaatatatttctgcaagaacctttctatattatgtgccaattaccacaccagatcaattttatgcagaggccttaaaatattctttcacagtagctttcttacactaaccgtcatgtgcttttagtaaatatgatttttaaaagcagttcaagttgacaacagcagaaacagtaacaaaaaaatctgctcagaaaaatgtatgtgcacaaataaaaaaaattaatggcaattgtttagtgattgtaagtgatactttttaaagagtaaactgtgtgaaatttatactatccctgcttaaaatattaagatttttatgaaatatgtatttatgtttgtattgtgggaagattcctcctctgtgatatcatacagcatctgaaagtgaacagtatcccaaagcagttccaaccatgctttggaagtaagaaggttgactattgtatggccaaggatggcagtatgtaatccagaagcaaacttgtattaattgttctatttcaggttctgtattgcatgttttcttattaatatatattaataaaagttatgagaaataaa

SEQ ID NO: 24813 - DNA, 4767 bp, Homo sapiens
  source 1..4767: mol_type = unassigned DNA
tcacttctctccccacgccttcccctggttcaccccccttccttcccctttctccccctcggttaagtccctccccctcgccattcaaaagggctggctcggcactggctccttgcagtcggcgaactgtcggggcgggaggagccgtgagcagtagctgcactcagctgcccgcgcggcaaagaggaaggcaagccaaacagagtgcgcagagtggcagtgccagcggcgacacaggcagcacaggcagcccgggctgcctgaatagcctcagaaacaacctcagcgactccggctgctctgcggactgcgagctgtggcggtagagcccgctacagcagtcgcagtctccgtggagcgggcggaagccttttttctccctttcgtttacctcttcattctactctaaaggcatcgttattaggaaaatcctgttgcgaataagaaggattccacagatcacataccggagaggttttgcctcagctgctctcaactttgtaatcttgtgaagaagctgacaagcttggctgattgcagagcactatgaggactgaacgacagtgggttttaattcagatatttcaagtgttgtgcgggttaatacaacaaactgtaacaagtgtacctggtatggacttgttgtccgggacgtacattttcgcggtcctgctagcatgcgtggtgttccactctggcgcccaggagaaaaactacaccatccgagaagaaatgccagaaaacgtcctgataggcgacttgttgaaagaccttaacttgtcgctgattccaaacaagtccttgacaactgctatgcagttcaagctagtgtacaagaccggagatgtgccactgattcgaattgaagaggatactggtgagatcttcactactggcgctcgcattgatcgtgagaaattatgtgctggtatcccaagggatgagcattgcttttatgaagtggaggttgccattttgccggatgaaatatttagactggttaagatacgttttctgatagaagatataaatgataatgcaccattgttcccagcaacagttatcaacatatcaattccagagaactcggctataaactctaaatatactctcccagcggctgttgatcctgacgtaggaataaacggagttcaaaactacgaactaattaagagtcaaaacatttttggcctcgatgtcattgaaacaccagaaggagacaagatgccacaactgattgttcaaaaggagttagatagggaagagaaggatacctacgtgatgaaagtaaaggttgaagatggtggctttcctcaaagatccagtactgctattttgcaagtgagtgttactgatacaaatgacaaccacccagtctttaaggagacagagattgaagtcagtataccagaaaatgctcctgtaggcacttcagtgacacagctccatgccacagatgctgacataggtgaaaatgccaagatccacttctctttcagcaatctagtctccaacattgccaggagattatttcacctcaatgccaccactggacttatcacaatcaaagaaccactggatagggaagaaacaccaaaccacaagttactggttttggcaagtgatggtggattgatgccagcaagagcaatggtgctggtaaatgttacagatgtcaatgataatgtcccatccattgacataagatacatcgtcaatcctgtcaatgacacagttgttctttcagaaaatattccactcaacaccaaaattgctctcataactgtgacggataaggatgcggaccataatggcagggtgacatgcttcacagatcatgaaatccctttcagattaaggccagtattcagtaatcagttcctcctggagactgcagcatatcttgactatgagtccacaaaagaatatgccattaaattactggctgcagatgctggcaaacctcctttgaatcagtcagcaatgctcttcatcaaagtgaaagatgaaaatgacaatgctccagttttcacccagtctttcgtaactgtttctattcctgagaataactctcctggcatccagttgacgaaagtaagtgcaatggatgcagacagtgggcctaatgctaagatcaattacctgctaggccctgatgctccacctgaattcagcctggattgtcgtacaggcatgctgactgtagtgaagaaactagatagagaaaaagaggataaatatttattcacaattctggcaaaagataacggggtaccacccttaaccagcaatgtcacagtctttgtaagcattattgatcagaatgacaatagcccagttttcactcacaatgaatacaacttctatgtcccagaaaaccttccaaggcatggtacagtaggactaatcactgtaactgatcctgattatggagacaattctgcagttacgctctccattttagatgagaatgatgacttcaccattgattcacaaactggtgtcatccgaccaaatatttcatttgatagagaaaaacaagaatcttacactttctatgtaaaggctgaggatggtggtagagtatcacgttcttcaagtgccaaagtaaccataaatgtggttgatgtcaatgacaacaaaccagttttcattgtccctccttccaactgttcttatgaattggttctaccgtccactaatccaggcacagtggtctttcaggtaattgctgttgacaatgacactggcatgaatgcagaggttcgttacagcattgtaggaggaaacacaagagatctgtttgcaatcgaccaagaaacaggcaacataacattgatggagaaatgtgatgttacagaccttggtttacacagagtgttggtcaaagctaatgacttaggacagcctgattctctcttcagtgttgtaattgtcaatctgttcgtgaatgagtcggtgaccaatgctacactgattaatgaactggtgcgcaaaagcactgaagcaccagtgaccccaaatactgagatagctgatgtatcctcaccaactagtgactatgtcaagatcctggttgcagctgttgctggcaccataactgtcgttgtagttattttcatcactgctgtagtaagatgtcgccaggcaccacaccttaaggctgctcagaaaaacaagcagaattctgaatgggctaccccaaacccagaaaacaggcagatgataatgatgaagaaaaagaaaaagaagaagaagcattcccctaagaacttgctgcttaattttgtcactattgaagaaactaaggcagatgatgttgacagtgatggaaacagagtcacactagaccttcctattgatctagaagagcaaacaatgggaaagtacaattgggtaactacacctactactttcaagcccgacagccctgatttggcccgacactacaaatctgcctctccacagcctgccttccaaattcagcctgaaactcccctgaattcgaagcaccacatcatccaagaactgcctctcgataacacctttgtggcctgtgactctatctccaagtgttcctcaagcagttcagatccctacagcgtttctgactgtggctatccagtgacgaccttcgaggtacctgtgtccgtacacaccagaccgactgattccaggacatcaactattgaaatctgcagtgagatataactttctaggaacaacaaaattccattccccttccaaaaaatttcaatgattgtgatttcaaaattaggctaagatcattaattttgtaatctagatttcccattataaaagcaagcaaaaatcatcttaaaaatgatgtcctagtgaaccttgtgctttctttagctgtaatctggcaatggaaatttaaaatttatggaagagacagtgcagcacaataacagagtactctcatgctgtttctctgtttgctctgaatcaacagccatgatgtaatataaggctgtcttggtgtatacacttatggttaatatatcagtcatgaaacatgcaattacttgccctgtctgattgttgaataattaaaacattatctccaggagtttggaagtgagctgaactagccaaactactctctgaaaggtatccagggcaagagacatttttaagaccccaaacaaacaaaaaacaaaaccaaaacactctggttcagtgttttgaaaatattcactaacataatattgctgagaaaatcatttttattacccaccactctgcttaaaagttgagtgggccgggcgcggtggctcacgcctgtaatcccagcactttgggaggccgaggcgggtggatcacgaggtcaggagattgagaccatcctggctaacacggtgaaaccccatctccactaaaaatacaaaaaattagcctggcgtggtggcgggcgcctgtagtcccagctactcgggaggctgaggcaggagaatagcgtgaacccgggaggcggagcttgcagtgagccgagatggcgccactgcactccagcctgggtgacagagcaagactctgtctcaaaaagaaaaaaatgttcaatgatagaaaataattttactaggtttttatgttgattgtactcatgctgttccactccttttaattattaaaaagttatttttggctgggtgtggtggctcacacctgtaatcccagcactttgggaggccgaggtgggtggatcacctgaggtcaggagttcaagaccagtctggccaacat

SEQ ID NO: 24814 - DNA, 4020 bp, Homo sapiens
  source 1..4020: mol_type = unassigned DNA
atggacttgttgtccgggacgtacattttcgcggtcctgctagcatgcgtggtgttccactctggcgcccaggagaaaaactacaccatccgagaagaaatgccagaaaacgtcctgataggcgacttgttgaaagaccttaacttgtcgctgattccaaacaagtccttgacaactgctatgcagttcaagctagtgtacaagaccggagatgtgccactgattcgaattgaagaggatactggtgagatcttcactactggcgctcgcattgatcgtgagaaattatgtgctggtatcccaagggatgagcattgcttttatgaagtggaggttgccattttgccggatgaaatatttagactggttaagatacgttttctgatagaagatataaatgataatgcaccattgttcccagcaacagttatcaacatatcaattccagagaactcggctataaactctaaatatactctcccagcggctgttgatcctgacgtaggaataaacggagttcaaaactacgaactaattaagagtcaaaacatttttggcctcgatgtcattgaaacaccagaaggagacaagatgccacaactgattgttcaaaaggagttagatagggaagagaaggatacctacgtgatgaaagtaaaggttgaagatggtggctttcctcaaagatccagtactgctattttgcaagtgagtgttactgatacaaatgacaaccacccagtctttaaggagacagagattgaagtcagtataccagaaaatgctcctgtaggcacttcagtgacacagctccatgccacagatgctgacataggtgaaaatgccaagatccacttctctttcagcaatctagtctccaacattgccaggagattatttcacctcaatgccaccactggacttatcacaatcaaagaaccactggatagggaagaaacaccaaaccacaagttactggttttggcaagtgatggtggattgatgccagcaagagcaatggtgctggtaaatgttacagatgtcaatgataatgtcccatccattgacataagatacatcgtcaatcctgtcaatgacacagttgttctttcagaaaatattccactcaacaccaaaattgctctcataactgtgacggataaggatgcggaccataatggcagggtgacatgcttcacagatcatgaaatccctttcagattaaggccagtattcagtaatcagttcctcctggagactgcagcatatcttgactatgagtccacaaaagaatatgccattaaattactggctgcagatgctggcaaacctcctttgaatcagtcagcaatgctcttcatcaaagtgaaagatgaaaatgacaatgctccagttttcacccagtctttcgtaactgtttctattcctgagaataactctcctggcatccagttgacgaaagtaagtgcaatggatgcagacagtgggcctaatgctaagatcaattacctgctaggccctgatgctccacctgaattcagcctggattgtcgtacaggcatgctgactgtagtgaagaaactagatagagaaaaagaggataaatatttattcacaattctggcaaaagataacggggtaccacccttaaccagcaatgtcacagtctttgtaagcattattgatcagaatgacaatagcccagttttcactcacaatgaatacaacttctatgtcccagaaaaccttccaaggcatggtacagtaggactaatcactgtaactgatcctgattatggagacaattctgcagttacgctctccattttagatgagaatgatgacttcaccattgattcacaaactggtgtcatccgaccaaatatttcatttgatagagaaaaacaagaatcttacactttctatgtaaaggctgaggatggtggtagagtatcacgttcttcaagtgccaaagtaaccataaatgtggttgatgtcaatgacaacaaaccagttttcattgtccctccttccaactgttcttatgaattggttctaccgtccactaatccaggcacagtggtctttcaggtaattgctgttgacaatgacactggcatgaatgcagaggttcgttacagcattgtaggaggaaacacaagagatctgtttgcaatcgaccaagaaacaggcaacataacattgatggagaaatgtgatgttacagaccttggtttacacagagtgttggtcaaagctaatgacttaggacagcctgattctctcttcagtgttgtaattgtcaatctgttcgtgaatgagtcggtgaccaatgctacactgattaatgaactggtgcgcaaaagcactgaagcaccagtgaccccaaatactgagatagctgatgtatcctcaccaactagtgactatgtcaagatcctggttgcagctgttgctggcaccataactgtcgttgtagttattttcatcactgctgtagtaagatgtcgccaggcaccacaccttaaggctgctcagaaaaacaagcagaattctgaatgggctaccccaaacccagaaaacaggcagatgataatgatgaagaaaaagaaaaagaagaagaagcattcccctaagaacttgctgcttaattttgtcactattgaagaaactaaggcagatgatgttgacagtgatggaaacagagtcacactagaccttcctattgatctagaagagcaaacaatgggaaagtacaattgggtaactacacctactactttcaagcccgacagccctgatttggcccgacactacaaatctgcctctccacagcctgccttccaaattcagcctgaaactcccctgaattcgaagcaccacatcatccaagaactgcctctcgataacacctttgtggcctgtgactctatctccaagtgttcctcaagcagttcagatccctacagcgtttctgactgtggctatccagtgacgaccttcgaggtacctgtgtccgtacacaccagaccgccaatgaaggaggttgtgcgatcttgcacccccatgaaagagtctacaactatggagatctggattcatccccaaccacagcggaaatctgaagggaaagtggcaggaaagtcccagcggcgtgtcacatttcacctgccagaaggctctcaggaaagcagcagtgatggtggactgggagaccatgatgcaggcagccttaccagcacatctcatggcctgccccttggctatcctcaggaggagtactttgatcgtgctacacccagcaatcgcactgaaggggatggcaactccgatcctgaatctactgcagaaataactgttcaaccaactgtggaagaggcctctgacaactgcactcaagaatgtctcatctatggccattctgatgcctgctggatgccggcatctctggatcattccagctcttcgcaagcacaggcctctgctctatgccacagcccaccactgtcacaggcctctactcagcaccacagcccacgagtgacacagaccattgctctctgccacagccctccagtgacacagaccatcgcattgtgccacagcccaccaccgatacaggtgtctgctctccaccacagtcctcctctagtgcaggctactgcacttcaccacagcccaccatcagcacaggcctcagccctctgctacagccctcctttagcacaggctgctgcaatcagccacagctctcctctgccacaggttattgccctccatcgtagtcaggcccaatcatcagtcagtttgcagcaaggttgggtgcaaggtgctgatgggctatgctctgttgatcagggagtgcaaggtagtgcaacatctcagttttacaccatgtctgaaagacttcatcccagtgatgattcaattaaagtcattcctttgacaaccttcactccacgccaacaggccagaccgtccagaggtgattcccccattatggaagaacatcccttgtaa

SEQ ID NO: 24815 - DNA, 4019 bp, Homo sapiens
  source 1..4019: mol_type = unassigned DNA
atggacttgttgtccgggacgtacattttcgcggtcctgctagcatgcgtggtgttccactctggcgcccaggagaaaaactacaccatccgagaagaaatgccagaaaacgtcctgataggcgacttgttgaaagaccttaacttgtcgctgattccaaacaagtccttgacaactgctatgcagttcaagctagtgtacaagaccggagatgtgccactgattcgaattgaagaggatactggtgagatcttcactactggcgctcgcattgatcgtgagaaattatgtgctggtatcccaagggatgagcattgcttttatgaagtggaggttgccattttgccggatgaaatatttagactggttaagatacgttttctgatagaagatataaatgataatgcaccattgttcccagcaacagttatcaacatatcaattccagagaactcggctataaactctaaatatactctcccagcggctgttgatcctgacgtaggaataaacggagttcaaaactacgaactaattaagagtcaaaacatttttggcctcgatgtcattgaaacaccagaaggagacaagatgccacaactgattgttcaaaaggagttagatagggaagagaaggatacctacgtgatgaaagtaaaggttgaagatggtggctttcctcaaagatccagtactgctattttgcaagtgagtgttactgatacaaatgacaaccacccagtctttaaggagacagagattgaagtcagtataccagaaaatgctcctgtaggcacttcagtgacacagctccatgccacagatgctgacataggtgaaaatgccaagatccacttctctttcagcaatctagtctccaacattgccaggagattatttcacctcaatgccaccactggacttatcacaatcaaagaaccactggatagggaagaaacaccaaaccacaagttactggttttggcaagtgatggtggattgatgccagcaagagcaatggtgctggtaaatgttacagatgtcaatgataatgtcccatccattgacataagatacatcgtcaatcctgtcaatgacacagttgttctttcagaaaatattccactcaacaccaaaattgctctcataactgtgacggataaggatgcggaccataatggcagggtgacatgcttcacagatcatgaaatccctttcagattaaggccagtattcagtaatcagttcctcctggagactgcagcatatcttgactatgagtccacaaaagaatatgccattaaattactggctgcagatgctggcaaacctcctttgaatcagtcagcaatgctcttcatcaaagtgaaagatgaaaatgacaatgctccagttttcacccagtctttcgtaactgtttctattcctgagaataactctcctggcatccagttgacgaaagtaagtgcaatggatgcagacagtgggcctaatgctaagatcaattacctgctaggccctgatgctccacctgaattcagcctggattgtcgtacaggcatgctgactgtagtgaagaaactagatagagaaaaagaggataaatatttattcacaattctggcaaaagataacggggtaccacccttaaccagcaatgtcacagtctttgtaagcattattgatcagaatgacaatagcccagttttcactcacaatgaatacaacttctatgtcccagaaaaccttccaaggcatggtacagtaggactaatcactgtaactgatcctgattatggagacaattctgcagttacgctctccattttagatgagaatgatgacttcaccattgattcacaaactggtgtcatccgaccaaatatttcatttgatagagaaaaacaagaatcttacactttctatgtaaaggctgaggatggtggtagagtatcacgttcttcaagtgccaaagtaaccataaatgtggttgatgtcaatgacaacaaaccagttttcattgtccctccttccaactgttcttatgaattggttctaccgtccactaatccaggcacagtggtctttcaggtaattgctgttgacaatgacactggcatgaatgcagaggttcgttacagcattgtaggaggaaacacaagagatctgtttgcaatcgaccaagaaacaggcaacataacattgatggagaaatgtgatgttacagaccttggtttacacagagtgttggtcaaagctaatgacttaggacagcctgattctctcttcagtgttgtaattgtcaatctgttcgtgaatgagtcggtgaccaatgctacactgattaatgaactggtgcgcaaaagcactgaagcaccagtgaccccaaatactgagatagctgatgtatcctcaccaactagtgactatgtcaagatcctggttgcagctgttgctggcaccataactgtcgttgtagttattttcatcactgctgtagtaagatgtcgccaggcaccacaccttaaggctgctcagaaaaacaagcagaattctgaatgggctaccccaaacccagaaaacaggcagatgataatgatgaagaaaaagaaaaagaagaagaagcattcccctaagaacttgctgcttaattttgtcactattgaagaaactaaggcagatgatgttgacagtgatggaaacagagtcacactagaccttcctattgatctagaagagcaaacaatgggaaagtacaattgggtaactacacctactactttcaagcccgacagccctgatttggcccgacactacaaatctgcctctccacagcctgccttccaaattcagcctgaaactcccctgaattcgaagcaccacatcatccaagaactgcctctcgataacacctttgtggcctgtgactctatctccaagtgttcctcaagcagttcagatccctacagcgtttctgactgtggctatccagtgacgaccttcgaggtacctgtgtccgtacacaccagaccgccaatgaaggaggttgtgcgatcttgcacccccatgaaagagtctacaactatggagatctggattcatccccaaccacagcggaaatctgaagggaaagtggcaggaaagactgtgcttacttcctcttccccttctgccatgaccctttcatacctggactaaagaaagagctgcagaaataactgttcaaccaactgtggaagaggcctctgacaactgcactcaagaatgtctcatctatggccattctgatgcctgctggatgccggcatctctggatcattccagctcttcgcaagcacaggcctctgctctatgccacagcccaccactgtcacaggcctctactcagcaccacagcccacgagtgacacagaccattgctctctgccacagccctccagtgacacagaccatcgcattgtgccacagcccaccaccgatacaggtgtctgctctccaccacagtcctcctctagtgcaggctactgcacttcaccacagcccaccatcagcacaggcctcagccctctgctacagccctcctttagcacaggctgctgcaatcagccacagctctcctctgccacaggttattgccctccatcgtagtcaggcccaatcatcagtcagtttgcagcaaggttgggtgcaaggtgctgatgggctatgctctgttgatcagggagtgcaaggtagtgcaacatctcagttttacaccatgtctgaaagacttcatcccagtgatgattcaattaaagtcattcctttgacaaccttcactccacgccaacaggccagaccgtccagaggtgattcccccattatggaagaacatcccttgtaaagctaaaatagttacttcaaattttcagaaaagatgtatatagtcaaaatttaagatacaattccaatgagtattctgattatcagatttgtaaataactatgtaaatagaaacagataccagaataaatctacag

SEQ ID NO: 24816 - DNA, 4023 bp, Homo sapiens
  source 1..4023: mol_type = unassigned DNA
atgtttagggttggcttcttaataatttcttcttcctcttctctctctcctcttcttttggtcagtgttgtgcgggttaatacaacaaactgtcacaagtgtttgttgtccgggacgtacattttcgcggtcctgctagtatgcgtggtgttccactctggcgcccaggagaaaaactacaccatccgagaagaaattccagaaaacgtcctgataggcaacttgttgaaagaccttaacttgtcgctgattccaaacaagtccttgacaactactatgcagttcaagctagtgtacaagaccggagatgtgccactgattcgaattgaagaggatactggtgagatcttcactaccggcgctcgcattgatcgtgagaaattatgtgctggtatcccaagggatgagcattgcttttatgaagtggaggttgccattttgccggatgaaatatttagactggttaagatacgttttctgatagaagatataaatgataatgcaccattgttcccagcaacagttatcaacatatcaattccagagaactcggctataaactctaaatatactctcccagcggctgttgatcctgacgtaggcataaacggagttcaaaactacgaactaattaagagtcaaaacatttttggcctcgatgtcattgaaacaccagaaggagacaagatgccacaactgattgttcaaaaggagttagatagggaagagaaggatacctatgtgatgaaagtaaaggttgaagatggtggctttcctcaaagatccagtactgctattttgcaagtaagtgttactgatacaaatgacaaccacccagtctttaaggagacagagattgaagtcagtataccagaaaatgctcctgtaggcacttcagtgacacagctccatgccacagatgctgacataggtgaaaatgccaagatccacttctctttcagcaatctagtctccaacattgccaggagattatttcacctcaatgccaccactggacttatcacaatcaaagaaccactggatagggaagaaacaccaaaccacaagttactggttttggcaagtgatggtggattgatgccagcaagagcaatggtgctggtaaatgttacagatgtcaatgataatgtcccatccattgacataagatacatcgtcaatcctgtcaatgacacagttgttctttcagaaaatattccactcaacaccaaaattgctctcataactgtgacggataaggatgcggaccataatggcagggtgacatgcttcacagatcatgaaattcctttcagattaaggccagtattcagtaatcagttcctcctggagaatgcagcatatcttgactatgagtccacaaaagaatatgccattaaattactggctgcagatgctggcaaacctcctttgaatcagtcagcaatgctcttcatcaaagtgaaagatgaaaatgacaatgctccagttttcacccagtctttcgtaactgtttctattcctgagaataactctcctggcatccagttgatgaaagtaagtgcaacggatgcagacagtgggcctaatgctgagatcaattacctgctaggccctgatgctccacctgaattcagcctggatcgtcgtacaggcatgctgactgtagtgaagaaactagatagagaaaaagaggataaatatttattcacaattctggcaaaagataatggggtaccacccttaaccagcaatgtcacagtctttgtaagcattattgatcagaatgacaatagcccagttttcactcacaatgaatacaaattctatgtcccagaaaaccttccaaggcatggtacagtaggactaatcactgtaactgatcctgattatggagacaattctgcagttacgctctccattttagatgagaatgatgacttcaccattgattcacaaactggtgtcatccgaccaaatatttcatttgatagagaaaaacaagaatcttacactttctatgtaaaggctgaggatggtggtagagtatcacgttcttcaagtgccaaagtaaccataaatgtggttgatgtcaatgacaacaaaccagttttcattgtccctccttacaactattcttatgaattggttctaccgtccactaatccaggcacagtggtctttcaggtaattgctgttgacaatgacactggcatgaatgcagaggttcgttacagcattgtaggaggaaacacaagagatctgtttgcaatcgaccaagaaacaggcaacataacattgatggagaaatgtgatgttacagaccttggtttacacagagtgttggtcaaagctaatgacttaggacagcctgattctctcttcagtgttgtaattgtcaatctgttcgtgaatgagtcagtgaccaatgctacactgattaatgaactggtgcgcaaaagcattgaagcaccagtgaccccaaatactgagatagctgatgtatcctcaccaactagtgactatgtcaagatcctggttgcagctgttgctggcaccataactgtcgttgtagttattttcatcactgctgtagtaagatgtcgccaggcaccacaccttaaggctgctcagaaaaacatgcagaattctgaatgggctaccccaaacccagaaaacaggcagatgataatgatgaagaaaaagaaaaagaagaagaagcattcccctaagaacctgctgcttaatgttgtcactattgaagaaactaaggcagatgatgttgacagtgatggaaacagagtcacactagaccttcctattgatctagaagagcaaacaatgggaaagtacaattgggtaactacacctactactttcaagcctgacagccctgatttggcccgacactacaaatctgcctctccacagcctgccttccaaattcagcctgaaactcccctgaatttgaagcaccacatcatccaagaactgcctctcgataacacctttgtggcctgtgactctatctccaattgttcctcaagcagttcagatccctacagcgtttctgactgtggctatccagtgacaaccttcgaggtacctgtgtccgtacacaccagaccgtcccagcggcgtgtcacatttcacctgccagaaggctctcaggaaagcagcagtgatggtggactgggagaccatgatgcaggcagccttaccagcacatcccatggcctgccccttggctatcctcaggaggagtactttgatcgtgctacacccagcaatcgcactgaaggggatggcaactccgatcctgaatctaattttatcagtgggatgagggagaaaataactgttcaaccaactgtggaagaggcctctgacaactgcactcaagaatgtctcatctatggccattctgatgcctgctggatgccggcatctctggatcattccagctcttcacaagcacaggcctctgctctatgccacagcccaccactgtcacaggcctctactcagcaccacagcccaccagtgacacagaccattgttctctgccacagccctccagtgacacagaccatcgcattgtgccacagcccaccaccgatacaggtgtctgctctccaccacagtcctcctctagtgcagggtactgcacttcaccacagcccaccatcagcacaggcctcagccctctgctacagccctcctttagcacaggctgctgcaatcagccacagctcttctctgccacaggttattgccctccatcgtagtcaggcccaatcatcagtcagtttgcagcaaggttgggtgcaaggtgctaatggactatgctctgttgatcagggagtgcaaggtagtgcaacatctcagttttacaccatgtctgaaagacttcatcccagtgatgattcaattaaagtcattcctttgacaaccttcgctccacgccaacaggccagaccgtccagaggtgattcccccattatggaaacacatcccttgtaa

SEQ ID NO: 24817 - DNA, 4710 bp, Homo sapiens
  source 1..4710: mol_type = unassigned DNA
cccctttctccccctctgttaagtccctccccctcgccattcaaaagggctggctcggcactggctccttgcagtcggcgaactgtctgggcgggaggagccgtgagcagtagctgcactcagctgcccgcgcggcaaagaggaaggcaagccaaacagagtgcgcagagtggcagtgccagcggcgacacaggcagcacaggcagcccgggctgcctgaatagcctcagaaacaacctcagcgactccggctgctctgcggactgcgagctgtggcggtagagcccgctacagcagtcgcagtctccgtggagcgggcggaagccttttttctccctttcgtttacctcttcattctactctaaaggcatcgttattaggaaaatcctgttgtgaataagaaggattccacagatcacataccagagcggttttgcctcagctgctctcaactttgtaatcttgtgaagaagctgacaagcttggctgattgcagtgcactatgaggactgaatgacagtgggttttaattcagatatttcaagtgttgtgcgggttaatacaacaaactgtcacaagtgtttgttgtccgggacgtacattttcgcggtcctgctagtatgcgtggtgttccactctggcgcccaggagaaaaactacaccatccgagaagaaattccagaaaacgtcctgataggcaacttgttgaaagaccttaacttgtcgctgattccaaacaagtccttgacaactactatgcagttcaagctagtgtacaagaccggagatgtgccactgattcgaattgaagaggatactggtgagatcttcactaccggcgctcgcattgatcgtgagaaattatgtgctggtatcccaagggatgagcattgcttttatgaagtggaggttgccattttgccggatgaaatatttagactggttaagatacgttttctgatagaagatataaatgataatgcaccattgttcccagcaacagttatcaacatatcaattccagagaactcggctataaactctaaatatactctcccagcggctgttgatcctgacgtaggcataaacggagttcaaaactacgaactaattaagagtcaaaacatttttggcctcgatgtcattgaaacaccagaaggagacaagatgccacaactgattgttcaaaaggagttagatagggaagagaaggatacctatgtgatgaaagtaaaggttgaagatggtggctttcctcaaagatccagtactgctattttgcaagtaagtgttactgatacaaatgacaaccacccagtctttaaggagacagagattgaagtcagtataccagaaaatgctcctgtaggcacttcagtgacacagctccatgccacagatgctgacataggtgaaaatgccaagatccacttctctttcagcaatctagtctccaacattgccaggagattatttcacctcaatgccaccactggacttatcacaatcaaagaaccactggatagggaagaaacaccaaaccacaagttactggttttggcaagtgatggtggattgatgccagcaagagcaatggtgctggtaaatgttacagatgtcaatgataatgtcccatccattgacataagatacatcgtcaatcctgtcaatgacacagttgttctttcagaaaatattccactcaacaccaaaattgctctcataactgtgacggataaggatgcggaccataatggcagggtgacatgcttcacagatcatgaaattcctttcagattaaggccagtattcagtaatcagttcctcctggagaatgcagcatatcttgactatgagtccacaaaagaatatgccattaaattactggctgcagatgctggcaaacctcctttgaatcagtcagcaatgctcttcatcaaagtgaaagatgaaaatgacaatgctccagttttcacccagtctttcgtaactgtttctattcctgagaataactctcctggcatccagttgatgaaagtaagtgcaacggatgcagacagtgggcctaatgctgagatcaattacctgctaggccctgatgctccacctgaattcagcctggatcgtcgtacaggcatgctgactgtagtgaagaaactagatagagaaaaagaggataaatatttattcacaattctggcaaaagataatggggtaccacccttaaccagcaatgtcacagtctttgtaagcattattgatcagaatgacaatagcccagttttcactcacaatgaatacaaattctatgtcccagaaaaccttccaaggcatggtacagtaggactaatcactgtaactgatcctgattatggagacaattctgcagttacgctctccattttagatgagaatgatgacttcaccattgattcacaaactggtgtcatccgaccaaatatttcatttgatagagaaaaacaagaatcttacactttctatgtaaaggctgaggatggtggtagagtatcacgttcttcaagtgccaaagtaaccataaatgtggttgatgtcaatgacaacaaaccagttttcattgtccctccttacaactattcttatgaattggttctaccgtccactaatccaggcacagtggtctttcaggtaattgctgttgacaatgacactggcatgaatgcagaggttcgttacagcattgtaggaggaaacacaagagatctgtttgcaatcgaccaagaaacaggcaacataacattgatggagaaatgtgatgttacagaccttggtttacacagagtgttggtcaaagctaatgacttaggacagcctgattctctcttcagtgttgtaattgtcaatctgttcgtgaatgagtcagtgaccaatgctacactgattaatgaactggtgcgcaaaagcattgaagcaccagtgaccccaaatactgagatagctgatgtatcctcaccaactagtgactatgtcaagatcctggttgcagctgttgctggcaccataactgtcgttgtagttattttcatcactgctgtagtaagatgtcgccaggcaccacaccttaaggctgctcagaaaaacatgcagaattctgaatgggctaccccaaacccagaaaacaggcagatgataatgatgaagaaaaagaaaaagaagaagaagcattcccctaagaacctgctgcttaatgttgtcactattgaagaaactaaggcagatgatgttgacagtgatggaaacagagtcacactagaccttcctattgatctagaagagcaaacaatgggaaagtacaattgggtaactacacctactactttcaagcctgacagccctgatttggcccgacactacaaatctgcctctccacagcctgccttccaaattcagcctgaaactcccctgaatttgaagcaccacatcatccaagaactgcctctcgataacacctttgtggcctgtgactctatctccaattgttcctcaagcagttcagatccctacagcgtttctgactgtggctatccagtgacaaccttcgaggtacctgtgtccgtacacaccagaccgactgattccaggacatgaactattgaaatctgcagtgagatgtaactttctaggaacaacaaaattccattccccttccaaaaaatttcaatgattgtgatttcaaaattaggctaagatcattaattttgtaatctagatttcccattataaaagcaagcaaaaatcatcttaaaaatgatgtcctagtgaaccttgtgctttctttagctgtaatctggcaatggaaatttaaaatttatggaagagacagtgcagcgcaataacagagtactctcatgctgtttctctgtttgctctgaatcaacagccatgatgtaatataaggctgtcttggtgtatacacttatggttaatatatcagtcatgaaacatgcaattacttgccctgtctgattgttgaataattaaaacattatctccaggagtttggaagtgagctgaactagccaaactactctctgaaaggtatccagggcaagagacatttttaagaccccaaacaaacaaaaaacaaaaccaaaacactctggttcagtgttttgaaaatattgactaacataatattgctgagaaaatcatttttattacccaccactctgcttaaaagttgagtgggccgggcgcggtggctcacgcctgtaattccagcactttgggaggccgaggcgggtggatcacgaggtcaggatattgagaccatcctggctaacatggtgaaaccccatctccactaaaaatacaaaaaattagctgggcgtggtggcgggcgcctgtagtcccagctactcgggaggctgaggcaggagaatggcgtgaacccgggaggcggagcttgcagtgagccgagatggcgccactgcactccagcctgggtgacagagcaagactctgtctcaaaaagaaaaaaatgttcagtgatagaaaataattttactaggtttttatgttgattgtactcatgctgttccactccttttaattattaaaaagttatttttggctgggtgtggtggctcatacctgtaatcccagcactttgggaggccgaggcgggtggatcacctgaggtcaggagttcaagaccagtctggccaacat

SEQ ID NO: 24818 - DNA, 4220 bp, Homo sapiens
  source 1..4220: mol_type = unassigned DNA
ggtggtccagtacctccaaagatatggaatacactcctgaaatatcctgaaaccttttttttttcagaatcctttaataagcagttatgtcaatctgaaagttgcttacttgtactttatattaatagctattcttgtttttcttatccaaagaaaaatcctctaatccccttttcacatgatagttgttaccatgtttaggcgttagtcacatcaacccctctcctctcccaaacttctcttcttcaaatcaaactttattagtccctcctttataatgattccttgcctccttttatccagatcaattttttttcactttgatgcccagagctgaagaaatggactattgtataaattattcattgccaagagaataattgcattttaaacccatgttataacaaagaataatgattatattttgtgatttgtaacaaataccctttattttcccttaactattgaattaaatattttaattatttgtattctctttaactatcttggtatattaaagtattatcttttatatatttatcaatggtggacacttttataggtactctgtgtcatttttgatactgtaggtatcttatttcatttatctttattcttaatgtacgaattcataatatttgattcagaacagatttatcactaattaacagagtgtcaattatgctaacatctcatttactgattttaatttaaaacagtttttgttaacatgcatgtttagggttggcttcttaataatttcttcttcctcttctctctctcctcttcttttggtcagtgttgtgcgggttaatacaacaaactgtcacaagtgtttgttgtccgggacgtacattttcgcggtcctgctagtatgcgtggtgttccactctggcgcccaggagaaaaactacaccatccgagaagaaattccagaaaacgtcctgataggcaacttgttgaaagaccttaacttgtcgctgattccaaacaagtccttgacaactactatgcagttcaagctagtgtacaagaccggagatgtgccactgattcgaattgaagaggatactggtgagatcttcactaccggcgctcgcattgatcgtgagaaattatgtgctggtatcccaagggatgagcattgcttttatgaagtggaggttgccattttgccggatgaaatatttagactggttaagatacgttttctgatagaagatataaatgataatgcaccattgttcccagcaacagttatcaacatatcaattccagagaactcggctataaactctaaatatactctcccagcggctgttgatcctgacgtaggcataaacggagttcaaaactacgaactaattaagagtcaaaacatttttggcctcgatgtcattgaaacaccagaaggagacaagatgccacaactgattgttcaaaaggagttagatagggaagagaaggatacctatgtgatgaaagtaaaggttgaagatggtggctttcctcaaagatccagtactgctattttgcaagtaagtgttactgatacaaatgacaaccacccagtctttaaggagacagagattgaagtcagtataccagaaaatgctcctgtaggcacttcagtgacacagctccatgccacagatgctgacataggtgaaaatgccaagatccacttctctttcagcaatctagtctccaacattgccaggagattatttcacctcaatgccaccactggacttatcacaatcaaagaaccactggatagggaagaaacaccaaaccacaagttactggttttggcaagtgatggtggattgatgccagcaagagcaatggtgctggtaaatgttacagatgtcaatgataatgtcccatccattgacataagatacatcgtcaatcctgtcaatgacacagttgttctttcagaaaatattccactcaacaccaaaattgctctcataactgtgacggataaggatgcggaccataatggcagggtgacatgcttcacagatcatgaaattcctttcagattaaggccagtattcagtaatcagttcctcctggagaatgcagcatatcttgactatgagtccacaaaagaatatgccattaaattactggctgcagatgctggcaaacctcctttgaatcagtcagcaatgctcttcatcaaagtgaaagatgaaaatgacaatgctccagttttcacccagtctttcgtaactgtttctattcctgagaataactctcctggcatccagttgatgaaagtaagtgcaacggatgcagacagtgggcctaatgctgagatcaattacctgctaggccctgatgctccacctgaattcagcctggatcgtcgtacaggcatgctgactgtagtgaagaaactagatagagaaaaagaggataaatatttattcacaattctggcaaaagataatggggtaccacccttaaccagcaatgtcacagtctttgtaagcattattgatcagaatgacaatagcccagttttcactcacaatgaatacaaattctatgtcccagaaaaccttccaaggcatggtacagtaggactaatcactgtaactgatcctgattatggagacaattctgcagttacgctctccattttagatgagaatgatgacttcaccattgattcacaaactggtgtcatccgaccaaatatttcatttgatagagaaaaacaagaatcttacactttctatgtaaaggctgaggatggtggtagagtatcacgttcttcaagtgccaaagtaaccataaatgtggttgatgtcaatgacaacaaaccagttttcattgtccctccttacaactattcttatgaattggttctaccgtccactaatccaggcacagtggtctttcaggtaattgctgttgacaatgacactggcatgaatgcagaggttcgttacagcattgtaggaggaaacacaagagatctgtttgcaatcgaccaagaaacaggcaacataacattgatggagaaatgtgatgttacagaccttggtttacacagagtgttggtcaaagctaatgacttaggacagcctgattctctcttcagtgttgtaattgtcaatctgttcgtgaatgagtcagtgaccaatgctacactgattaatgaactggtgcgcaaaagcattgaagcaccagtgaccccaaatactgagatagctgatgtatcctcaccaactagtgactatgtcaagatcctggttgcagctgttgctggcaccataactgtcgttgtagttattttcatcactgctgtagtaagatgtcgccaggcaccacaccttaaggctgctcagaaaaacatgcagaattctgaatgggctaccccaaacccagaaaacaggcagatgataatgatgaagaaaaagaaaaagaagaagaagcattcccctaagaacctgctgcttaatgttgtcactattgaagaaactaaggcagatgatgttgacagtgatggaaacagagtcacactagaccttcctattgatctagaagagcaaacaatgggaaagtacaattgggtaactacacctactactttcaagcctgacagccctgatttggcccgacactacaaatctgcctctccacagcctgccttccaaattcagcctgaaactcccctgaatttgaagcaccacatcatccaagaactgcctctcgataacacctttgtggcctgtgactctatctccaattgttcctcaagcagttcagatccctacagcgtttctgactgtggctatccagtgacaaccttcgaggtacctgtgtccgtacacaccagaccgactgattccaggacatgaactattgaaatctgcagtgagatgtaactttctaggaacaacaaaattccattccccttccaaaaaatttcaatgattgtgatttcaaaattaggctaagatcattaattttgtaatctagatttcccattataaaagcaagcaaaaatcatcttaaaaatgatgtcctagtgaaccttgtgctttctttagctgtaatctggcaatggaaatttaaaatttatggaagagacagtgcagcgcaataacagagtactctcatgctgtttctctgtttgctctgaatcaacagccatgatgtaatataaggctgtcttggtgtatacacttatggttaat

SEQ ID NO: 24819 - DNA, 8240 bp, Homo sapiens
  source 1..8240: mol_type = unassigned DNA
tgttgtgcgggttaatacaacaaactgtcacaagtgtttgttgtccgggacgtacattttcgcggtcctgctagtatgcgtggtgttccactctggcgcccaggagaaaaactacaccatccgagaagaaattccagaaaacgtcctgataggcaacttgttgaaagaccttaacttgtcgctgattccaaacaagtccttgacaactactatgcagttcaagctagtgtacaagaccggagatgtgccactgattcgaattgaagaggatactggtgagatcttcactaccggcgctcgcattgatcgtgagaaattatgtgctggtatcccaagggatgagcattgcttttatgaagtggaggttgccattttgccggatgaaatatttagactggttaagatacgttttctgatagaagatataaatgataatgcaccattgttcccagcaacagttatcaacatatcaattccagagaactcggctataaactctaaatatactctcccagcggctgttgatcctgacgtaggcataaacggagttcaaaactacgaactaattaagagtcaaaacatttttggcctcgatgtcattgaaacaccagaaggagacaagatgccacaactgattgttcaaaaggagttagatagggaagagaaggatacctatgtgatgaaagtaaaggttgaagatggtggctttcctcaaagatccagtactgctattttgcaagtaagtgttactgatacaaatgacaaccacccagtctttaaggagacagagattgaagtcagtataccagaaaatgctcctgtaggcacttcagtgacacagctccatgccacagatgctgacataggtgaaaatgccaagatccacttctctttcagcaatctagtctccaacattgccaggagattatttcacctcaatgccaccactggacttatcacaatcaaagaaccactggatagggaagaaacaccaaaccacaagttactggttttggcaagtgatggtggattgatgccagcaagagcaatggtgctggtaaatgttacagatgtcaatgataatgtcccatccattgacataagatacatcgtcaatcctgtcaatgacacagttgttctttcagaaaatattccactcaacaccaaaattgctctcataactgtgacggataaggatgcggaccataatggcagggtgacatgcttcacagatcatgaaattcctttcagattaaggccagtattcagtaatcagttcctcctggagaatgcagcatatcttgactatgagtccacaaaagaatatgccattaaattactggctgcagatgctggcaaacctcctttgaatcagtcagcaatgctcttcatcaaagtgaaagatgaaaatgacaatgctccagttttcacccagtctttcgtaactgtttctattcctgagaataactctcctggcatccagttgatgaaagtaagtgcaacggatgcagacagtgggcctaatgctgagatcaattacctgctaggccctgatgctccacctgaattcagcctggatcgtcgtacaggcatgctgactgtagtgaagaaactagatagagaaaaagaggataaatatttattcacaattctggcaaaagataatggggtaccacccttaaccagcaatgtcacagtctttgtaagcattattgatcagaatgacaatagcccagttttcactcacaatgaatacaaattctatgtcccagaaaaccttccaaggcatggtacagtaggactaatcactgtaactgatcctgattatggagacaattctgcagttacgctctccattttagatgagaatgatgacttcaccattgattcacaaactggtgtcatccgaccaaatatttcatttgatagagaaaaacaagaatcttacactttctatgtaaaggctgaggatggtggtagagtatcacgttcttcaagtgccaaagtaaccataaatgtggttgatgtcaatgacaacaaaccagttttcattgtccctccttacaactattcttatgaattggttctaccgtccactaatccaggcacagtggtctttcaggtaattgctgttgacaatgacactggcatgaatgcagaggttcgttacagcattgtaggaggaaacacaagagatctgtttgcaatcgaccaagaaacaggcaacataacattgatggagaaatgtgatgttacagaccttggtttacacagagtgttggtcaaagctaatgacttaggacagcctgattctctcttcagtgttgtaattgtcaatctgttcgtgaatgagtcagtgaccaatgctacactgattaatgaactggtgcgcaaaagcattgaagcaccagtgaccccaaatactgagatagctgatgtatcctcaccaactagtgactatgtcaagatcctggttgcagctgttgctggcaccataactgtcgttgtagttattttcatcactgctgtagtaagatgtcgccaggcaccacaccttaaggctgctcagaaaaacatgcagaattctgaatgggctaccccaaacccagaaaacaggcagatgataatgatgaagaaaaagaaaaagaagaagaagcattcccctaagaacctgctgcttaatgttgtcactattgaagaaactaaggcagatgatgttgacagtgatggaaacagagtcacactagaccttcctattgatctagaagagcaaacaatgggaaagtacaattgggtaactacacctactactttcaagcctgacagccctgatttggcccgacactacaaatctgcctctccacagcctgccttccaaattcagcctgaaactcccctgaatttgaagcaccacatcatccaagaactgcctctcgataacacctttgtggcctgtgactctatctccaattgttcctcaagcagttcagatccctacagcgtttctgactgtggctatccagtgacaaccttcgaggtacctgtgtccgtacacaccagaccgtcccagcggcgtgtcacatttcacctgccagaaggctctcaggaaagcagcagtgatggtggactgggagaccatgatgcaggcagccttaccagcacatcccatggcctgccccttggctatcctcaggaggagtactttgatcgtgctacacccagcaatcgcactgaaggggatggcaactccgatcctgaatctactttcatacctggactaaagaaagaaataactgttcaaccaactgtggaagaggcctctgacaactgcactcaagaatgtctcatctatggccattctgatgcctgctggatgccggcatctctggatcattccagctcttcacaagcacaggcctctgctctatgccacagcccaccactgtcacaggcctctactcagcaccacagcccaccagtgacacagaccattgttctctgccacagccctccagtgacacagaccatcgcattgtgccacagcccaccaccgatacaggtgtctgctctccaccacagtcctcctctagtgcagggtactgcacttcaccacagcccaccatcagcacaggcctcagccctctgctacagccctcctttagcacaggctgctgcaatcagccacagctcttctctgccacaggttattgccctccatcgtagtcaggcccaatcatcagtcagtttgcagcaaggttgggtgcaaggtgctaatggactatgctctgttgatcagggagtgcaaggtagtgcaacatctcagttttacaccatgtctgaaagacttcatcccagtgatgattcaattaaagtcattcctttgacaaccttcgctccacgccaacaggccagaccgtccagaggtgattcccccattatggaaacacatcccttgtaaagctaaaatagttacttcaaattttcagaaaagatgtatatagtcaaaatttaagatacaattccaatgagtattctgattatcagatttgtaaataactatgtaaatagaaacagataccagaataaatctacagctagacccttagtcaatagttaaccaaaaaattgcaatttgtttaattcagaatgtgtatttaaaaagaaaaggaatttaacaatttgcatccccttgtacagtaaggcttatcatgacagagcgtactatttctgatgtacagtattttttgttgtttttatcatcatgtgcaatattactgatttgtttccatgctgattgtgtggaaccagtatgtagcaaatggaaagcctagaaatatcttattttctaagtttacctttagtttacctaaacttttgttcagataatgttaaaaggtatacgtactctagccttttttggggctttctttttgatttttgtttgtggttttcagtttttttgttgttgttagtgagtctcccttcaaaatacacagtaggtagtgtaaatactgcttgtttgtgtctctctgctgtcatgttttctaccttattccaatactatattgttgataaaatttgtatatacattttcaataaagaatatgtataaactgtacagatctagatctacaacctatttctctactctttagtagagttcgagacacagaagtgcaataactgccctaattaagcaactatttgttaaaaagggcccctttttactttaatagtttagtgtaaagtacatcagaaataaaactgtatctgacattttaagcctgtagtccattattacttgggtctttacttctgggaatttgtatgtaacagcctagaaaattaaaaggaggtggatgcatccaaagcacgagtcacttaaaatatcgacggtaaactactattttgtagagaaactcaggaagatttaaatgttgatttgacagctcaataggctgttaccaaagggtgttcagtaaaaataacaaatacatgtaactgtagataaaaccacatactaaatctataagactaagggatttttgttattctagctcaacttactgaagaaaaccactaataacaacaagaatatcaggaaggaacttttcaagaaatgtaattataaatctacatcaaacagaattttaaggaaaaatgcagagggagaaataaggcacatgactgcttcttgcagtcaagaagaaataccaataacacacacagaacaaaaaccatcaaaatctcatatatgaaataaaatatattcttctaagcaaagaaacagtactattcatagaaaacattagttttctcctgttgtctgttatttccttcttttatcctcttaactggccattatcttgtatgtgcacattttataaatgtacagaaacatcaccaacttgattttcttccatagcaaaactgagaaaataccttgtttcagtataacactaaaccaagagacaattgatgtttaatgggggcggttggggttgggggggagtcaatatctcctattgattaacttagacatagattttgtaatgtataacttgatatttaatttatgattaaactgtaattttgtaacataaactgtggtaattgcataatttcattggtgaggatttcctttgaatattgagaaagtttcttttcatgtgcccagcaggttaagtagcgttttcagaatatacattattcccatccattgtaaagttccttaagtcatatttgactgggcgtgcagaataacttcttaactattaactatcagagtttgattaataaaattaattaattttttttctccttcgtgttgttaatgttccaagggatttggagcatactggttttccaggtgcatgtgaatcccgaaggactgatgatatttgaatgtttattaaattattatcacacaaatgtgttgatattgtggctattgttgatgttgaaaattgtaaacttggggaagattaagaaaagaaccaatagtgacaaaaatcagtgcttccagtagattttagaacattctttgcctcaaaaaacctgcaaagatgatgtgagattttttcttgtgttttaattattttcacattttctctctgcaaacctttagttttctgatgatctacacacacacatacacacacacacacacacacgtgcacacacacacatttaaaggatataaaaagaagaggttgaaagattattaaataacttatcaggcatctcaatggttactatctatgttagtgaaaatcaaataggactcaaagttggatatttgggatttttcttctgacagtataatttattgagttactagggaggttcttaaatcctcatatctggaaacttgtgaagttttgacacctttcctatagatataggaatgaaccaatacgcttttattaccctttctaactctgattttataatcagacttagattgtgtttagaatattaaatgactgggcaccctcttcttggtttttaccagagaggctttgaatggaagcaggctgagagtagccaaagaggcaaggggtattagcccagttattctcccctatgccttctcttcctaagcgtccactaggtctggccttggaaatctgttacttctacggcttcagatctgatgatatctttttcatcacattacaagttatttctttgactgaatagacagtggtataggttgacacagcacacaagtggctattgtgatgtatgatgtatgtagtcccacaactgcaaaacgtcttactgaagcaacaatcgaaaaatggttctgttttaaaaaggattttgtttgatttgaaattaaaacttcaaactgaatgacttatatgagaataatatgttcaatcaaagtagttattctattttgtgtccatattccattagattgtgattattaattttctagctatggtattactatatcacacttgtgagtatgtattcaaatactaagtatcttatatgctacgtgcatacacattcttttcttaaactttacctgtgttttaactaatattgtgtcagtgtattaaaaattagcttttacatatgatatctacaatgtaataaatttagagagtaattttgtgtattcttatttacttaacattttacttttaattatgtaaatttggttagaaaataataataaatggttagtgctattgtgtaatggtagcagttacaaagagcctctgccttcccaaactaatatttatcacacatggtcattaaatgggaaaaaaatagactaaacaaatcacaaattgttcagttcttaaaatgtaattatgtcacacacacaaaaaaatccttttcaatcctgagaaaattaaaggtgttttactcacatggatatttcaacattagttttttttgtttgtttctttttcatggtattactgaaggtgtgtatactccctaatacacatttatgaaaatctacttgtttagacttttatttatactcttctgatttatattttttattataattattatttcttatcttcttttatattttttggaaaccaaatttatagttagtttaggtaaactttttattatgaccattagaaactattttgaatgtttccaactggctcaattggctgggaaaacatgggaacaagagaagctgaaatatatttctgcaagaacctttctatattatgtgccaattaccacaccagatcaattttatgcagaggccttaaaatattctttcacagtagctttcttacactaaccgtcatgtgcttttagtaaatatgatttttaaaagcagttcaagttgacaacagcagaaacagtaacaaaaaaatctgctcagaaaaatgtatgtgcacaaataaaaaaaattaatggcaattgtttagtgactgtaagtgatactttttaaagagtaaactgtgtgaaatttatactatccctgcttaaaatattaagatttttatgaaatatgtatttatgtttgtattgtgggaagattcctcctctgtgatatcatacagcatctgaaagtgaacagtatcccaaagcagttccaagcatgctttggaagtaagaaggttgactattgtatggccaaggatggcagtatgtaatccagaagcaaacttgtattaattgttctatttcaggttctgtattgcatgttttcttattaatatatattaataaaagttatgagaaataaa

SEQ ID NO: 24820 - DNA, 6562 bp, Homo sapiens
  source 1..6562: mol_type = unassigned DNA
gggaagcgggaggagagccacacggtcaagttgcacaggttcttgcagcttctggaatcaagaccatgggcaccctcataagtcagtgtgggcagggactgccccagggccaatccaagatccagaggtagccatagggtgtgacaagttgtgcagattacaacactcaccccttgcaataacgtcactgcctgtgactcggggccaggcccaggccaaagcccttcctacatcatttcgtttaatcctcacagtttcctgctgaaagggctactattcttactcccatccccactctacagatgaggtaatggaggcccaggaaagttaagtgacttgtcccagatgacaccgctggtaagttgcaaagtcagaatttgaactcaggcagtttacctctgatggctgctctgttaatcacagctgctttccagtgagacaaaaacgggtgatcagggcagagtcaagacagagaggtaaacaagattgggaaaaagacaggaatgagaggggaacaatgggggaaaagataggaacaaagagagttggggaaggggagagaaacaggaaacatgacttgcccgggaggggcatcagtccacgtgcaagcaggtggaggctcaagttttctgctcacttggtgatgcagaggctccctttccctcagcagccgccttgctgcgtggacagcagcttcccatctggcctgtccccggagccccggcctcatcctcctcagcggcaggccacttagcttcacaggaaatgctctttctctaattggcattgaaactcacagccctcccttttcctgtaggtggggtttccataggaaaaagctgcttctctgtttccccagcctagcaactgtttggcagtcagagtcccacatcctgctcaactgggtcaggtccctcttagaccagctcttgtccatcatttgctgaagtggaccaactagttccccagtagggggtctcccctggcaattcttgatcggcgtttggacatctcagatcgcttccaatgaagatggccttgccttggggtcctgcttgtttcataatcatctaactatgggacaaggttgtgccggcagctctgggggaaggagcacggggctgatcaagccatccaggaaacactggaggacttgtccagccttgaaagaactctagtggtttctgaatctagcccacttggcggtaagcatgatgcaacttctgcaacttctgctggggcttttggggccaggtggctacttatttcttttaggggattgtcaggaggtgaccactctcacggtgaaataccaagtgtcagaggaagtgccatctggtacagtgatcgggaagctgtcccaggaactgggccgggaggagaggcggaggcaagctggggctgccttccaggtgttgcagctgcctcaggcgctccccattcaggtggactctgaggaaggcttgctcagcacaggcaggcggctggatcgagagcagctgtgccgacagtgggatccctgcctggtttcctttgatgtgcttgccacaggggatttggctctgatccatgtggagatccaagtgctggacatcaatgaccaccagccacggtttcccaaaggcgagcaggagctggaaatctctgagagcgcctctctgcgaacccggatccccctggacagagctcttgacccagacacaggccctaacaccctgcacacctacactctgtctcccagtgagcactttgccttggatgtcattgtgggccctgatgagaccaaacatgcagaactcatagtggtgaaggagctggacagggaaatccattcattttttgatctggtgttaactgcctatgacaatgggaacccccccaagtcaggtaccagcttggtcaaggtcaacgtcttggactccaatgacaatagccctgcgtttgctgagagttcactggcactggaaatccaagaagatgctgcacctggtacgcttctcataaaactgaccgccacagaccctgaccaaggccccaatggggaggtggagttcttcctcagtaagcacatgcctccagaggtgctggacaccttcagtattgatgccaagacaggccaggtcattctgcgtcgacctctagactatgaaaagaaccctgcctacgaggtggatgttcaggcaagggacctgggtcccaatcctatcccagcccattgcaaagttctcatcaaggttctggatgtcaatgacaacatcccaagcatccacgtcacatgggcctcccagccatcactggtgtcagaagctcttcccaaggacagttttattgctcttgtcatggcagatgacttggattcaggacacaatggtttggtccactgctggctgagccaagagctgggccacttcaggctgaaaagaactaatggcaacacatacatgttgctaaccaatgccacactggacagagagcagtggcccaaatataccctcactctgttagcccaagaccaaggactccagcccttatcagccaagaaacagctcagcattcagatcagtgacatcaacgacaatgcacctgtgtttgagaaaagcaggtatgaagtctccacgcgggaaaacaacttaccctctcttcacctcattaccatcaaggctcatgatgcagacttgggcattaatggaaaagtctcataccgcatccaggactccccagttgctcacttagtagctattgactccaacacaggagaggtcactgctcagaggtcactgaactatgaagagatggccggctttgagttccaggtgatcgcagaggacagcgggcaacccatgcttgcatccagtgtctctgtgtgggtcagcctcttggatgccaatgataatgccccagaggtggtccagcctgtgctcagcgatggaaaagccagcctctccgtgcttgtgaatgcctccacaggccacctgctggtgcccatcgagactcccaatggcttgggcccagcgggcactgacacacctccactggccactcacagctcccggccattccttttgacaaccattgtggcaagagatgcagactcgggggcaaatggagagcccctctacagcatccgcagtggaaatgaagcccacctcttcatcctcaaccctcatacggggcagctgttcgtcaatgtcaccaatgccagcagcctcattgggagtgagtgggagctggagatagtagtagaggaccagggaagcccccccttacagacccgagccctgttgagggtcatgtttgtcaccagtgtggaccacctgagggactcagcccgcaagcctggggccttgagcatgtcgatgctgacggtgatctgcctggctgtactgttgggcatcttcgggttgatcctggctttgttcatgtccatctgccggacagaaaagaaggacaacagggcctacaactgtcgggaggccgagtccacctaccgccagcagcccaagaggccccagaaacacattcagaaggcagacatccacctcgtgcctgtgctcaggggtcaggcaggtgagccttgtgaagtcgggcagtcccacaaagatgtggacaaggaggcgatgatggaagcaggctgggacccctgcctgcaggcccccttccacctcaccccgaccctgtacaggacgctgcgtaatcaaggcaaccagggagcaccggcggagagccgagaggtgctgcaagacacggtcaacctccttttcaaccatcccaggcagaggaatgcctcccgggagaacctgaaccttcccgagccccagcctgccacaggccagccacgttccaggcctctgaaggttgcaggcagccccacagggaggctggctggagaccagggcagtgaggaagccccacagaggccaccagcctcctctgcaaccctgagacggcagcgacatctcaatggcaaagtgtcccctgagaaagaatcagggccccgtcagatcctgcggagcctggtccggctgtctgtggctgccttcgccgagcggaaccccgtggaggagctcactgtggattctcctcctgttcagcaaatctcccagctgctgtccttgctgcatcagggccaattccagcccaaaccaaaccaccgaggaaataagtacttggccaagccaggaggcagcaggagtgcaatcccagacacagatggcccaagtgcaagggctggaggccagacagacccagaacaggaggaagggcctttggatcctgaagaggacctctctgtgaagcaactgctagaagaagagctgtcaagtctgctggaccccagcacaggtctggccctggaccggctgagcgcccctgacccggcctggatggcgagactctctttgcccctcaccaccaactaccgtgacaatgtgatctccccggatgctgcagccacggaggagccaaggaccttccagacgttcggcaaggcagaggcaccagagctgagcccaacaggcacgaggctggccagcacctttgtctcggagatgagctcactgctggagatgctgctggaacagcgctccagcatgcccgtggaggccgcctccgaggcgctgcggcggctctcggtctgcgggaggaccctcagtttagacttggccaccagtgcagcctcaggcatgaaagtgcaaggggacccaggtggaaagacggggactgagggcaagagcagaggcagcagcagcagcagcaggtgcctgtgaacatacctcagacgcctctggatccaagaaccaggggcctgaggatctgtggacaagagctggtttctaaaatcttgtaactcactagctagcggcggcctgagaactttagggtgactgatgctacccccacagaggaggcaagagccccaggactaacagctgactgaccaaagcagccccttgtaagcagctctgagtcttttggaggacagggacggtttgtggctgagataagtgtttcctggcaaaacatatgtggagcacaaagggtcagtcctctggcagaacagatgccacggagtatcacaggcaggaaagggtggccttcttgggtagcaggagtcagggggctgtaccctgggggtgccaggaaatgctctctgacctatcaataaaggaaaagcagtgattcattctcctgtttgcacctgtcaagagggagaagggaagagtaatagagtggggtttatttgtcatccaatccctggcaagaccgtcacactgggcctggacaggagtggggcaccttggtacacagtaacaggtacacaaatagcagacatgtgtgctcttacccctgttcccctatcactatgttaccaactaatctgcttctcagctgcaaaattagagctaagaaagcacaactatttataaagcatttacatgagccaggcaccaggctttacaataggatttaatttgattttccaacaatcctgggagggaggtattattaaccccatttcacagacacggatatggggcttggagaggtcaagtggctttcccaagatcaagcagggagtagagccagagccaggatttggacccaggctgggccaacaccaaaacccatgccttcaaccttgacaccagcctgccaaccaaagacaggagaagggaaggccctggaggtgagctgttggcagcagtgaacttgctcgagctccctcgggaaacactgttgaaaggaacatttccaaagccatccaggcccgcacctctctacattcccaagcacaaggcaaaaggaacttggatctgaactgatgcagacccgttctttcccaacaagtagctcttcaagtgcggatgtcatctttcccaaccccatttgcgggtaaaccttcctctgtcattgcaggttcaggcttgtgaatcccagaggacgctgtgtgaactgggtctatgaaatcggcactgacagcagccagccttccaggggatgggggagggaagaaacagcagatattttcccaaggttcagctttataattttcttggaaatttccgagcagccaatcagctagcttctaaatagtgtgggtctctcctggacactgcaggcaaaagttcctctatctgctcctctttttgtcctttcttggagctcagtgctcatgttcactgttcaagaaatgggccaatcatactcccaactagggataatgtgcatcatacatacttggaatacagtgtggtatcattattccattttacagatgaagaaaatgaggctccccaaagttatgagtttcaggggcagagtttctcctcacctcactctaggccagagtgatctccttacagaatctgtgattttcaggctggatcacagaactgttgggttctgtgggccagtgagagaaactgggggatatcaagcaggcaggcagggtctccagcctgaccagccaggtgcctgctacaaagcaacacttgatgaatagctgttgaatggatgtatgaatgaataaatgtgtcaataaatgcttcagaggcccctttta

SEQ ID NO: 24821 - DNA, 572 bp, Homo sapiens
  source 1..572: mol_type = unassigned DNA
acagtttcctgctgaaagggctactattcttactcccatccccactctacagatgaggtaatggaggcccaggaaagttaagtgacttgtcccagatgacaccgctggtggggtttccataggaaaaagctgcttctctgtttccccagcctagcaactgtttggcagtcagagtcccacatcctgctcaactgggtcaggtccctcttagaccagctcttgtccatcatttgctgaagtggaccaactagttccccagtagggggtctcccctggcaattcttgatcggcgtttggacatctcagatcgcttccaatgaagatggccttgccttggggtcctgcttgtttcataatcatctaactatgggacaaggttgtgccggcagctctgggggaaggagcacggggctgatcaagccatccaggaaacactggaggacttgtccagccttgaaagaactctagtggtttctgaatctagcccacttggcggtaagcatgatgcaacttctgcaacttctgctggggcttttggggccaggtggctacttatttcttttaggggattg

SEQ ID NO: 24822 - DNA, 7523 bp, Homo sapiens
  source 1..7523: mol_type = unassigned DNA
tcctgcccccaccttacaggtctgggatgtacctttccatctgttgctgctttcttctatgggcccctgccctcactctcaagaacctcaactactccgtgccggaggagcaaggggccggcacggtgatcgggaacatcggcagggatgctcgactgcagcctgggcttccgcctgcagagcgcggcggcggagggcgcagcaagtcgggtagctaccgggtgctggagaactccgcaccgcacctgctggacgtggacgcagacagcgggctcctctacaccaagcagcgcatcgaccgcgagtccctgtgccgccacaatgccaagtgccagctgtccctcgaggtgttcgccaacgacaaggagatctgcatgatcaaggtagagatccaggacatcaacgacaacgcgccctccttctcctcggaccagatcgaaatggacatctcggagaacgctgctccgggcacccgcttccccctcaccagcgcacatgaccccgacgccggcgagaatgggctccgcacctacctgctcacgcgcgacgatcacggcctctttggactggacgttaagtcccgcggcgacggcaccaagttcccagaactggtcatccagaaggctctggaccgcgagcaacagaatcaccatacgctcgtgctgactgccctggacggtggcgagcctccacgttccgccaccgtacagatcaacgtgaaggtgattgactccaacgacaacagcccggtcttcgaggcgccatcctacttggtggaactgcccgagaacgctccgctgggtacagtggtcatcgatctgaacgccaccgacgccgatgaaggtcccaatggtgaagtgctctactctttcagcagctacgtgcctgaccgcgtgcgggagctcttctccatcgaccccaagaccggcctaatccgtgtgaagggcaatctggactatgaggaaaacgggatgctggagattgacgtgcaggcccgagacctggggcctaaccctatcccagcccactgcaaagtcacggtcaagctcatcgaccgcaacgacaatgcgccgtccatcggtttcgtctccgtgcgccagggggcgctgagcgaggccgcccctcccggcaccgtcatcgccctggtgcgggtcactgaccgggactctggcaagaacggacagctgcagtgtcgggtcctaggcggaggagggacgggcggcggcgggggcctgggcgggcccgggggttccgtccccttcaagcttgaggagaactacgacaacttctacacggtggtgactgaccgcccgctggaccgcgagacacaagacgagtacaacgtgaccatcgtggcgcgggacgggggctctcctcccctcaactccaccaagtcgttcgcgatcaagattctagacgagaacgacaacccgcctcggttcaccaaagggctctacgtgcttcaggtgcacgagaacaacatcccgggagagtacctgggctctgtgctcgcccaggatcccgacctgggccagaacggcaccgtatcctactctatcctgccctcgcacatcggcgacgtgtctatctacacctatgtgtctgtgaatcccacgaacggggccatctacgccctgcgctcctttaacttcgagcagaccaaggcttttgagttcaaggtgcttgctaaggactcgggggcgcccgcgcacttggagagcaacgccacggtgagggtgacagtgctagacgtgaatgacaacgcgccagtgatcgtgctccccacgctgcagaacgacaccgcggagctgcaggtgccgcgcaacgctggcctgggctatctggtgagcactgtgcgcgccctagacagcgacttcggcgagagcgggcgtctcacctacgagatcgtggacggcaacgacgaccacctgtttgagatcgacccgtccagcggcgagatccgcacgctgcaccctttctgggaggacgtgacgcccgtggtggagctggtggtgaaggtgaccgaccacggcaagcctaccctgtccgcagtggccaagctcatcatccgctcggtgagcggatcccttcccgagggggtaccacgggtgaatggcgagcagcaccactgggacatgtcgctgccgctcatcgtgactctgagcactatctccatcatcctcctagcggccatgatcaccatcgccgtcaagtgcaagcgcgagaacaaggagatccgcacttacaactgccgcatcgccgagtacagccacccgcagctgggtgggggcaagggcaagaagaagaagatcaacaaaaatgatatcatgctggtgcagagcgaagtggaggagaggaacgccatgaacgtcatgaacgtggtgagcagcccctccctggccacctcccccatgtacttcgactaccagacccgcctgcccctcagctcgccccggtcggaggtgatgtatctcaaaccggcctccaacaacctgactgtccctcaggggcacgcgggctgccacaccagcttcaccggacaagggactaatgcaagcgagacccctgccactcggatgtccataattcagacagacaattttcccgcagagcccaattacatgggcagcaggcagcagtttgttcaaagtagctccacgtttaaggacccagaaagagccagcctgagagacagtgggcacggggacagtgatcaggctgacagtgaccaagacactaacaaaggctcctgctgtgacatgtctgttagggaggcactcaagatgaaaactacttcaactaaaagccaaccacttgaacaagaaccagaagagtgtgttaattgcacagatgaatgccgagtgcttggtcattctgacaggtgctggatgccacagttccctgcagccaatcaggctgaaaatgcagattaccgcacaaatctctttgtacctacagttgaagctaatgttgagactgagacttacgaaactgtgaatcccactgggaaaaagactttttgtacatttggaaaagacaagcgagagcacactattctcattgccaacgttaaaccttatttaaaagccaaacgtgccctgagccctctcctccaagaggtcccctcagcatcaagcagcccaaccaaggcgtgcatcgagccttgcacctcaacaaaaggctccctggatggctgtgaagcaaaaccaggagccctggctgaagcaagcagtcagtacttgcccactgacagtcaatatctgtcacctagtaagcaaccaagagaccctcccttcatggcttccgatcagatggcaagggtctttgcagatgtgcattccagagccagccgggattccagtgagatgggtgctgttcttgagcagcttgaccaccccaacagggatctgggcagagagtctgtggatgcagaggaagttgtgagagaaattgataagcttttgcaagactgccggggaaacgaccctgtggctgtgagaaagtgaaaaaagaaaaaaaaaaaggcattggcattttcttgtctcttctgttgatttaaaaatgatccctcctggtgataacccattttacagggatgaagaaagaccaatgctgctttaaggcttttagtgaacatctgaagtgcccacaagtatgttctttccactgctgatttctttttcagagataacaatggtttcgttttgaccaaacttgtattaggacagaattaatgatgcttaaagagaaaagaaaaaaagagagaagaaaaaggagagatgaaaaaggaggatgaggagaagaattaccttttgacaatctgttaggaaggtatgcagtgtgagaactgaagtatttctgatcactctcagactgtcctccgtgatttatgctgacttaactgtttacctataaaccccatacaaagcagggtcataatttgtgatctgtggtggatttctagcagtcatcacaggcttctactgaaagtcctgaaaagaccttgcagtagtccaagctacaccaaacattaacacatatttgtggtaaacatttctgtataaagttacctgacacacatataaacacaaggaacattccatatcattagtcgaaaacaaaaacaaaaaaaaaacctttggtcatttgtaagacatctcatgtcatataaaagttaaatgtaaaaagatacagtccattttgtcctgcacacacgtagactaattcacgtcattaaagaagaagaaaacttaaagatttaaaatgcctatttagcattttagtgtccaacaaagatttaaacaatgatgaatatgttttaaatttgacatagaaaagttctaaaaaatagttaccattgagtggtaagattcagagaaaattaacttgattaatatgttttattcatttgtggacactaaaatagctcaggaaagtgaaaatgtcttagacatacgcaagtcacatgaccatttaaatgtgcaaatgtaagaagattcaatgtgtttacatcaaatgacatattttattgatttattgcagattcagtgcatatgagccaaattgttgagtgtgtaagagctatattgtgtattttattaaattaatatatagttgtgttgcaaaaatatttgggcttatattgtaaatggcaagtgttgccttggtagctgtcgaactctatgagttttgttttttcctgcttccttttccccatggagtgtgggaagcagtgcctcagagcaaagtctcttgtttaatgtatagtctaccaagtactacagtacataatctgttcaaaatgtgtttgagtgagctgatggagctaactgaaaggtcaaaaattacatccatcagtcatggttatgtgcaagtccttgtagaagcttttattaaagtcatgctaaatcacaagaattgacatttgtaccaatatctgaaacttcttcatgttttttcaataacatacagcttctgcctgtgtagatattatgccatcagttggttctcaaaagtattttaagtgcttcagatgtgtgttcccattatattttgaaaacatgaaaaatgctttaatgcatgtatgtaccagcagtggttacttgcattgtgtagtgtttttcaagaggtctgggtcttaacaaaatgttttcctttatctcagtgctcttctgcctctttttgttggtgtcctttgagaacaatacaccttctattccttcatttggttacacctttccttgtgacatttagcgagtttcaaacttacttccatatgaggctaagaaacctcaaatttcaggaattgggaaaaataaaattagcacttgcagaagtagcagcagatgggaaaatgccttgattgacattttctttcagcatttaaaatttttggcattttacagcttcatgacaaacagttttgtgcccataccttagaaaatgtggtgctgagttaaataaaggctgtttgagcactggagcagaaaaatgcattatttgcaaactggtggataattttgtgccttctcttctggccaccaagccagtgtagaaacagcaaaaatgtcataaaaattcttatatttaaaacaaaaacaaaagcaaaaacaaacattgaattaaattaagttttgtaattttaaactttaaaaacttctactgaaaatatttccgccaaatgccatcaatattttagactgtacctcgtttgcaaaactgctttgagagggaagagtggacaactcccatcagccttattctcttgagaactatattttggttcctagtaacagcctttccaaagctctactcttggtttttattactcataaatgtttaaattagaaaagaagggaccttgtacatgtgaaacctaattgactctctatattttggacaatttatgtatctgaaatgtgttgtctctgttatatgatgttatttttgccaggagactacaggttgatttagcttgatagctgaaatttgatggaaaactgatttccatttagtcttaccaagtgttgcttctctcttactagacagatatccacttagtaaaatctaaagcagtatgtaaatgaaaccagcaaagagagtagggtttattttataaacattcttaatgctaagtaaccagttgttcaatttattatatgtgtctgaggacattaaaacaccataaggttgtaataattggttgtgccaatgtgtgagggatttacctttaggctctctgtcaccagtgatttactagtgttagctgtttaacacattatctgtatttagtagtgattatttatttacaagttggtggtaattcagcagtcaggactctaagcttttatagttgaattgaggaaatctcgcttttattcatttagctggcaactgcctttattgcagacctctggtgcttggctttcaaggaagcctatgagatgccaaaatcacacctttagagagcaccttgctctaataggtgatgcatgagcaaacagtgagatttgaaggggttttaacataatttagaatgtgaaaaaaatatcaattcatatctttcaagtactaacccctcaaaaaagcccacacatacaaaatatgtgatgtgataccactttgtcttttaggtctttaagtaactgaagttaagcacagaaaaaaaaatcacttcatggaaatttcagtaagaaacccaaacttctaaaaattgcttgcagatgagctaaaaaaaaaaaaaaaaaaaaaaagcaacaaaataaccttttcatcagagttaaaagtagtgagaatctgttagttatacgtataccaaagtaaacattaaagagacatatcatgcaatttcaaagaattctttcatgctatttcttaacctgacatttctaactttattgcaggcaatatacaaagattggctcactactccataggttaattgaattcctggttgagaaactaacttgttttgttttccaaaattagctgaaatcttgtaaaacatgacttccctttaaaggatctagatattgttcaatttaaaatatggcaccataaaaaagtcatgtagtaatagagcatatgcttttttagaaccaggttaaaagctgtttgttatctaatagagtaaaagttactgaggtcaacagatagacaggtctggcataatatatgcccagtcataatagtctaattatattcttttgacaacagacagcattcatcagagcactaattcgaatgagagttttggctatcaagatgtgttgattctaaatattattgaatgagacctgattaaagtctgactttcctggccccagtgttttgcaggttggctatttccattatcagcccatcactccataaagttcttagctgcaccaagtgattggtgaacaaggacaacaacaaaagcagcatacattgtatggatttatctcaacgctattgtttaatggctgtgtttaatgtgatctatctggaaaatgaggactccgaataaaaagctattactaata

SEQ ID NO: 24823 - DNA, 5906 bp, Homo sapiens
  source 1..5906: mol_type = unassigned DNA
gcaatcacgggtgtttagtctgcagccgagcagctaaagggagaaagaatcgctcaggaaagacacactgcagactccaccggcaccctgcaatagatggattccgactacacaagggagaaaacgcggaggtgacactctcctgcctggaaagaggacgaacgaccaaacaaacgcaaggactggactccatgccgaaggtatctggaagtcgtgacacggtgtgtataaaacaaaagtttgcgagctgttaattgctgtgctgtgttattaagagacgctttcaagtttcaagtaccaaatgtagctttacgttgccaaaggaagttgaggcaattgctttgctgttttaacttgctctgtgagggaaatctcataaactgaccaatgcaccaaatgaatgctaaaatgcactttaggtttgtttttgcacttctgatagtatctttcaaccacgatgtactgggcaagaatttgaaatacaggatttatgaggaacagagggttggatcagtaattgcaagactatcagaggatgtggctgatgttttattgaagcttcctaatccttctactgttcgatttcgagccatgcagaggggaaattctcctctacttgtagtaaacgaggataatggggaaatcagcataggggctacaattgaccgtgaacaactgtgccagaaaaacttgaactgttccatagagtttgatgtgatcactctacccacagagcatctgcagcttttccatattgaagttgaagtgctggatattaatgacaattctccccagttttcaagatctctcatacctattgagatatctgagagtgcagcagttgggactcgcattcccctggacagtgcatttgatccagatgttggggaaaattccctccacacatactcgctctctgccaatgatttttttaatatcgaggttcggaccaggactgatggagccaagtatgcagaactcatagtggtcagagagttagatcgggagctgaagtcaagctacgagcttcagctcactgcctcagacatgggagtacctcagaggtctggctcatccatactaaaaataagcatttcagactccaatgacaacagccctgcttttgagcagcaatcttatataatacaactcttagaaaactccccggttggcactttgctcttagatctgaatgccacggatccagatgagggcgctaatgggaaaattgtatattccttcagcagtcatgtgtctcccaaaattatggagacttttaaaattgattctgaaagaggacatttgactcttttcaagcaagtggattatgaaatcaccaaatcctatgagattgatgttcaggctcaagatttgggtccaaattcaatcccagcccattgcaaaattataattaaggttgtggatgttaatgacaataaacctgaaattaacatcaacctcatgtcccctggaaaagaagaaatatcttatatttttgaaggggatcctattgatacatttgttgctttggtcagagttcaggacaaggattctgggctgaatggagaaatagtttgtaagcttcatggacatggtcactttaaacttcagaagacatatgaaaacaattatttaatcttaactaatgccacactggatagagaaaagagatctgagtatagtttgactgtaatcgctgaggacagggggacacccagtctctctacagtgaaacattttacagttcaaatcaatgatatcaatgacaatccaccccacttccagagaagccgatatgaatttgtaatttcagaaaataactcaccaggggcatatatcaccactgttacagccacagatcctgatcttggagaaaatgggcaagtgacatacaccatcttggagagttttattctaggaagttccataactacatatgtaaccattgacccatctaatggagccatctatgccctcagaatctttgatcatgaagaagtgagtcagatcacttttgtggtagaagcaagagatggaggaagcccgaagcaactggtaagcaataccacagttgtgctcaccatcattgacgaaaatgacaacgttcctgtggttatagggcctgcattgcgtaataatacggcagaaatcaccattcccaaaggggctgaaagtggctttcatgtcacaagaataagggcaattgacagagactctggtgtgaatgctgaactcagctgcgccatagtagcaggtaatgaggagaatatcttcataattgatccacgatcatgtgacatccataccaacgttagcatggattctgttccctacacagaatgggagctgtcagttatcattcaggacaaaggcaatcctcagctacataccaaagtccttctgaagtgcatgatctttgaatatgcagagtcggtgacaagtacagcaatgacttcagtaagccaggcatccttggatgtctccatgataataattatttccttaggagcaatttgtgcagtgttgctggttattatggtgctatttgcaactaggtgtaaccgcgagaagaaagacactagatcctataactgcagggtggccgaatcaacttaccagcaccacccaaaaaggccatcccggcagattcacaaaggggacatcacattggtgcctaccataaatggcactctgcccatcagatctcatcacagatcgtctccatcttcatctcctaccttagaaagagggcagatgggcagccggcagagtcacaacagtcaccagtcactcaacagtttggtgacaatctcatcaaaccacgtgccagagaatttctcattagaactcacccacgccactcctgctgttgagcaggtctctcagcttctttcaatgcttcaccaggggcaatatcagccaagaccaagttttcgaggaaacaaatattccaggagctacagatatgcccttcaagacatggacaaatttagcttgaaagacagtggccgtggtgacagtgaggcaggagacagtgattatgatttggggcgagattctccaatagataggctgttgggtgaaggattcagcgacctgtttctcacagatggaagaattccagcagctatgagactctgcacggaggagtgcagggtcctgggacactctgaccagtgctggatgccaccactgccctcaccgtcttctgattataggagtaacatgttcattccaggggaagaattcccaacgcaaccccagcagcagcatccacatcagagtcttgaggatgacgctcagcctgcagattccggtgaaaagaagaagagtttttccacctttggaaaggactccccaaacgatgaggacactggggataccagcacatcatctctgctctcggaaatgagcagtgtgttccagcgtctcttaccgccttccctggacacctattctgaatgcagtgaggtggatcggtccaactccctggagcgcaggaagggacccttgccagccaaaactgtgggttacccacagggggtagcggcatgggcagccagtacgcattttcaaaatcccaccaccaactgtgggccgccacttggaactcactccagtgtgcagccttcttcaaaatggctgccagccatggaggagatccctgaaaattatgaggaagatgattttgacaatgtgctcaaccacctcaatgatgggaaacacgaactcatggatgccagtgaactggtggcagagattaacaaactgcttcaagatgtccgccagagctaggagattttagcgaagcatttttgtttccatgtatatggaaatagggaacaacaacaacaacaaaaaaccctgaaagaactggcattgccaaatagttgcatttatcataaatgtgtctgtgtatattgaatattaaatactgtattttcgtatgtacacaatgcaagtgtgattattttaatctgtattttaaaaatacatttgtaccttatatttatgtgtaatttaacaaacaaattttatttttttactcccatgacagacatgtttttcctagtcgtgtagaaactagccactgttcaaatctgatacactattcaaccacaaagtgtaaaggcactgcttagattagttttgttggggaagaattattatgttgtatgaacaaccccactgaagcattatacaattcttaattccattaagtgatcccactttttttcaataactttttagaaattaagaatcattaaaattgttaagctattttattgttattttctctactttctactagccccaatagttgaactcttataggaaaatcgaaagataaagtgaaagtttatttcaggactgagaaatatcttgaaggttatttattagatgactatctcaaatgaactttttatagacaatgatgaaaacagaattaaagtcaatgtttcctgactcccaggcccctactattccaggccatcacactggcctgttccggagaatatttctctcacaatattattatctacttataattatggtaaacaataaattttattccatccttgtagtatgaaacatgctccaaggaaatggaatctgtcctttaaatggataacagtatgtgttctaatggcataaaatattactggataaaaacagttgtgtcagtgtctctcctaaggtagtaaatataattgacttattctgaacccattctattttgaatctcccctttcctctcacaatacttgaacattttaatcttttggaatattgtctttctttgttataactattcatttttagcttttgtctccagtgcatgatctcatatttttgcttttatttttagtataagaacatttataaaatcatatttttgttactgcaattgttttatttgttgtgtggcaaatgagaaatcctttatttattgtgctgtgatctctctgtgtggaatgccttggtgagagagatgcttattatgactattatcatttctgaccaagcttctattaatgttatttctaataatacactatcttgattgtactctccagaaaatttttctgtcagtgaaaataaaagaaaaattaaagtaaagctaaggaactgtctataagtcagagtcctgttcctacatatttgttcaaaagcttggcatgcagcaggcccttcctgagcgggtgattcagtgttgagtttcaaataataaacaggcagcattcagttggctgggcgaacaagaaaaacacaatggaaaaggaatgagtttgagacttgtaatgggaatgaaagtagtaagccatattccagctaaataagttaaatgcatttggggaataaagaaaaaagagtaagcaagcaataattgcttgaatatttttcaaattacaacaaaaaaaaatactttcttaggacattttgtattaaattgtgcaggataaaaaggtatccttacaatgtttccaggaggcaagaatattatcgtccctggcttgctagtcaggaattgaaacactgggaaagttaagtaactgaaaagtgactaaaattcagatatttgaattctcaaatgagtaccacattaaatagaatatattacctctttcaacaggcacattttcctttataggagagattgcaattacaagtgaaatttcagtatatttttcagtagattacacacacaaacgctaaccatatttaaatgcattctgcctttcaacttcacttcctttcagtatatattaccattaagaaaaagacttttatatcctcactgttcttaatttaaagcaccagcagtaatatgggaagctatgctgaaaaccgctattttgaataatgtgaaataaataaaatgcaatatttcattcaacacaaaa

SEQ ID NO: 24824 - DNA, 5887 bp, Homo sapiens
  source 1..5887: mol_type = unassigned DNA
agtctgcagccgagcagctaaagggagaaagaatcgctcaggaaagacacactgcagactccaccggcaccctgcaatagatggattccgactacacaagggagaaaacgcggaggtgacactctcctgcctggaaagaggacgaacgaccaaacaaacgcaaggactggactccatgccgaaggtatctggaagtcgtgacacggtgtgtataaaacaaaagtttgcgagctgttaattgctgtgctgtgttattaagagacgctttcaagtttcaagtaccaaatgtagctttacgttgccaaaggaagttgaggcaattgctttgctgttttaacttgctctgtgagggaaatctcataaactgaccaatgcaccaaatgaatgctaaaatgcactttaggtttgtttttgcacttctgatagtatctttcaaccacgatgtactgggcaagaatttgaaatacaggatttatgaggaacagagggttggatcagtaattgcaagactatcagaggatgtggctgatgttttattgaagcttcctaatccttctactgttcgatttcgagccatgcagaggggaaattctcctctacttgtagtaaacgaggataatggggaaatcagcataggggctacaattgaccgtgaacaactgtgccagaaaaacttgaactgttccatagagtttgatgtgatcactctacccacagagcatctgcagcttttccatattgaagttgaagtgctggatattaatgacaattctccccagttttcaagatctctcatacctattgagatatctgagagtgcagcagttgggactcgcattcccctggacagtgcatttgatccagatgttggggaaaattccctccacacatactcgctctctgccaatgatttttttaatatcgaggttcggaccaggactgatggagccaagtatgcagaactcatagtggtcagagagttagatcgggagctgaagtcaagctacgagcttcagctcactgcctcagacatgggagtacctcagaggtctggctcatccatactaaaaataagcatttcagactccaatgacaacagccctgcttttgagcagcaatcttatataatacaactcttagaaaactccccggttggcactttgctcttagatctgaatgccacggatccagatgagggcgctaatgggaaaattgtatattccttcagcagtcatgtgtctcccaaaattatggagacttttaaaattgattctgaaagaggacatttgactcttttcaagcaagtggattatgaaatcaccaaatcctatgagattgatgttcaggctcaagatttgggtccaaattcaatcccagcccattgcaaaattataattaaggttgtggatgttaatgacaataaacctgaaattaacatcaacctcatgtcccctggaaaagaagaaatatcttatatttttgaaggggatcctattgatacatttgttgctttggtcagagttcaggacaaggattctgggctgaatggagaaatagtttgtaagcttcatggacatggtcactttaaacttcagaagacatatgaaaacaattatttaatcttaactaatgccacactggatagagaaaagagatctgagtatagtttgactgtaatcgctgaggacagggggacacccagtctctctacagtgaaacattttacagttcaaatcaatgatatcaatgacaatccaccccacttccagagaagccgatatgaatttgtaatttcagaaaataactcaccaggggcatatatcaccactgttacagccacagatcctgatcttggagaaaatgggcaagtgacatacaccatcttggagagttttattctaggaagttccataactacatatgtaaccattgacccatctaatggagccatctatgccctcagaatctttgatcatgaagaagtgagtcagatcacttttgtggtagaagcaagagatggaggaagcccgaagcaactggtaagcaataccacagttgtgctcaccatcattgacgaaaatgacaacgttcctgtggttatagggcctgcattgcgtaataatacggcagaaatcaccattcccaaaggggctgaaagtggctttcatgtcacaagaataagggcaattgacagagactctggtgtgaatgctgaactcagctgcgccatagtagcaggtaatgaggagaatatcttcataattgatccacgatcatgtgacatccataccaacgttagcatggattctgttccctacacagaatgggagctgtcagttatcattcaggacaaaggcaatcctcagctacataccaaagtccttctgaagtgcatgatctttgaatatgcagagtcggtgacaagtacagcaatgacttcagtaagccaggcatccttggatgtctccatgataataattatttccttaggagcaatttgtgcagtgttgctggttattatggtgctatttgcaactaggtgtaaccgcgagaagaaagacactagatcctataactgcagggtggccgaatcaacttaccagcaccacccaaaaaggccatcccggcagattcacaaaggggacatcacattggtgcctaccataaatggcactctgcccatcagatctcatcacagatcgtctccatcttcatctcctaccttagaaagagggcagatgggcagccggcagagtcacaacagtcaccagtcactcaacagtttggtgacaatctcatcaaaccacgtgccagagaatttctcattagaactcacccacgccactcctgctgttgaggtctctcagcttctttcaatgcttcaccaggggcaatatcagccaagaccaagttttcgaggaaacaaatattccaggagctacagatatgcccttcaagacatggacaaatttagcttgaaagacagtggccgtggtgacagtgaggcaggagacagtgattatgatttggggcgagattctccaatagataggctgttgggtgaaggattcagcgacctgtttctcacagatggaagaattccagcagctatgagactctgcacggaggagtgcagggtcctgggacactctgaccagtgctggatgccaccactgccctcaccgtcttctgattataggagtaacatgttcattccaggggaagaattcccaacgcaaccccagcagcagcatccacatcagagtcttgaggatgacgctcagcctgcagattccggtgaaaagaagaagagtttttccacctttggaaaggactccccaaacgatgaggacactggggataccagcacatcatctctgctctcggaaatgagcagtgtgttccagcgtctcttaccgccttccctggacacctattctgaatgcagtgaggtggatcggtccaactccctggagcgcaggaagggacccttgccagccaaaactgtgggttacccacagggggtagcggcatgggcagccagtacgcattttcaaaatcccaccaccaactgtgggccgccacttggaactcactccagtgtgcagccttcttcaaaatggctgccagccatggaggagatccctgaaaattatgaggaagatgattttgacaatgtgctcaaccacctcaatgatgggaaacacgaactcatggatgccagtgaactggtggcagagattaacaaactgcttcaagatgtccgccagagctaggagattttagcgaagcatttttgtttccatgtatatggaaatagggaacaacaacaacaacaaaaaaccctgaaagaactggcattgccaaatagttgcatttatcataaatgtgtctgtgtatattgaatattaaatactgtattttcgtatgtacacaatgcaagtgtgattattttaatctgtattttaaaaatacatttgtaccttatatttatgtgtaatttaacaaacaaattttatttttttactcccatgacagacatgtttttcctagtcgtgtagaaactagccactgttcaaatctgatacactattcaaccacaaagtgtaaaggcactgcttagattagttttgttggggaagaattattatgttgtatgaacaaccccactgaagcattatacaattcttaattccattaagtgatcccactttttttcaataactttttagaaattaagaatcattaaaattgttaagctattttattgttattttctctactttctactagccccaatagttgaactcttataggaaaatcgaaagataaagtgaaagtttatttcaggactgagaaatatcttgaaggttatttattagatgactatctcaaatgaactttttatagacaatgatgaaaacagaattaaagtcaatgtttcctgactcccaggcccctactattccaggccatcacactggcctgttccggagaatatttctctcacaatattattatctacttataattatggtaaacaataaattttattccatccttgtagtatgaaacatgctccaaggaaatggaatctgtcctttaaatggataacagtatgtgttctaatggcataaaatattactggataaaaacagttgtgtcagtgtctctcctaaggtagtaaatataattgacttattctgaacccattctattttgaatctcccctttcctctcacaatacttgaacattttaatcttttggaatattgtctttctttgttataactattcatttttagcttttgtctccagtgcatgatctcatatttttgcttttatttttagtataagaacatttataaaatcatatttttgttactgcaattgttttatttgttgtgtggcaaatgagaaatcctttatttattgtgctgtgatctctctgtgtggaatgccttggtgagagagatgcttattatgactattatcatttctgaccaagcttctattaatgttatttctaataatacactatcttgattgtactctccagaaaatttttctgtcagtgaaaataaaagaaaaattaaagtaaagctaaggaactgtctataagtcagagtcctgttcctacatatttgttcaaaagcttggcatgcagcaggcccttcctgagcgggtgattcagtgttgagtttcaaataataaacaggcagcattcagttggctgggcgaacaagaaaaacacaatggaaaaggaatgagtttgagacttgtaatgggaatgaaagtagtaagccatattccagctaaataagttaaatgcatttggggaataaagaaaaaagagtaagcaagcaataattgcttgaatatttttcaaattacaacaaaaaaaaatactttcttaggacattttgtattaaattgtgcaggataaaaaggtatccttacaatgtttccaggaggcaagaatattatcgtccctggcttgctagtcaggaattgaaacactgggaaagttaagtaactgaaaagtgactaaaattcagatatttgaattctcaaatgagtaccacattaaatagaatatattacctctttcaacaggcacattttcctttataggagagattgcaattacaagtgaaatttcagtatatttttcagtagattacacacacaaacgctaaccatatttaaatgcattctgcctttcaacttcacttcctttcagtatatattaccattaagaaaaagacttttatatcctcactgttcttaatttaaagcaccagcagtaatatgggaagctatgctgaaaaccgctattttgaataatgtgaaataaataaaatgcaatatttcattcaacacaaaa

SEQ ID NO: 24825 - DNA, 9613 bp, Homo sapiens
  source 1..9613: mol_type = unassigned DNA
agtagtttgcggcatccggaggagcagcagcagcagtagcggcggcggctggcgcagcgcggagacggacgagcgggcacagacggcagcacagctcccgtgcaccatgcctggcttgcccgggaggcactggcacccgcgtccctagcccggcgctggcccttggcgcgttgcgctccgcagcattccggctgagcgatttcatccgaaatcctaaacctcctaccccaaacccattgcctcctgcttgctcatactccacactcacactccccacaccacacactcactcttcctctctctctcacacattcacacacagcccgagacagacagagaaagcgagacagacctcccgagtgcgcgagcgcccgggaggaagggagcccaacgcagcgcggccagcgcctctccgggaagatgaaatcaagacgctcctgcaagtaaacttcggcggcgacaaaatcgtcgactgtggcagctgctgaggcggaccccagcgacgtgcaactgagctaggagggcttcctcccgcggcggcggcggcggcggcggcggcggcggaccttggagcgacaccccagcccaaacggagagaagagaagcacccggtacccacggcggcggccccgcctctcctggccggtactgttgttgcctccccttccctcttccccattccccgccacccccggccattagaaagaccggggctttgattttcttggacaaattgccatctccccgtttccacaaacttgacgtggagggtcggactgcgttgttaactttgatttcctagacgaaaacgcccgcagaccctcaactgctctgtggggggaactccgctcccacctcggatcctggacagacgcgcccccaagcccttcgaagccagccttagcgcgagggagcgcgctcaagctctggcagcctctctcccctcccccttcctctgctggccccgggaccgccatccgactcaaccctataaccgggtgcccgcggcgcttgccagtaactgactcccgtctgcgacaccccctttctcccgaacaggcctcgaagaggccagtgtggcccccccagaccccggagggcgcattccaagcgggtactctctccgcagtgaactgggagcgctggggggaggtctttgcgcatgccaggtgcacagacagcgagttcgccagcctcagtgccggtgcaccgcggcgggccgggcagtgcctgaaaggctgcgcctcctccgccctctttaccttcgcctcaagtactgtccggactcagcggtgcgtcctccaggccgcgcagacgccgcccgacccgcagccctgggcggctgccgacagtcgcgcccggctaactttgaaggggtaaaactgagtagccgggctggagggagggggctcggggccgcgcggcgctcccttggcccctcggagcccccggggcccccgcgagcccccgccgcgtccgccgcaacctcagcattggagccgccgcgggtgtcccccgcgcgccgccgggccgccctgggcgggacttctcccgcggcctccggggccacggggcgcgcgcaacaggcggcccgagccggcgggaagctggagcgccgacggcgtcggtctcggaggggtgtggagaggcgaggccaggcagagccccgtgcagccatggagtcgctcctgctgccggtgctgctgctgctggccatactgtggacgcaggctgccgccctcattaatctcaagtactcggtagaagaggagcagcgcgccgggacggtgattgccaacgtggccaaagacgcgcgagaggcgggcttcgcgctggacccccggcaggcttcagcctttcgcgtggtgtccaactcggctccacacctagtggacatcaatcccagctctggcctgctggtcaccaagcagaagattgaccgtgatctgctgtgccgccagagccccaagtgcatcatctcgctcgaggtcatgtccagctcaatggaaatctgcgtgataaaggtggagatcaaggacctgaacgacaatgcgcccagtttcccggcagcacagatcgagctggagatctcggaggcagccagccctggcacgcgcatcccgctggacagcgcttacgatccagactcaggaagctttggcgtgcagacttacgagctcacgcccaacgagctgttcggcctggagatcaagacgcgcggcgacggctcccgctttgccgaactcgtggtggaaaagagcctggaccgcgagacgcagtcgcactacagcttccgaatcactgcgctagacggtggcgacccgccgcgcctgggcaccgttggccttagtatcaaggtgaccgactccaatgacaacaacccggtgtttagcgagtccacctacgcggtgagcgtgccagaaaactcgcctcccaacacacccgtcatccgcctcaacgccagcgatccagacgagggcaccaacggccaggtggtctactccttctatggctacgtcaacgaccgcacgcgcgagctctttcagatcgacccgcacagtggcctggtcactgtcactggcgctttagactacgaagaggggcacgtgtacgaactggacgtgcaggctaaggacttggggcccaattccatcccggcacactgcaaggtcaccgtcagcgtgctggacaccaatgacaatccgccggtcatcaacctgctgtcagtcaacagtgagcttgtggaggtcagcgagagcgcccccccgggctacgtgatcgccttggtgcgggtgtctgatcgcgactcaggcctcaatggacgtgtgcagtgccgtttgctgggcaatgtgccctttcgactgcaggaatatgagagcttctccactattctggtggacggacggctggaccgcgagcagcacgaccaatacaacctcacaattcaggcacgcgacggcggcgtgcccatgctgcagagtgccaagtcctttaccgtgctcatcactgacgaaaatgacaaccacccgcacttttccaagccctactaccaggtcattgtgcaggagaacaacacgcctggcgcctatctgctctctgtgtctgctcgcgaccccgacctgggtctcaacggcagtgtctcctaccagatcgtgccgtcgcaggtgcgggacatgcctgtcttcacctatgtctccatcaatcccaactcaggcgacatctacgcgctgcgatcctttaaccacgagcagaccaaggcgttcgaattcaaggtgctggccaaggacggcggccttccctcactgcaaagcaacgctacggtgcgggtcatcatcctcgacgtcaacgacaacaccccggtcatcacagccccacctctgattaacggcactgccgaggtctacataccccgcaactctggcataggctacctggtgactgttgtcaaggcagaagactacgatgagggcgaaaatggccgagtcacctacgacatgaccgagggcgaccgcggcttctttgaaatagaccaggtcaatggcgaagtcagaaccacccgcaccttcggggagagctccaagtcctcctatgagcttatcgtggtggctcacgaccacggcaagacatctctctctgcctctgctctcgtcctaatctacttgtcccctgctctcgatgcccaagagtcaatgggctctgtgaacttgtccttgattttcattattgccctgggctccattgcgggcatcctctttgtaactatgatcttcgtggcaatcaagtgcaagcgagacaacaaagagatccggacctacaactgcagaattgctgagtactcctatgggcatcaaaagaaatcaagcaagaagaaaaaaatcagtaagaatgacatccgcctggtaccccgggatgtggaggagacagacaagatgaacgttgtcagttgctcttccctgacctcctccctcaactattttgactaccaccagcagacgctgcccctgggctgccgccgctctgagagcactttcctgaatgtggagaaccagaatacccgcaacaccagtgctaaccacatctaccatcactctttcaacagccaggggccccagcagcctgacctgattatcaacggtgtgcctctgcctgagactgaaaactattcttttgactccaactacgtgaatagccgagcccatttaatcaagagcagctccaccttcaaggacttagagggcaacagcctgaaggatagtggacatgaggagagtgaccaaactgacagtgagcatgatgtccagcggagcctgtattgtgatactgctgtcaacgatgtgctgaacaccagtgtgacctccatgggatctcagatgcctgatcatgatcagaatgaaggatttcattgccgggaagaatgccggattcttggccactctgacaggtgctggatgccccggaaccccatgcccatccgttccaagtcccctgagcatgtgaggaacatcatcgcgctgtctattgaagctactgctgctgatgtcgaggcttatgacgactgcggccccaccaaacggactttcgcaacctttgggaaagatgtcagcgaccacccggctgaggagaggcctaccctgaaaggcaagaggactgtcgatgtgaccatctgcagccccaaggtcaacagcgttatccgggaggcaggcaatggctgtgaggcgattagccctgtcacctcccccctccacctcaagagctctctgcccaccaagccttccgtgtcttacaccattgccctggctcccccagcccgtgatctggagcagtatgtcaacaatgtcaacaatggccctactcgtccctctgaagctgagccccgtggagctgatagcgagaaagtcatgcatgaggtcagccccattctgaaggaaggtcgcaacaaagagtcccctggtgtgaagcgtctgaaggatatcgttctctaaaccagtctccaggaagaagagaaagaaaccacactggctagtgaagaagcaggagcttcttgttttaattgctcaccaatggttggttcttgagtggctatatttcagagcttttcctaaatgtattgtttataggtgattatcattctgtgacagtcccttgtttcaacaggcagcaggggtgttcagttggagcaaattagctttggcttgagttgttcatggggccttgatgttggggaaacagagacaaattcagttgtgaaaagtattatgtattaagtgtttgaatttatatatttttctatgtcaaaattataatataaattaccattgtttgtggaggattacatttaaaaaagcaaaaagtgaaaaaaaaaagctctggacacctttaataagctcgccactgttttttgtagtgtagacaagttaatggtcatttattgtgtactattcattgattcagtgatgtgaaattgagcccccaaaaggttgtttctgaagctcgagtacttcccaatgccgctactttgctgtggacacccctgctttaaaaacccttttgctagctgtgctattgttgtatttgatattgcaaattgctatgtgtgtggtgatggcaaaaggcttttaaaagttggtgttttctttttcttaaaaaaataataaaactacagacaaaaacaaagtgcaaacaactgagacagcaaatgaatgagcaacaccatgcatatagattgagtacttggagaatactcacgttttttaactcatgtagtgattgctcaccactttgcaaagtatttttcctgcctttcagtggtctgcccaggtccatgatagatcattgcagaaagtcatttttggataggctgctatctaatttgcagttgtcagaaatactgtgctgaaagttttatgacatccatcttttaaattttcaggccctgaacaggaaagttgctcctgaagttatgtttccaggcttagaaattccctctctccaatcatctaaaattgaagatgactgaatctattttaagatctaaattagcatctcttcagacacacacttcctgattcagtgtttcccaatcatgattagaattagactgcaaagcacgtcatgggctgggattgagaactccatgttgctctgtatcttaggcttatatacgtagggatagagtaagcagtacaaagtgtatattttggaaaagacaggtaacaggtaacagcatcgctaatccaattactgtgccttctaaacggagacactcagacacttgaactcatctttttatgactaatagttttttgattaaaaatgtgaacaagaaaatactaaaataaaaatcctttcgatttagccaactctttttgctgtaggctaggaatacaccctttttaaattaacacactgtagatcctttttttctgttttaacattcctctaactcccccatttatcttttgtctattaatattcactagccaacatagtatttttgcagcctaagagttcattatttaaaaataaactaaagaaatatgtcacctttgttctgccttggtcttaagagagttgtttctagagaaacaagttttatggttctgttttcatttgtttcattttttgaaattcaggaatacacagagagaaggcctagaggttagagcactagaatgcaaaagaggatttattttcttaagtttaggtagataagtcagctcttttgaatgttttacttatttttgcctgagttcctagctttacgcattactaggaatattttcttttacaggagggagaagggttttgagggagggggtgggtaaggcagtagggatggggttaggtaggggagaacatttctgaaaaagaacttataatgaagctacaaatccatccttatttcttattcagtgctgaatactacctcatgcaaaatattggtgtggctgcaaatttccctctgaagctgacacaattaaggatgaattaccataacatcttcatttttcctcatttcattgcctctcatacagttttctccctctgatttatttcattttggtagtggattttgaattaagtatttatttctctttgcaagtgactatttgattaacacattaaaaattttttaaaaatttcccctttaagttatgatggctgcctatagaatttagactgtttctcaccctgatccatcctgatattatgttattagctacgatttcaaggtcactttgaagtcagacttcacagttttctacaggtgtatttcttgctatgctcagtgggaaccagggagcagaaaagattgtggaaagtgggaacattaattgtcacgtggctgttgagccagagaggccactggctgccatgcctcttaccagccaagttttaaatggttagagtggcattggcattgattttgcttttctcttgggttttcttcatttcttttcataattcatcttcaagctatagatccatccttcttccctatccaaatactttgttctcagtgggcagtcagatttttttggcttccaaacctcactgagcatgttcagagaattcctctcattaaggaaatatttttccccacaattgtctgatgtatgagtcctctcagaagcacaagtgcatactaggaaggctttgtaaactggttttgtaggcaggctgtacctgcaaataggcattctgagcaaggatcctaaatttccctttggctcatgtcccccccgccccaccccaccttctcctttttggcatgtctggtgaaaagctacaaggttcacagggccaaatattctcccttttgttctctaaacatgttgcacacataaactcaagggagtgatttcggttcctaagtcctagggagttctattccatttattctgatgtcccttttaaggaggagttggtgttgaagtgtgacatgctttaatgataactgctttggcaattccccagacaggtatacttcttcatccaaaattgcacctaaggtgttcatttagacaaaattgttcgcttagtgatccactgatctctaatcagaaatatttttaaaaaatacaatttagatctctgaaaattggaaccactcaagagtatcatcttgatagtgttacttcagcatatgactgactgattttatgaagggagtttagctgacttttccctgtagccctatcatattaaaaacaaaaagtggtccacttgaagcagcaaggacaaagggcagtttagggagaggcagggtgaaggggatagctcgattgggcatccagagtggaaaaggattattattgtacataatagcagttctggctggaattccaatccactttctggggatcattttgatgttgaatgttcccccaaagcattctgacaagtttggtccacttggctctttaccccgggtaataagacccttattgactttgaaaaactggcataaatgagcttaagaaatccattgtatacagtcctagtgtttgccttcttggtaaaattacatttaaggatgtcatttcatgagtcaaattgtatctgctgacactgaagtgtattgagatgttgttctttagtttaagtatgtaacaaagtaatattcaaaggggatgtttgggggtggggctgggaccgggtggctttatattgataatgaaatattccagagcaaaacacattgtcctaatgaagttgttgcagctctcttcgttttcttgtgccgctggaattggcttgtgggtcacttgttgtgcaaaagtgaattaatttcaaataggaatcatattgcttttgtgaaacaaagaaaatttaccaccttgtctgatacatagattggaaggcgctcttggtaaagaataacccacaaacacctgatcttgattggaaagcattgtaggtcattagggaaaactgatgatgctgactgttgctccagctgtgttggcaattcaagatgaccttgttactaactgaaagttgctgtcaaccttagcaaacaaaccagctaacaccattacagcactggttaagtagatttttactggcactggctggcgttcagctgaggaaggctaggatacagactttaatgaccaagagccagactagctcgagctagaaatcagcaacaaatacctccttgtgctatttgaatgctaaggtattagttgcaataggcttacgccttcgctcctctagtgaggggaatgagcctgatgacactattactgtttacctgtcaaaccagggtggaaatttagagggatgcaagtacagtatgtctcattaagcagtctctgttgctgattatatgaagataaaattgttgtatatgctgatctgtatgttatgtacattttcacagtgattgaatcattgtaaaaagaaaaaagacaaaaaagaatcaccactgtctattttatgaagatgataaagcagctttattaaattattacagttatgtttcaaatggtgttatctgccacattgtttccttttatctggtggttctctgtttccccctttaaatgtgttttctctgcttcaaaaatttaatgcattttagtattaaaggctattatggaaaaag

SEQ ID NO: 24826 - DNA, 9756 bp, Homo sapiens
  source 1..9756: mol_type = unassigned DNA
agtagtttgcggcatccggaggagcagcagcagcagtagcggcggcggctggcgcagcgcggagacggacgagcgggcacagacggcagcacagctcccgtgcaccatgcctggcttgcccgggaggcactggcacccgcgtccctagcccggcgctggcccttggcgcgttgcgctccgcagcattccggctgagcgatttcatccgaaatcctaaacctcctaccccaaacccattgcctcctgcttgctcatactccacactcacactccccacaccacacactcactcttcctctctctctcacacattcacacacagcccgagacagacagagaaagcgagacagacctcccgagtgcgcgagcgcccgggaggaagggagcccaacgcagcgcggccagcgcctctccgggaagatgaaatcaagacgctcctgcaagtaaacttcggcggcgacaaaatcgtcgactgtggcagctgctgaggcggaccccagcgacgtgcaactgagctaggagggcttcctcccgcggcggcggcggcggcggcggcggcggcggaccttggagcgacaccccagcccaaacggagagaagagaagcacccggtacccacggcggcggccccgcctctcctggccggtactgttgttgcctccccttccctcttccccattccccgccacccccggccattagaaagaccggggctttgattttcttggacaaattgccatctccccgtttccacaaacttgacgtggagggtcggactgcgttgttaactttgatttcctagacgaaaacgcccgcagaccctcaactgctctgtggggggaactccgctcccacctcggatcctggacagacgcgcccccaagcccttcgaagccagccttagcgcgagggagcgcgctcaagctctggcagcctctctcccctcccccttcctctgctggccccgggaccgccatccgactcaaccctataaccgggtgcccgcggcgcttgccagtaactgactcccgtctgcgacaccccctttctcccgaacaggcctcgaagaggccagtgtggcccccccagaccccggagggcgcattccaagcgggtactctctccgcagtgaactgggagcgctggggggaggtctttgcgcatgccaggtgcacagacagcgagttcgccagcctcagtgccggtgcaccgcggcgggccgggcagtgcctgaaaggctgcgcctcctccgccctctttaccttcgcctcaagtactgtccggactcagcggtgcgtcctccaggccgcgcagacgccgcccgacccgcagccctgggcggctgccgacagtcgcgcccggctaactttgaaggggtaaaactgagtagccgggctggagggagggggctcggggccgcgcggcgctcccttggcccctcggagcccccggggcccccgcgagcccccgccgcgtccgccgcaacctcagcattggagccgccgcgggtgtcccccgcgcgccgccgggccgccctgggcgggacttctcccgcggcctccggggccacggggcgcgcgcaacaggcggcccgagccggcgggaagctggagcgccgacggcgtcggtctcggaggggtgtggagaggcgaggccaggcagagccccgtgcagccatggagtcgctcctgctgccggtgctgctgctgctggccatactgtggacgcaggctgccgccctcattaatctcaagtactcggtagaagaggagcagcgcgccgggacggtgattgccaacgtggccaaagacgcgcgagaggcgggcttcgcgctggacccccggcaggcttcagcctttcgcgtggtgtccaactcggctccacacctagtggacatcaatcccagctctggcctgctggtcaccaagcagaagattgaccgtgatctgctgtgccgccagagccccaagtgcatcatctcgctcgaggtcatgtccagctcaatggaaatctgcgtgataaaggtggagatcaaggacctgaacgacaatgcgcccagtttcccggcagcacagatcgagctggagatctcggaggcagccagccctggcacgcgcatcccgctggacagcgcttacgatccagactcaggaagctttggcgtgcagacttacgagctcacgcccaacgagctgttcggcctggagatcaagacgcgcggcgacggctcccgctttgccgaactcgtggtggaaaagagcctggaccgcgagacgcagtcgcactacagcttccgaatcactgcgctagacggtggcgacccgccgcgcctgggcaccgttggccttagtatcaaggtgaccgactccaatgacaacaacccggtgtttagcgagtccacctacgcggtgagcgtgccagaaaactcgcctcccaacacacccgtcatccgcctcaacgccagcgatccagacgagggcaccaacggccaggtggtctactccttctatggctacgtcaacgaccgcacgcgcgagctctttcagatcgacccgcacagtggcctggtcactgtcactggcgctttagactacgaagaggggcacgtgtacgaactggacgtgcaggctaaggacttggggcccaattccatcccggcacactgcaaggtcaccgtcagcgtgctggacaccaatgacaatccgccggtcatcaacctgctgtcagtcaacagtgagcttgtggaggtcagcgagagcgcccccccgggctacgtgatcgccttggtgcgggtgtctgatcgcgactcaggcctcaatggacgtgtgcagtgccgtttgctgggcaatgtgccctttcgactgcaggaatatgagagcttctccactattctggtggacggacggctggaccgcgagcagcacgaccaatacaacctcacaattcaggcacgcgacggcggcgtgcccatgctgcagagtgccaagtcctttaccgtgctcatcactgacgaaaatgacaaccacccgcacttttccaagccctactaccaggtcattgtgcaggagaacaacacgcctggcgcctatctgctctctgtgtctgctcgcgaccccgacctgggtctcaacggcagtgtctcctaccagatcgtgccgtcgcaggtgcgggacatgcctgtcttcacctatgtctccatcaatcccaactcaggcgacatctacgcgctgcgatcctttaaccacgagcagaccaaggcgttcgaattcaaggtgctggccaaggacggcggccttccctcactgcaaagcaacgctacggtgcgggtcatcatcctcgacgtcaacgacaacaccccggtcatcacagccccacctctgattaacggcactgccgaggtctacataccccgcaactctggcataggctacctggtgactgttgtcaaggcagaagactacgatgagggcgaaaatggccgagtcacctacgacatgaccgagggcgaccgcggcttctttgaaatagaccaggtcaatggcgaagtcagaaccacccgcaccttcggggagagctccaagtcctcctatgagcttatcgtggtggctcacgaccacggcaagacatctctctctgcctctgctctcgtcctaatctacttgtcccctgctctcgatgcccaagagtcaatgggctctgtgaacttgtccttgattttcattattgccctgggctccattgcgggcatcctctttgtaactatgatcttcgtggcaatcaagtgcaagcgagacaacaaagagatccggacctacaactgcagtaattgtttaaccatcacttgtctcctcggctgttttataaaaggacaaaacagcaagtgtctgcattgcatctcggtttctcccattagcgaggagcaagacaaaaagacagaggagaaagtgagcctaaggggaaagagaattgctgagtactcctatgggcatcaaaagaaatcaagcaagaagaaaaaaatcagtaagaatgacatccgcctggtaccccgggatgtggaggagacagacaagatgaacgttgtcagttgctcttccctgacctcctccctcaactattttgactaccaccagcagacgctgcccctgggctgccgccgctctgagagcactttcctgaatgtggagaaccagaatacccgcaacaccagtgctaaccacatctaccatcactctttcaacagccaggggccccagcagcctgacctgattatcaacggtgtgcctctgcctgagactgaaaactattcttttgactccaactacgtgaatagccgagcccatttaatcaagagcagctccaccttcaaggacttagagggcaacagcctgaaggatagtggacatgaggagagtgaccaaactgacagtgagcatgatgtccagcggagcctgtattgtgatactgctgtcaacgatgtgctgaacaccagtgtgacctccatgggatctcagatgcctgatcatgatcagaatgaaggatttcattgccgggaagaatgccggattcttggccactctgacaggtgctggatgccccggaaccccatgcccatccgttccaagtcccctgagcatgtgaggaacatcatcgcgctgtctattgaagctactgctgctgatgtcgaggcttatgacgactgcggccccaccaaacggactttcgcaacctttgggaaagatgtcagcgaccacccggctgaggagaggcctaccctgaaaggcaagaggactgtcgatgtgaccatctgcagccccaaggtcaacagcgttatccgggaggcaggcaatggctgtgaggcgattagccctgtcacctcccccctccacctcaagagctctctgcccaccaagccttccgtgtcttacaccattgccctggctcccccagcccgtgatctggagcagtatgtcaacaatgtcaacaatggccctactcgtccctctgaagctgagccccgtggagctgatagcgagaaagtcatgcatgaggtcagccccattctgaaggaaggtcgcaacaaagagtcccctggtgtgaagcgtctgaaggatatcgttctctaaaccagtctccaggaagaagagaaagaaaccacactggctagtgaagaagcaggagcttcttgttttaattgctcaccaatggttggttcttgagtggctatatttcagagcttttcctaaatgtattgtttataggtgattatcattctgtgacagtcccttgtttcaacaggcagcaggggtgttcagttggagcaaattagctttggcttgagttgttcatggggccttgatgttggggaaacagagacaaattcagttgtgaaaagtattatgtattaagtgtttgaatttatatatttttctatgtcaaaattataatataaattaccattgtttgtggaggattacatttaaaaaagcaaaaagtgaaaaaaaaaagctctggacacctttaataagctcgccactgttttttgtagtgtagacaagttaatggtcatttattgtgtactattcattgattcagtgatgtgaaattgagcccccaaaaggttgtttctgaagctcgagtacttcccaatgccgctactttgctgtggacacccctgctttaaaaacccttttgctagctgtgctattgttgtatttgatattgcaaattgctatgtgtgtggtgatggcaaaaggcttttaaaagttggtgttttctttttcttaaaaaaataataaaactacagacaaaaacaaagtgcaaacaactgagacagcaaatgaatgagcaacaccatgcatatagattgagtacttggagaatactcacgttttttaactcatgtagtgattgctcaccactttgcaaagtatttttcctgcctttcagtggtctgcccaggtccatgatagatcattgcagaaagtcatttttggataggctgctatctaatttgcagttgtcagaaatactgtgctgaaagttttatgacatccatcttttaaattttcaggccctgaacaggaaagttgctcctgaagttatgtttccaggcttagaaattccctctctccaatcatctaaaattgaagatgactgaatctattttaagatctaaattagcatctcttcagacacacacttcctgattcagtgtttcccaatcatgattagaattagactgcaaagcacgtcatgggctgggattgagaactccatgttgctctgtatcttaggcttatatacgtagggatagagtaagcagtacaaagtgtatattttggaaaagacaggtaacaggtaacagcatcgctaatccaattactgtgccttctaaacggagacactcagacacttgaactcatctttttatgactaatagttttttgattaaaaatgtgaacaagaaaatactaaaataaaaatcctttcgatttagccaactctttttgctgtaggctaggaatacaccctttttaaattaacacactgtagatcctttttttctgttttaacattcctctaactcccccatttatcttttgtctattaatattcactagccaacatagtatttttgcagcctaagagttcattatttaaaaataaactaaagaaatatgtcacctttgttctgccttggtcttaagagagttgtttctagagaaacaagttttatggttctgttttcatttgtttcattttttgaaattcaggaatacacagagagaaggcctagaggttagagcactagaatgcaaaagaggatttattttcttaagtttaggtagataagtcagctcttttgaatgttttacttatttttgcctgagttcctagctttacgcattactaggaatattttcttttacaggagggagaagggttttgagggagggggtgggtaaggcagtagggatggggttaggtaggggagaacatttctgaaaaagaacttataatgaagctacaaatccatccttatttcttattcagtgctgaatactacctcatgcaaaatattggtgtggctgcaaatttccctctgaagctgacacaattaaggatgaattaccataacatcttcatttttcctcatttcattgcctctcatacagttttctccctctgatttatttcattttggtagtggattttgaattaagtatttatttctctttgcaagtgactatttgattaacacattaaaaattttttaaaaatttcccctttaagttatgatggctgcctatagaatttagactgtttctcaccctgatccatcctgatattatgttattagctacgatttcaaggtcactttgaagtcagacttcacagttttctacaggtgtatttcttgctatgctcagtgggaaccagggagcagaaaagattgtggaaagtgggaacattaattgtcacgtggctgttgagccagagaggccactggctgccatgcctcttaccagccaagttttaaatggttagagtggcattggcattgattttgcttttctcttgggttttcttcatttcttttcataattcatcttcaagctatagatccatccttcttccctatccaaatactttgttctcagtgggcagtcagatttttttggcttccaaacctcactgagcatgttcagagaattcctctcattaaggaaatatttttccccacaattgtctgatgtatgagtcctctcagaagcacaagtgcatactaggaaggctttgtaaactggttttgtaggcaggctgtacctgcaaataggcattctgagcaaggatcctaaatttccctttggctcatgtcccccccgccccaccccaccttctcctttttggcatgtctggtgaaaagctacaaggttcacagggccaaatattctcccttttgttctctaaacatgttgcacacataaactcaagggagtgatttcggttcctaagtcctagggagttctattccatttattctgatgtcccttttaaggaggagttggtgttgaagtgtgacatgctttaatgataactgctttggcaattccccagacaggtatacttcttcatccaaaattgcacctaaggtgttcatttagacaaaattgttcgcttagtgatccactgatctctaatcagaaatatttttaaaaaatacaatttagatctctgaaaattggaaccactcaagagtatcatcttgatagtgttacttcagcatatgactgactgattttatgaagggagtttagctgacttttccctgtagccctatcatattaaaaacaaaaagtggtccacttgaagcagcaaggacaaagggcagtttagggagaggcagggtgaaggggatagctcgattgggcatccagagtggaaaaggattattattgtacataatagcagttctggctggaattccaatccactttctggggatcattttgatgttgaatgttcccccaaagcattctgacaagtttggtccacttggctctttaccccgggtaataagacccttattgactttgaaaaactggcataaatgagcttaagaaatccattgtatacagtcctagtgtttgccttcttggtaaaattacatttaaggatgtcatttcatgagtcaaattgtatctgctgacactgaagtgtattgagatgttgttctttagtttaagtatgtaacaaagtaatattcaaaggggatgtttgggggtggggctgggaccgggtggctttatattgataatgaaatattccagagcaaaacacattgtcctaatgaagttgttgcagctctcttcgttttcttgtgccgctggaattggcttgtgggtcacttgttgtgcaaaagtgaattaatttcaaataggaatcatattgcttttgtgaaacaaagaaaatttaccaccttgtctgatacatagattggaaggcgctcttggtaaagaataacccacaaacacctgatcttgattggaaagcattgtaggtcattagggaaaactgatgatgctgactgttgctccagctgtgttggcaattcaagatgaccttgttactaactgaaagttgctgtcaaccttagcaaacaaaccagctaacaccattacagcactggttaagtagatttttactggcactggctggcgttcagctgaggaaggctaggatacagactttaatgaccaagagccagactagctcgagctagaaatcagcaacaaatacctccttgtgctatttgaatgctaaggtattagttgcaataggcttacgccttcgctcctctagtgaggggaatgagcctgatgacactattactgtttacctgtcaaaccagggtggaaatttagagggatgcaagtacagtatgtctcattaagcagtctctgttgctgattatatgaagataaaattgttgtatatgctgatctgtatgttatgtacattttcacagtgattgaatcattgtaaaaagaaaaaagacaaaaaagaatcaccactgtctattttatgaagatgataaagcagctttattaaattattacagttatgtttcaaatggtgttatctgccacattgtttccttttatctggtggttctctgtttccccctttaaatgtgttttctctgcttcaaaaatttaatgcattttagtattaaaggctattatggaaaaagta

SEQ ID NO: 24827 - DNA, 7936 bp, Homo sapiens
  source 1..7936: mol_type = unassigned DNA
atggagtcgctcctgctgccggtgctgctgctgctggccatactgtggacgcaggctgccgccctcattaatctcaagtactcggtagaagaggagcagcgcgccgggacggtgattgccaacgtggccaaagacgcgcgagaggcgggcttcgcgctggacccccggcaggcttcagcctttcgcgtggtgtccaactcggctccacacctagtggacatcaatcccagctctggcctgctggtcaccaagcagaagattgaccgtgatctgctgtgccgccagagccccaagtgcatcatctcgctcgaggtcatgtccagctcaatggaaatctgcgtgataaaggtggagatcaaggacctgaacgacaatgcgcccagtttcccggcagcacagatcgagctggagatctcggaggcagccagccctggcacgcgcatcccgctggacagcgcttacgatccagactcaggaagctttggcgtgcagacttacgagctcacgcccaacgagctgttcggcctggagatcaagacgcgcggcgacggctcccgctttgccgaactcgtggtggaaaagagcctggaccgcgagacgcagtcgcactacagcttccgaatcactgcgctagacggtggcgacccgccgcgcctgggcaccgttggccttagtatcaaggtgaccgactccaatgacaacaacccggtgtttagcgagtccacctacgcggtgagcgtgccagaaaactcgcctcccaacacacccgtcatccgcctcaacgccagcgatccagacgagggcaccaacggccaggtggtctactccttctatggctacgtcaacgaccgcacgcgcgagctctttcagatcgacccgcacagtggcctggtcactgtcactggcgctttagactacgaagaggggcacgtgtacgaactggacgtgcaggctaaggacttggggcccaattccatcccggcacactgcaaggtcaccgtcagcgtgctggacaccaatgacaatccgccggtcatcaacctgctgtcagtcaacagtgagcttgtggaggtcagcgagagcgcccccccgggctacgtgatcgccttggtgcgggtgtctgatcgcgactcaggcctcaatggacgtgtgcagtgccgtttgctgggcaatgtgccctttcgactgcaggaatatgagagcttctccactattctggtggacggacggctggaccgcgagcagcacgaccaatacaacctcacaattcaggcacgcgacggcggcgtgcccatgctgcagagtgccaagtcctttaccgtgctcatcactgacgaaaatgacaaccacccgcacttttccaagccctactaccaggtcattgtgcaggagaacaacacgcctggcgcctatctgctctctgtgtctgctcgcgaccccgacctgggtctcaacggcagtgtctcctaccagatcgtgccgtcgcaggtgcgggacatgcctgtcttcacctatgtctccatcaatcccaactcaggcgacatctacgcgctgcgatcctttaaccacgagcagaccaaggcgttcgaattcaaggtgctggccaaggacggcggccttccctcactgcaaagcaacgctacggtgcgggtcatcatcctcgacgtcaacgacaacaccccggtcatcacagccccacctctgattaacggcactgccgaggtctacataccccgcaactctggcataggctacctggtgactgttgtcaaggcagaagactacgatgagggcgaaaatggccgagtcacctacgacatgaccgagggcgaccgcggcttctttgaaatagaccaggtcaatggcgaagtcagaaccacccgcaccttcggggagagctccaagtcctcctatgagcttatcgtggtggctcacgaccacggcaagacatctctctctgcctctgctctcgtcctaatctacttgtcccctgctctcgatgcccaagagtcaatgggctctgtgaacttgtccttgattttcattattgccctgggctccattgcgggcatcctctttgtaactatgatcttcgtggcaatcaagtgcaagcgagacaacaaagagatccggacctacaactgcagaattgctgagtactcctatgggcatcaaaagaaatcaagcaagaagaaaaaaatcagtaagaatgacatccgcctggtaccccgggatgtggaggagacagacaagatgaacgttgtcagttgctcttccctgacctcctccctcaactattttgactaccaccagcagacgctgcccctgggctgccgccgctctgagagcactttcctgaatgtggagaaccagaatacccgcaacaccagtgctaaccacatctaccatcactctttcaacagccaggggccccagcagcctgacctgattatcaacggtgtgcctctgcctgagactgaaaactattcttttgactccaactacgtgaatagccgagcccatttaatcaagagctccaccttcaaggacttagagggcaacagcctgaaggatagtggacatgaggagagtgaccaaactgacagtgagcatgatgtccagcggagcctgtattgtgatactgctgtcaacgatgtgctgaacaccagtgtgacctccatgggatctcagatgcctgatcatgatcagaatgaaggatttcattgccgggaagaatgccggattcttggccactctgacaggtgctggatgccccggaaccccatgcccatccgttccaagtcccctgagcatgtgaggaacatcatcgcgctgtctattgaagctactgctgctgatgtcgaggcttatgacgactgcggccccaccaaacggactttcgcaacctttgggaaagatgtcagcgaccacccggctgaggagaggcctaccctgaaaggcaagaggactgtcgatgtgaccatctgcagccccaaggtcaacagcgttatccgggaggcaggcaatggctgtgaggcgattagccctgtcacctcccccctccacctcaagagctctctgcccaccaagccttccgtgtcttacaccattgccctggctcccccagcccgtgatctggagcagtatgtcaacaatgtcaacaatggccctactcgtccctctgaagctgagccccgtggagctgatagcgagaaagtcatgcatgaggtcagccccattctgaaggaaggtcgcaacaaagagtcccctggtgtgaagcgtctgaaggatatcgttctctaaaccagtctccaggaagaagagaaagaaaccacactggctagtgaagaagcaggagcttcttgttttaattgctcaccaatggttggttcttgagtggctatatttcagagcttttcctaaatgtattgtttataggtgattatcattctgtgacagtcccttgtttcaacaggcagcaggggtgttcagttggagcaaattagctttggcttgagttgttcatggggccttgatgttggggaaacagagacaaattcagttgtgaaaagtattatgtattaagtgtttgaatttatatatttttctatgtcaaaattataatataaattaccattgtttgtggaggattacatttaaaaaagcaaaaagtgaaaaaaaaaagctctggacacctttaataagctcgccactgttttttgtagtgtagacaagttaatggtcatttattgtgtactattcattgattcagtgatgtgaaattgagcccccaaaaggttgtttctgaagctcgagtacttcccaatgccgctactttgctgtggacacccctgctttaaaaacccttttgctagctgtgctattgttgtatttgatattgcaaattgctatgtgtgtggtgatggcaaaaggcttttaaaagttggtgttttctttttcttaaaaaaataataaaactacagacaaaaacaaagtgcaaacaactgagacagcaaatgaatgagcaacaccatgcatatagattgagtacttggagaatactcacgttttttaactcatgtagtgattgctcaccactttgcaaagtatttttcctgcctttcagtggtctgcccaggtccatgatagatcattgcagaaagtcatttttggataggctgctatctaatttgcagttgtcagaaatactgtgctgaaagttttatgacatccatcttttaaattttcaggccctgaacaggaaagttgctcctgaagttatgtttccaggcttagaaattccctctctccaatcatctaaaattgaagatgactgaatctattttaagatctaaattagcatctcttcagacacacacttcctgattcagtgtttcccaatcatgattagaattagactgcaaagcacgtcatgggctgggattgagaactccatgttgctctgtatcttaggcttatatacgtagggatagagtaagcagtacaaagtgtatattttggaaaagacaggtaacaggtaacagcatcgctaatccaattactgtgccttctaaacggagacactcagacacttgaactcatctttttatgactaatagttttttgattaaaaatgtgaacaagaaaatactaaaataaaaatcctttcgatttagccaactctttttgctgtaggctaggaatacaccctttttaaattaacacactgtagatcctttttttctgttttaacattcctctaactcccccatttatcttttgtctattaatattcactagccaacatagtatttttgcagcctaagagttcattatttaaaaataaactaaagaaatatgtcacctttgttctgccttggtcttaagagagttgtttctagagaaacaagttttatggttctgttttcatttgtttcattttttgaaattcaggaatacacagagagaaggcctagaggttagagcactagaatgcaaaagaggatttattttcttaagtttaggtagataagtcagctcttttgaatgttttacttatttttgcctgagttcctagctttacgcattactaggaatattttcttttacaggagggagaagggttttgagggagggggtgggtaaggcagtagggatggggttaggtaggggagaacatttctgaaaaagaacttataatgaagctacaaatccatccttatttcttattcagtgctgaatactacctcatgcaaaatattggtgtggctgcaaatttccctctgaagctgacacaattaaggatgaattaccataacatcttcatttttcctcatttcattgcctctcatacagttttctccctctgatttatttcattttggtagtggattttgaattaagtatttatttctctttgcaagtgactatttgattaacacattaaaaattttttaaaaatttcccctttaagttatgatggctgcctatagaatttagactgtttctcaccctgatccatcctgatattatgttattagctacgatttcaaggtcactttgaagtcagacttcacagttttctacaggtgtatttcttgctatgctcagtgggaaccagggagcagaaaagattgtggaaagtgggaacattaattgtcacgtggctgttgagccagagaggccactggctgccatgcctcttaccagccaagttttaaatggttagagtggcattggcattgattttgcttttctcttgggttttcttcatttcttttcataattcatcttcaagctatagatccatccttcttccctatccaaatactttgttctcagtgggcagtcagatttttttggcttccaaacctcactgagcatgttcagagaattcctctcattaaggaaatatttttccccacaattgtctgatgtatgagtcctctcagaagcacaagtgcatactaggaaggctttgtaaactggttttgtaggcaggctgtacctgcaaataggcattctgagcaaggatcctaaatttccctttggctcatgtcccccccgccccaccccaccttctcctttttggcatgtctggtgaaaagctacaaggttcacagggccaaatattctcccttttgttctctaaacatgttgcacacataaactcaagggagtgatttcggttcctaagtcctagggagttctattccatttattctgatgtcccttttaaggaggagttggtgttgaagtgtgacatgctttaatgataactgctttggcaattccccagacaggtatacttcttcatccaaaattgcacctaaggtgttcatttagacaaaattgttcgcttagtgatccactgatctctaatcagaaatatttttaaaaaatacaatttagatctctgaaaattggaaccactcaagagtatcatcttgatagtgttacttcagcatatgactgactgattttatgaagggagtttagctgacttttccctgtagccctatcatattaaaaacaaaaagtggtccacttgaagcagcaaggacaaagggcagtttagggagaggcagggtgaaggggatagctcgattgggcatccagagtggaaaaggattattattgtacataatagcagttctggctggaattccaatccactttctggggatcattttgatgttgaatgttcccccaaagcattctgacaagtttggtccacttggctctttaccccgggtaataagacccttattgactttgaaaaactggcataaatgagcttaagaaatccattgtatacagtcctagtgtttgccttcttggtaaaattacatttaaggatgtcatttcatgagtcaaattgtatctgctgacactgaagtgtattgagatgttgttctttagtttaagtatgtaacaaagtaatattcaaaggggatgtttgggggtggggctgggaccgggtggctttatattgataatgaaatattccagagcaaaacacattgtcctaatgaagttgttgcagctctcttcgttttcttgtgccgctggaattggcttgtgggtcacttgttgtgcaaaagtgaattaatttcaaataggaatcatattgcttttgtgaaacaaagaaaatttaccaccttgtctgatacatagattggaaggcgctcttggtaaagaataacccacaaacacctgatcttgattggaaagcattgtaggtcattagggaaaactgatgatgctgactgttgctccagctgtgttggcaattcaagatgaccttgttactaactgaaagttgctgtcaaccttagcaaacaaaccagctaacaccattacagcactggttaagtagatttttactggcactggctggcgttcagctgaggaaggctaggatacagactttaatgaccaagagccagactagctcgagctagaaatcagcaacaaatacctccttgtgctatttgaatgctaaggtattagttgcaataggcttacgccttcgctcctctagtgaggggaatgagcctgatgacactattactgtttacctgtcaaaccagggtggaaatttagagggatgcaagtacagtatgtctcattaagcagtctctgttgctgattatatgaagataaaattgttgtatatgctgatctgtatgttatgtacattttcacagtgattgaatcattgtaaaaagaaaaaagacaaaaaagaatcaccactgtctattttatgaagatgataaagcagctttattaaattattacagttatgtttcaaatggtgttatctgccacattgtttccttttatctggtggttctctgtttccccctttaaatgtgttttctctgcttcaaaaatttaatgcattttagtattaaaggctattatggaaaaagta

SEQ ID NO: 24828 - DNA, 2942 bp, Homo sapiens
  source 1..2942: mol_type = unassigned DNA
gaatgcgcggccgagggaatgcgcgcagctcacaggccctgggagtgagctggtgcccggcgacctggcacccgcgcctggatatggggcgtctacatcgtcccaggagcagcaccagctacaggaacctgccgcatctgtttctgtttttcctcttcgtgggacccttcagctgccagagcgcaccggtgctgagtggaacccccctctctccttcagcctggcctcccggggactgagtggccagtacgtgaccctagacaaccgctctggggagctgcacacttcagctcaggagatcgacagggaggccctgtgtgttgaagggggtggagggactgcgtggagcggcagcgtttccatctcctcctctccttctgactcttgtcttttgctgctggatgtgcttgtcctgcctcaggaatacttcaggtttgtgaaggtgaagatcgccatcagagacatcaatgacaacgccccgcagttccctgtttcccagatctcggtgtgggtcccggaaaatgcacctgtaaacacccgactggccatagagcatcctgctgtggacccagatgtaggcattaatggggtacagacctatcgcttactggactaccatggtatgttcaccctggacgtggaggagaatgagaatggggagcgcaccccctacctaattgtcatgggtgctttggacagggaaacccaggaccagtatgtgagcatcatcatagctgaggatggtgggtctccaccacttttgggcagtgccactctcaccattggcatcagtgacattaatgacaattgccctctcttcacagactcacaaatcaatgtcactgtgtatgggaatgctacagtgggcaccccaattgcagctgtccaggctgtggataaagacttggggaccaatgctcaaattacttattcttacagtcagaaagttccacaagcatctaaggatttatttcacctggatgaaaacactggagtcattaaacttttcagtaagattggaggaagtgttctggagtcccacaagctcaccatccttgctaatggaccaggctgcatccctgctgtaatcactgctcttgtgtccattattaaagttattttcagaccccctgaaattgtccctcgttacatagcaaacgagatagatggtgtggtttatctgaaagaactggaacccgttaacactcccattgcgtttttcaccataagagatccagaaggtaaatacaaggttaactgctacctggatggtgaagggccgtttaggttatcaccttacaaaccatacaataatgaatatttactagagaccacaaaacctatggactatgagctacagcagttctatgaagtagctgtggtggcttggaactctgagggatttcatgtcaaaagggtcattaaagtgcaacttttagatgacaatgataatgctccaattttccttcaacccttaatagaactaaccatcgaagagaacaactcacccaatgcctttttgactaagctgtatgctacagatgccgacagcgaggagagaggccaagtttcatattttctgggacctgatgctccatcatatttttccttagacagtgtcacaggaattctgacagtttctactcagctggaccgagaagagaaagaaaagtacagatacactgtcagagctgttgactgtgggaagccacccagagaatcagtagccactgtggccctcacagtgttggataaaaatgacaacagtcctcggtttatcaacaaggacttcagcttttttgtgcctgaaaactttccaggctatggtgagattggagtaattagtgtaacagatgctgacgctggacgaaatggatgggtcgccctctctgtggtgaaccagagtgatatttttgtcatagatacaggaaagggtatgctgagggctaaagtctctttggacagagagcagcaaagctcctatactttgtgggttgaagctgttgatgggggtgagcctgccctctcctctacagcaaaaatcacaattctccttctagatatcaatgacaaccctcctcttgttttgtttcctcagtctaatatgtcttatctgttagtactgccttctactctgccaggctccccggttacagaagtctatgctgtcgacaaagacacaggcatgaatgctgtcatagcttacagcatcatagggagaagaggtcctaggcctgagtccttcaggattgaccctaaaactggcaacattactttggaagaggcattgctgcagacagattatgggctccatcgcttactggtgaaagtgagtgatcatggttatcccgagcctctccactccacagtcatggtgaacctatttgtcaatgacactgtcagtaatgagagttacattgagagtcttttaagaaaagaaccagagattaatatagaggagaaagaaccacaaatctcaatagaaccgactcataggaaggtagaatctgtgtcttgtatgcccaccttagtagctctgtctgtaataagcttgggttccatcacactggtcacagggatgggcatatacatctgtttaaggaaaggggaaaagcatcccagggaagatgaaaatttggaagtacagattccactgaaaggaaaaattgacttgcatatgcgagagagaaagccaatggatatttctaatatttgatatttcatggtggaataacacagagaaatgttttaactgactttggatcttcatcacctaaaaaagagtgtgttgatggcagttccaatgaaggacaactaatttataacttgttctatattgtaaatagctgtttacaggtttttaaatttaaattcagaggttataaaatgtgtacagcatttttaagtgaaaattagtactaacagctataggacttgtattt

SEQ ID NO: 24829 - DNA, 6347 bp, Homo sapiens
  source 1..6347: mol_type = unassigned DNA
ataaaatattgcatattgacagcaatatcccagtggctgatttattgataatatctttgaccatttgaattttttttcctattatatataaggaaatacaaactaggtaacaggaagaaatgagaaaaggtagagagagacaatagtgaagactggtggacattggactacaaaagattactgcaggattcttctatgatgctgattacagctttatcttatcaagctttggcattgaagaccatgtgaattcatctccaaccctgggagtgaaataagaactttcttttttgcttctgaaattttaagctctatacggaaacactttttacttaatctgcatgacatcagagaaagggaacaatttgaccaaagaaagaagaaaaagtggattagcagatctcatggactgagagtctccagatggtaggaggtccattcagcagaaatacaaatgagaatacgatgtttctaatgtatttaatttggagaaaaacattttcacattttttcaataagcaaagttaatcacattacattttacctttggtaaaagaatattaattaaattgattatgctcacactagagaacaatataacatatcatagtcaaataacgtttatgtttatattcattattacaagcattaaaaagaaataaatagtgttggcagatattacttaagcaggcagagtctcctatatctggaaatttatcatttatactgctagagttaaggatattttaatagtatttaattaactaaaatttaagagattactgctttcagccatttaaaaattattaattgaacgttgactacctgcttggtctgtgtttaccattatccattaagagcttgttatttaattggggaaatccaagtcaagatacagtaaatacgcaagaaacttatcaaatatttgaataaaaataatggcacccatattttatggtgtatttatagtattgttcctgaaaaaataagaaaaactattaatatccccctccaaaaacacatggaagaaatttcccatttttaaaaattattaatattctcatctaataaatgctatttggaactatcatattggaaataaataaaatacctttaatccaataatgatatcattgaagaaatgagtaccctcatatagttacagtgctattataaataactaaaatttctggaggtatttgttttacatataccagaaagtcttaaaattttacattccagttaaaacatatattcaatatttagtaattcatgctaaattatcataaatatttccaaagatgtcgataaaataagcctcactgaaaatatatttatataaaatattgaacaagtaaaatgttcatatccacattacaaactgatatgaggaaattctattctgtccaaaaatgatacagaatacgtaaagacatgcaaaatgattataacataataaaacataaattagatgatttttaaaatctctaagttcagtaaaaatccagagaaatcaaactgaatgtggataaaggcaccaaaaagtggaatgaataaagtcacgtacatcggactgtgaagaaaaatcatgttttggaaaagctgtccacacaatacaagaatttttaatcgaagaaaaattcactggcaaagaagccactactgcctctaaaataagaccacaaggcaaacacccagagacatttgagcctccaactaggaaactagcagaagctctaccactgcccacagcaaagattcaaaattgggcaacctgtggacttggcatctgactggtgcggcaaggaaggaggctggtaggtaagcgctactgtgcccaaccccgagctgcctcttcgcagtcttcaggagcaagtcccccattccagctcctctggcagagtatggagttacctgcgtccggggcaggaaaccatgaatgtgcccttctgccctcttgcctttctgccactctttgagttcccgtccttaattgaagagccagtgactattggctgaagttcccccagcgatttgcatgaaccgagagggagtgtcttctgccgccctcccttcaagagcgctctgactgcagcctcccagggaatgcgcggccgagggaatgcgcgcagctcacaggccctgggagtgagctggtgcccggcgacctggcacccgcgcctggatatggggcgtctacatcgtcccaggagcagcaccagctacaggaacctgccgcatctgtttctgtttttcctcttcgtgggacccttcagctgcctcgggagttacagccgggccaccgagcttctgtacagcctaaacgagggactacccgcgggggtgctcatcggcagcctggccgaggacctgcggctgctgcccaggtctgcagggaggccggacccgcagtcgcagctgccagagcgcaccggtgctgagtggaacccccctctctccttcagcctggcctcccggggactgagtggccagtacgtgaccctagacaaccgctctggggagctgcacacttcagctcaggagatcgacagggaggccctgtgtgttgaagggggtggagggactgcgtggagcggcagcgtttccatctcctcctctccttctgactcttgtcttttgctgctggatgtgcttgtcctgcctcaggaatacttcaggtttgtgaaggtgaagatcgccatcagagacatcaatgacaacgccccgcagttccctgtttcccagatctcggtgtgggtcccggaaaatgcacctgtaaacacccgactggccatagagcatcctgctgtggacccagatgtaggcattaatggggtacagacctatcgcttactggactaccatggtatgttcaccctggacgtggaggagaatgagaatggggagcgcaccccctacctaattgtcatgggtgctttggacagggaaacccaggaccagtatgtgagcatcatcatagctgaggatggtgggtctccaccacttttgggcagtgccactctcaccattggcatcagtgacattaatgacaattgccctctcttcacagactcacaaatcaatgtcactgtgtatgggaatgctacagtgggcaccccaattgcagctgtccaggctgtggataaagacttggggaccaatgctcaaattacttattcttacagtcagaaagttccacaagcatctaaggatttatttcacctggatgaaaacactggagtcattaaacttttcagtaagattggaggaagtgttctggagtcccacaagctcaccatccttgctaatggaccaggctgcatccctgctgtaatcactgctcttgtgtccattattaaagttattttcagaccccctgaaattgtccctcgttacatagcaaacgagatagatggtgtggtttatctgaaagaactggaacccgttaacactcccattgcgtttttcaccataagagatccagaaggtaaatacaaggttaactgctacctggatggtgaagggccgtttaggttatcaccttacaaaccatacaataatgaatatttactagagaccacaaaacctatggactatgagctacagcagttctatgaagtagctgtggtggcttggaactctgagggatttcatgtcaaaagggtcattaaagtgcaacttttagatgacaatgataatgctccaattttccttcaacccttaatagaactaaccatcgaagagaacaactcacccaatgcctttttgactaagctgtatgctacagatgccgacagcgaggagagaggccaagtttcatattttctgggacctgatgctccatcatatttttccttagacagtgtcacaggaattctgacagtttctactcagctggaccgagaagagaaagaaaagtacagatacactgtcagagctgttgactgtgggaagccacccagagaatcagtagccactgtggccctcacagtgttggataaaaatgacaacagtcctcggtttatcaacaaggacttcagcttttttgtgcctgaaaactttccaggctatggtgagattggagtaattagtgtaacagatgctgacgctggacgaaatggatgggtcgccctctctgtggtgaaccagagtgatatttttgtcatagatacaggaaagggtatgctgagggctaaagtctctttggacagagagcagcaaagctcctatactttgtgggttgaagctgttgatgggggtgagcctgccctctcctctacagcaaaaatcacaattctccttctagatatcaatgacaaccctcctcttgttttgtttcctcagtctaatatgtcttatctgttagtactgccttctactctgccaggctccccggttacagaagtctatgctgtcgacaaagacacaggcatgaatgctgtcatagcttacagcatcatagggagaagaggtcctaggcctgagtccttcaggattgaccctaaaactggcaacattactttggaagaggcattgctgcagacagattatgggctccatcgcttactggtgaaagtgagtgatcatggttatcccgagcctctccactccacagtcatggtgaacctatttgtcaatgacactgtcagtaatgagagttacattgagagtcttttaagaaaagaaccagagattaatatagaggagaaagaaccacaaatctcaatagaaccgactcataggaaggtagaatctgtgtcttgtatgcccaccttagtagctctgtctgtaataagcttgggttccatcacactggtcacagggatgggcatatacatctgtttaaggaaaggggaaaagcatcccagggaagatgaaaatttggaagtacagattccactgaaaggaaaaattgacttgcatatgcgagagagaaagccaatggatatttctaatatttgatatttcatggtggaataacacagagaaatgttttaactgactttggatcttcatcacctaaaaaagagtgtgttgatggcagttccaatgaaggacaactaatttataacttgttctatattgtaaatagctgtttacaggtttttaaatttaaattcagaggttataaaatgtgtacagcatttttaagtgaaaattagtactaacagctataggacttgtatttaaaaaaaaaaaaaaagcttggacatggtttgcagctttcatacaccaagcagatgattgataaaacctgggagtaaggtaagaaaaatggaacaaatttttatctaaaaattcctgtcaccacaagagggcatcagctgctcctttgcaggaaactggggtattgtacttggcagttgtacatgaaattaatgaaagagtatattttaaatatattgtttttaacattaaacaaatatgaaattaaagtaaattaaatttcaccctatttaaacatatgataaaaaaagaaatgcacttgtaaacagaatgtttattacctcataagtgcatatatagtgtgaaagagaaggcattaaaaagaagtgcaattcctttttagcaaggataaaatcattgccttgtgttacagattcagcctgctgaagagtattccactttctgtgtactcgaattgctttctgtttgctttaccactgcacttgttattattacaagggaaatagatttatacatacatatatatattcttcattacaggaaatgtaactagatattgtgcccaagaaaaacagccagaagcaaagaaatgcttcaatctttagttgcttcataggcattcatgacattttagtgctttcacaacttgttggtcgtactttatacttgggttatatattagacttttataggcttgaaatcatccatcacataagaaaatagaaatcatattaaaagtgaattcttctagaggcttgtgtacactactggttgttttagttgggccttttatatgaaagttatactgtacttatctttttgttgttgtttaggtttgttgactaccatttctggcttcctttctttggttttggattaaatccaacagtttatttgtaagccctgcagcagatttctttgataatttagcttttactgaatctcttgcaatgaagaaagctatttcatcagtgatttatcactttcaattcattgtgtgagctggaaatattattttatatgagagctatagcaaaataatctgtataaacaaggaatgtgttagcttaaactggatcattttactttttggcatcatgcatctgtactgtaccaaaagtgtttatatgtctgcaaattaaaggtatatattttcataa

SEQ ID NO: 24830 - DNA, 4605 bp, Homo sapiens
  source 1..4605: mol_type = unassigned DNA
tttattttaattctccctctcttgctagcaacctgtggacttggcatctgactggtgcggcaaggaaggaggctggtaggtaagcgctactgtgcccaaccccgagctgcctcttcgcagtcttcaggagcaagtcccccattccagctcctctggcagagtatggagttacctgcgtccggggcaggaaaccatgaatgtgcccttctgccctcttgcctttctgccactctttgagttcccgtccttaattgaagagccagtgactattggctgaagttcccccagcgatttgcatgaaccgagagggagtgtcttctgccgccctcccttcaagagcgctctgactgcagcctcccagggaatgcgcggccgagggaatgcgcgcagctcacaggccctgggagtgagctggtgcccggcgacctggcacccgcgcctggatatggggcgtctacatcgtcccaggagcagcaccagctacaggaacctgccgcatctgtttctgtttttcctcttcgtgggacccttcagctgcctcgggagttacagccgggccaccgagcttctgtacagcctaaacgagggactacccgcgggggtgctcatcggcagcctggccgaggacctgcggctgctgcccaggtctgcagggaggccggacccgcagtcgcagctgccagagcgcaccggtgctgagtggaacccccctctctccttcagcctggcctcccggggactgagtggccagtacgtgaccctagacaaccgctctggggagctgcacacttcagctcaggagatcgacagggaggccctgtgtgttgaagggggtggagggactgcgtggagcggcagcgtttccatctcctcctctccttctgactcttgtcttttgctgctggatgtgcttgtcctgcctcaggaatacttcaggtttgtgaaggtgaagatcgccatcagagacatcaatgacaacgccccgcagttccctgtttcccagatctcggtgtgggtcccggaaaatgcacctgtaaacacccgactggccatagagcatcctgctgtggacccagatgtaggcattaatggggtacagacctatcgcttactggactaccatggtatgttcaccctggacgtggaggagaatgagaatggggagcgcaccccctacctaattgtcatgggtgctttggacagggaaacccaggaccagtatgtgagcatcatcatagctgaggatggtgggtctccaccacttttgggcagtgccactctcaccattggcatcagtgacattaatgacaattgccctctcttcacagactcacaaatcaatgtcactgtgtatgggaatgctacagtgggcaccccaattgcagctgtccaggctgtggataaagacttggggaccaatgctcaaattacttattcttacagtcagaaagttccacaagcatctaaggatttatttcacctggatgaaaacactggagtcattaaacttttcagtaagattggaggaagtgttctggagtcccacaagctcaccatccttgctaatggaccaggctgcatccctgctgtaatcactgctcttgtgtccattattaaagttattttcagaccccctgaaattgtccctcgttacatagcaaacgagatagatggtgtggtttatctgaaagaactggaacccgttaacactcccattgcgtttttcaccataagagatccagaaggtaaatacaaggttaactgctacctggatggtgaagggccgtttaggttatcaccttacaaaccatacaataatgaatatttactagagaccacaaaacctatggactatgagctacagcagttctatgaagtagctgtggtggcttggaactctgagggatttcatgtcaaaagggtcattaaagtgcaacttttagatgacaatgataatgctccaattttccttcaacccttaatagaactaaccatcgaagagaacaactcacccaatgcctttttgactaagctgtatgctacagatgccgacagcgaggagagaggccaagtttcatattttctgggacctgatgctccatcatatttttccttagacagtgtcacaggaattctgacagtttctactcagctggaccgagaagagaaagaaaagtacagatacactgtcagagctgttgactgtgggaagccacccagagaatcagtagccactgtggccctcacagtgttggataaaaatgacaacagtcctcggtttatcaacaaggacttcagcttttttgtgcctgaaaactttccaggctatggtgagattggagtaattagtgtaacagatgctgacgctggacgaaatggatgggtcgccctctctgtggtgaaccagagtgatatttttgtcatagatacaggaaagggtatgctgagggctaaagtctctttggacagagagcagcaaagctcctatactttgtgggttgaagctgttgatgggggtgagcctgccctctcctctacagcaaaaatcacaattctccttctagatatcaatgacaaccctcctcttgttttgtttcctcagtctaatatgtcttatctgttagtactgccttctactctgccaggctccccggttacagaagtctatgctgtcgacaaagacacaggcatgaatgctgtcatagcttacagcatcatagggagaagaggtcctaggcctgagtccttcaggattgaccctaaaactggcaacattactttggaagaggcattgctgcagacagattatgggctccatcgcttactggtgaaagtgagtgatcatggttatcccgagcctctccactccacagtcatggtgaacctatttgtcaatgacactgtcagtaatgagagttacattgagagtcttttaagaaaagaaccagagattaatatagaggagaaagaaccacaaatctcaatagaaccgactcataggaaggtagaatctgtgtcttgtatgcccaccttagtagctctgtctgtaataagcttgggttccatcacactggtcacagggatgggcatatacatctgtttaaggaaaggggaaaagcatcccagggaagatgaaaatttggaagtacagattccactgaaaggaaaaattgacttgcatatgcgagagagaaagccaatggatatttctaatatttgatatttcatggtggaataacacagagaaatgttttaactgactttggatcttcatcacctaaaaaagagtgtgttgatggcagttccaatgaaggacaactaatttataacttgttctatattgtaaatagctgtttacaggtttttaaatttaaattcagaggttataaaatgtgtacagcatttttaagtgaaaattagtactaacagctataggacttgtatttaaaaaaaaaaaaaaagcttggacatggtttgcagctttcatacaccaagcagatgattgataaaacctgggagtaaggtaagaaaaatggaacaaatttttatctaaaaattcctgtcaccacaagagggcatcagctgctcctttgcaggaaactggggtattgtacttggcagttgtacatgaaattaatgaaagagtatattttaaatatattgtttttaacattaaacaaatatgaaattaaagtaaattaaatttcaccctatttaaacatatgataaaaaaagaaatgcacttgtaaacagaatgtttattacctcataagtgcatatatagtgtgaaagagaaggcattaaaaagaagtgcaattcctttttagcaaggataaaatcattgccttgtgttacagattcagcctgctgaagagtattccactttctgtgtactcgaattgctttctgtttgctttaccactgcacttgttattattacaagggaaatagatttatacatacatatatatattcttcattacaggaaatgtaactagatattgtgcccaagaaaaacagccagaagcaaagaaatgcttcaatctttagttgcttcataggcattcatgacattttagtgctttcacaacttgttggtcgtactttatacttgggttatatattagacttttataggcttgaaatcatccatcacataagaaaatagaaatcatattaaaagtgaattcttctagaggcttgtgtacactactggttgttttagttgggccttttatatgaaagttatactgtacttatctttttgttgttgtttaggtttgttgactaccatttctggcttcctttctttggttttggattaaatccaacagtttatttgtaagccctgcagcagatttctttgataatttagcttttactgaatctcttgcaatgaagaaagctatttcatcagtgatttatcactttcaattcattgtgtgagctggaaatattattttatatgagagctatagcaaaataatctgtataaacaaggaatgtgttagcttaaactggatcattttactttttggcatcatgcatctgtactgtaccaaaagtgtttatatgtctgcaaattaaaggtatatattttcataa

SEQ ID NO: 24831 - DNA, 3603 bp, Homo sapiens
  source 1..3603: mol_type = unassigned DNA
atgctgaggatgcggaccgcgggatgggcgcgcggctggtgcttgggctgctgcctcctcctgccgctctcgctcagcctggcggccgccaagcagctcctccggtaccggctggccgaggagggccccgccgacgtccgcatcggcaacgtggcttcagacctgggcatcgtgaccggatcgggtgaggtgactttcagcctggagtccggttccgagtacctgaagatcgacaacctcactggcgagctgagcacgagcgagcggcgcatcgaccgcgagaagctgccccagtgtcagatgatcttcgacgagaacgagtgcttcctggacttcgaggtgtcggtgatcgggccctcgcagagctgggtggacctgtttgagggtcaggtcatcgtgcttgacatcaacgacaacacgcccaccttcccgtcgcccgtgctcacgctcacggtggaggagaatcggccggtgggcacactttacctgctgcccacagccaccgaccgcgacttcggccgcaacggcatcgagcgctacgagctgctccaggagcccggaggcggcggcagcggcggcgagagccggcgcgccggggcggccgacagcgccccctaccccgggggcggcgggaacggcgcgagcggcggcggctcgggaggctccaagcggcggctggacgcatcagagggcggcggcggcaccaaccccggcggccgcagcagcgtgttcgagctgcaggtggcggacaccccggacggcgagaagcagccgcagctgatcgtgaagggcgtgtacgaggccgacttggctgagaacagcgccccggggacccccatcctgcaactgcgcgcagccgacttggacgtgggggtcaacgggcagatcgaatacgtgttcggggcggccaccgagtcggtgaggcggctgctgcgccttgacgagacgtccggctggctcagcgtcctgcaccggatcgaccgcgaggaggtgaaccagctgcgcttcacggtcatggcccgcgaccgcgggcagccccccaagaccgacaaggccaccgtggtccttaacatcaaagacgagaacgacaacgtgccgtccattgaaatccgcaagattgggcgcatccccctcaaggacggggtggccaacgtggccgaggacgttctggtcgacacccccatcgctctggtgcaggtgtccgaccgagaccaaggcgagaacggggtggtcacctgcaccgtggtgggcgacgtgcccttccagctcaagccagccagcgacaccgagggcgaccagaacaagaaaaagtacttcttgcacacctcgacccctctggactatgaggccacccgggagttcaacgtggtcatcgtggcggtggactcaggcagccccagcctctcgagcaacaactccctgattgtcaaggtgggagacaccaacgacaacccgcccatgttcggccagtcggtggtggaggtttacttccctgagaacaacatcccgggcgagagggtggccacggtgctggcgacagacgcagacagcggtaagaacgccgagatcgcctactcgctggactcctctgtgatggggatctttgccatcgatcccgattctggggacatcctggtcaataccgtgctggaccgcgagcagactgacaggtatgagtttaaagttaacgccaaagacaaaggcatccccgtgctgcagggcagcactacggtgattgtgcaggtggctgataaaaatgacaatgaccctaagtttatgcaggacgtcttcaccttttatgtgaaagaaaacttgcagcccaacagccctgtggggatggtcaccgtgatggatgctgacaaggggcggaatgcagagatgagcctgtacatagaggagaacaataacattttttctattgaaaatgacacggggaccatttactccacaatgtcttttgaccgggaacatcagaccacatacactttcagagtcaaggctgtggatgggggagatcctcccagatctgccacagctacagtctcgctttttgtgatggatgaaaatgacaatgctcccacagttacccttcccaaaaacatttcctacactttactgccaccttcgagtaatgtcaggacagtagtagctacagtgttggcaacagacagtgatgatggcatcaatgcagacctgaactacagcattgtgggaggaaatcccttcaagctgtttgaaattgatcccactagtggtgtggtttccttagtgggaaaactcacccaaaagcattatggcttgcacaggttggtggtgcaagtgaatgacagtgggcagccttcccagtccaccacgactctggtgcacgtgtttgtcaatgaaagtgtttctaatgcaactgcgattgactcccagatagctagaagtttgcacatcccactcacccaggatatagctggtgacccaagctatgaaattagcaaacagagactcagtattgtcattggcgtggttgctggcattatgacggtgattctaatcatcttaattgtagtgatggcaaggtactgcaggtccaaaaataaaaatggctatgaagccggcaaaaaagatcacgaagacttttttacaccccaacagcatgacaaatctaaaaagcctaaaaaggacaagaaaaacaaaaaatctaagcagcctctctacagcagcattgtcactgtggaggcttctaagccaaatggacagaggtatgatagtgtcaatgagaagctgtcagacagcccaagcatggggcgatacaggtccgttaatggtgggcccggcagtcctgacctggcaaggcattacaaatctagttccccattgcctactgttcagcttcatccccagtcaccaactgcaggaaaaaaacaccaggccgtacaagatctaccaccagccaacacatttgtgggagcaggagacaacatttcaattggatcagatcactgctctgagtacagctgtcaaaccaataacaagtacagcaaacagccatttcgtagagtgacgttttctgttgtgagtcagcctcaggacccacatcaggggtcactgcagagttgctatgacagcgggctggaggagtcagaaacaccaagcagtaagagttcatcagggccaagactgggtgcgcttccactcccagaggacaactatgaaaggaccacgccggatggcagtgttgattcaaggcctcttccagatgtagccctgactgggaagtgcactcgtgagtgtgatgagtatggccactcagactcctgctggatgccggtccgcacttctccggagaggaagaagagccagcctaaactgtccactttcatgcctgttgatgaacgaggaagccaggaaaagctggccaatggggaggccgccatcatgggtgaccgcaacagaaacctcctgaacaaaaagttgacctcatcctatgagaccttcagtgcagctagtttcagcaaaaatgaggaagccaaccctgaggatattccccttacaaaaacaggggaatataagccatctcctgtcaatactctcactagaagagaagtttacctgtag

SEQ ID NO: 24832 - DNA, 5398 bp, Homo sapiens
  source 1..5398: mol_type = unassigned DNA
gaatgcaggtgagaaaaggcacggactctgcggctgcgaacccaaacttgggcaccgcacggtgcgcactgctcagccttcgcccccgtgggcgaaaggctgctgcggtttcaggcggctgcttcgtgactaatgaccttgcgcagagttgttaagaaaaaagagaaacccgcgctctccggggtgagaagggactgactctgggcgtctctgaagatggctcgggcttctctttggcgcgccggggggaccctgacactgaccgctctgtgacgcgagtagtctcccctgcaccgtgcccgaagcgacgtgccgggggatttttcattctcgatctgttgactggctcccccgctgcatgagcagagtcggagttgagactggcttgttgctggccccagcgcctggtgcaggaagcgactcacgtttgtctgggtggccggagccggagcagagcctgggtttggagtgagtgcctggaacgtgaattggactcaactcgagtagcagcaaagaccagcgggctggcaggcgggggaggctgcaggctcattccccacctcttcccagccccactgcccgtctgccggagcggttctggccccttccgacagagcggggactagagccggggattctccgcccgctgaggggatgactctgggttgggggagcgccgaacccgcggcgcgcagtgtcccgtgaactgtgagtactgcgactgaacggcggcaggcgagcgggcgattagcacccattgcatgaattatgaaacaataactttcggaagaagcaggaggaaaaaaagaagcatctatcgctgccctcccacccccattcccggccaactctccacgccgcttttgccccctccctcccctccctctcgctccttcctttccgggagaggggagaggactcgggggagggcaggcggccggccccggaggaggggggcgccgagggggctgtggttagaaggagcagtagcagcagcagcaggagaagatgctgaggatgcggaccgcgggatgggcgcgcggctggtgcttgggctgctgcctcctcctgccgctctcgctcagcctggcggccgccaagcagctcctccggtaccggctggccgaggagggccccgccgacgtccgcatcggcaacgtggcttcagacctgggcatcgtgaccggatcgggtgaggtgactttcagcctggagtccggttccgagtacctgaagatcgacaacctcactggcgagctgagcacgagcgagcggcgcatcgaccgcgagaagctgccccagtgtcagatgatcttcgacgagaacgagtgcttcctggacttcgaggtgtcggtgatcgggccctcgcagagctgggtggacctgtttgagggtcaggtcatcgtgcttgacatcaacgacaacacgcccaccttcccgtcgcccgtgctcacgctcacggtggaggagaatcggccggtgggcacactttacctgctgcccacagccaccgaccgcgacttcggccgcaacggcatcgagcgctacgagctgctccaggagcccggaggcggcggcagcggcggcgagagccggcgcgccggggcggccgacagcgccccctaccccgggggcggcgggaacggcgcgagcggcggcggctcgggaggctccaagcggcggctggacgcatcagagggcggcggcggcaccaaccccggcggccgcagcagcgtgttcgagctgcaggtggcggacaccccggacggcgagaagcagccgcagctgatcgtgaagggggcgctggaccgcgagcagcgcgactcctacgagctgaccctgcgagtgcgcgacggcggcgacccgcctcgctcctcgcaggccatcctacgggtcctcatcaccgacgtgaacgacaacagcccccgcttcgagaagagcgtgtacgaggccgacttggctgagaacagcgccccggggacccccatcctgcaactgcgcgcagccgacttggacgtgggggtcaacgggcagatcgaatacgtgttcggggcggccaccgagtcggtgaggcggctgctgcgccttgacgagacgtccggctggctcagcgtcctgcaccggatcgaccgcgaggaggtgaaccagctgcgcttcacggtcatggcccgcgaccgcgggcagccccccaagaccgacaaggccaccgtggtccttaacatcaaagacgagaacgacaacgtgccgtccattgaaatccgcaagattgggcgcatccccctcaaggacggggtggccaacgtggccgaggacgttctggtcgacacccccatcgctctggtgcaggtgtccgaccgagaccaaggcgagaacggggtggtcacctgcaccgtggtgggcgacgtgcccttccagctcaagccagccagcgacaccgagggcgaccagaacaagaaaaagtacttcttgcacacctcgacccctctggactatgaggccacccgggagttcaacgtggtcatcgtggcggtggactcaggcagccccagcctctcgagcaacaactccctgattgtcaaggtgggagacaccaacgacaacccgcccatgttcggccagtcggtggtggaggtttacttccctgagaacaacatcccgggcgagagggtggccacggtgctggcgacagacgcagacagcggtaagaacgccgagatcgcctactcgctggactcctctgtgatggggatctttgccatcgatcccgattctggggacatcctggtcaataccgtgctggaccgcgagcagactgacaggtatgagtttaaagttaacgccaaagacaaaggcatccccgtgctgcagggcagcactacggtgattgtgcaggtggctgataaaaatgacaatgaccctaagtttatgcaggacgtcttcaccttttatgtgaaagaaaacttgcagcccaacagccctgtggggatggtcaccgtgatggatgctgacaaggggcggaatgcagagatgagcctgtacatagaggagaacaataacattttttctattgaaaatgacacggggaccatttactccacaatgtcttttgaccgggaacatcagaccacatacactttcagagtcaaggctgtggatgggggagatcctcccagatctgccacagctacagtctcgctttttgtgatggatgaaaatgacaatgctcccacagttacccttcccaaaaacatttcctacactttactgccaccttcgagtaatgtcaggacagtagtagctacagtgttggcaacagacagtgatgatggcatcaatgcagacctgaactacagcattgtgggaggaaatcccttcaagctgtttgaaattgatcccactagtggtgtggtttccttagtgggaaaactcacccaaaagcattatggcttgcacaggttggtggtgcaagtgaatgacagtgggcagccttcccagtccaccacgactctggtgcacgtgtttgtcaatgaaagtgtttctaatgcaactgcgattgactcccagatagctagaagtttgcacatcccactcacccaggatatagctggtgacccaagctatgaaattagcaaacagagactcagtattgtcattggcgtggttgctggcattatgacggtgattctaatcatcttaattgtagtgatggcaaggtactgcaggtccaaaaataaaaatggctatgaagccggcaaaaaagatcacgaagacttttttacaccccaacagcatgacaaatctaaaaagcctaaaaaggacaagaaaaacaaaaaatctaagcagcctctctacagcagcattgtcactgtggaggcttctaagccaaatggacagaggtatgatagtgtcaatgagaagctgtcagacagcccaagcatggggcgatacaggtccgttaatggtgggcccggcagtcctgacctggcaaggcattacaaatctagttccccattgcctactgttcagcttcatccccagtcaccaactgcaggaaaaaaacaccaggccgtacaagatctaccaccagccaacacatttgtgggagcaggagacaacatttcaattggatcagatcactgctctgagtacagctgtcaaaccaataacaagtacagcaaacagatgcgtctacatccatacattactgtgtttggctgaattccactctaatatgatgctccattatgcaccatactgtgatgacctttctactccgaaacctgctggagcctgcccttggccgtggggtgtcagccaatcactgcttgttccacttgttgtacattttatttttgagtctttttctttctcatatacagaaaaatagtatgaaaataaaataaatgtatgaaacagtattaatgcagaaatgtgctactaatggatgtctgagtcaccagaaattccattcttaaagaggcggttagcacctattagacgtaacagtgatgtcttttaaaaaatccaaaagcatattgcaacaataagtttgagactttgtgtgaacaaagggaaattcagcctcttatgtctttgtctttaatacattaaatactgattttgaataaaaatctaaattgatcaatatttttaagtgccatgtaatcacaggcctgtcagatagttttgttagagtgaaggataatatcttttgctcattctgtgtgtgtatttttaaatgctgttttgtgtgtttgtgtgtgtttccatatatgtgtgtgtgtgtgtgtgtatatatatatatatgctggaactttgagcaatatttataaaaatattgtctgtaaaacaagtttgagaaattaattttttatatttataatgggcactgtaatggattgatttttttcttaatcttgaaatagtgaccaagatatttatatcatttttgaatttattttttaattctttaagaaaatttagaacttttcactttcatttgctaaagtcactgtagtcacattcggaaggaatatgtggctttctgttctttatggactacgtttatcagaagtccatatttattaaacatcctatttgatgtcagataacgtaaactcaagcagcttcaaagagttcagcatgttacatattattgagagagcaagtgactgaattttagttgtataagcaatattataggtaggtcagggagtcctctggatggcccctctacctctttatgtttgtatgtttatgtctttatttgttatgtcgtatgtgtttatgagcctagaaaatagcctagaaaataagtgttccatatgtaaagtttaataattttgtaatacatttaccacgctgtctgccctattaaaattttccacaaatttgggaa

SEQ ID NO: 24833 - DNA, 3768 bp, Homo sapiens
  source 1..3768: mol_type = unassigned DNA
atgctgaggatgcggaccgcgggatgggcgcgcggctggtgcttgggctgctgcctcctcctgccgctctcgctcagcctggcggccgccaagcagctcctccggtaccggctggccgaggagggccccgccgacgtccgcatcggcaacgtggcttcagacctgggcatcgtgaccggatcgggtgaggtgactttcagcctggagtccggttccgagtacctgaagatcgacaacctcactggcgagctgagcacgagcgagcggcgcatcgaccgcgagaagctgccccagtgtcagatgatcttcgacgagaacgagtgcttcctggacttcgaggtgtcggtgatcgggccctcgcagagctgggtggacctgtttgagggtcaggtcatcgtgcttgacatcaacgacaacacgcccaccttcccgtcgcccgtgctcacgctcacggtggaggagaatcggccggtgggcacactttacctgctgcccacagccaccgaccgcgacttcggccgcaacggcatcgagcgctacgagctgctccaggagcccggaggcggcggcagcggcggcgagagccggcgcgccggggcggccgacagcgccccctaccccgggggcggcgggaacggcgcgagcggcggcggctcgggaggctccaagcggcggctggacgcatcagagggcggcggcggcaccaaccccggcggccgcagcagcgtgttcgagctgcaggtggcggacaccccggacggcgagaagcagccgcagctgatcgtgaagggggcgctggaccgcgagcagcgcgactcctacgagctgaccctgcgagtgcgcgacggcggcgacccgcctcgctcctcgcaggccatcctacgggtcctcatcaccgacgtgaacgacaacagcccccgcttcgagaagagcgtgtacgaggccgacttggctgagaacagcgccccggggacccccatcctgcaactgcgcgcagccgacttggacgtgggggtcaacgggcagatcgaatacgtgttcggggcggccaccgagtcggtgaggcggctgctgcgccttgacgagacgtccggctggctcagcgtcctgcaccggatcgaccgcgaggaggtgaaccagctgcgcttcacggtcatggcccgcgaccgcgggcagccccccaagaccgacaaggccaccgtggtccttaacatcaaagacgagaacgacaacgtgccgtccattgaaatccgcaagattgggcgcatccccctcaaggacggggtggccaacgtggccgaggacgttctggtcgacacccccatcgctctggtgcaggtgtccgaccgagaccaaggcgagaacggggtggtcacctgcaccgtggtgggcgacgtgcccttccagctcaagccagccagcgacaccgagggcgaccagaacaagaaaaagtacttcttgcacacctcgacccctctggactatgaggccacccgggagttcaacgtggtcatcgtggcggtggactcaggcagccccagcctctcgagcaacaactccctgattgtcaaggtgggagacaccaacgacaacccgcccatgttcggccagtcggtggtggaggtttacttccctgagaacaacatcccgggcgagagggtggccacggtgctggcgacagacgcagacagcggtaagaacgccgagatcgcctactcgctggactcctctgtgatggggatctttgccatcgatcccgattctggggacatcctggtcaataccgtgctggaccgcgagcagactgacaggtatgagtttaaagttaacgccaaagacaaaggcatccccgtgctgcagggcagcactacggtgattgtgcaggtggctgataaaaatgacaatgaccctaagtttatgcaggacgtcttcaccttttatgtgaaagaaaacttgcagcccaacagccctgtggggatggtcaccgtgatggatgctgacaaggggcggaatgcagagatgagcctgtacatagaggagaacaataacattttttctattgaaaatgacacggggaccatttactccacaatgtcttttgaccgggaacatcagaccacatacactttcagagtcaaggctgtggatgggggagatcctcccagatctgccacagctacagtctcgctttttgtgatggatgaaaatgacaatgctcccacagttacccttcccaaaaacatttcctacactttactgccaccttcgagtaatgtcaggacagtagtagctacagtgttggcaacagacagtgatgatggcatcaatgcagacctgaactacagcattgtgggaggaaatcccttcaagctgtttgaaattgatcccactagtggtgtggtttccttagtgggaaaactcacccaaaagcattatggcttgcacaggttggtggtgcaagtgaatgacagtgggcagccttcccagtccaccacgactctggtgcacgtgtttgtcaatgaaagtgtttctaatgcaactgcgattgactcccagatagctagaagtttgcacatcccactcacccaggatatagctggtgacccaagctatgaaattagcaaacagagactcagtattgtcattggcgtggttgctggcattatgacggtgattctaatcatcttaattgtagtgatggcaaggtactgcaggtccaaaaataaaaatggctatgaagccggcaaaaaagatcacgaagacttttttacaccccaacagcatgacaaatctaaaaagcctaaaaaggacaagaaaaacaaaaaatctaagcagcctctctacagcagcattgtcactgtggaggcttctaagccaaatggacagaggtatgatagtgtcaatgagaagctgtcagacagcccaagcatggggcgatacaggtccgttaatggtgggcccggcagtcctgacctggcaaggcattacaaatctagttccccattgcctactgttcagcttcatccccagtcaccaactgcaggaaaaaaacaccaggccgtacaagatctaccaccagccaacacatttgtgggagcaggagacaacatttcaattggatcagatcactgctctgagtacagctgtcaaaccaataacaagtacagcaaacagccatttcgtagagtgacgttttctgttgtgagtcagcctcaggacccacatcaggggtcactgcagagttgctatgacagcgggctggaggagtcagaaacaccaagcagtaagagttcatcagggccaagactgggtgcgcttccactcccagaggacaactatgaaaggaccacgccggatggcagtgttggtgaggcagagcatatggaaaatgattcaaggcctcttccagatgtagccctgactgggaagtgcactcgtgagtgtgatgagtatggccactcagactcctgctggatgccggtccgcacttctccggagaggaagaagagccagcctaaactgtccactttcatgcctgttgatgaacgaggaagccaggaaaagctggccaatggggaggccgccatcatgggtgaccgcaacagaaacctcctgaacaaaaagttgacctcatcctatgagaccttcagtgcagctagtttcagcaaaaatgaggaagccaaccctgaggatattccccttacaaaaacaggggaatataagccatctcctgtcaatactctcactagaagagaagtttacctgtag

SEQ ID NO: 24834 - DNA, 3570 bp, Homo sapiens
  source 1..3570: mol_type = unassigned DNA
gactgacgcccgacctggaaaccagagaagacttccttagcctttcggatcgcacttgaggctggaggcatgagtcctgtgaggcgttggggcagcccctgccttttccccttgcagctcttcagcctctgctgggtgctctcagtggcccagagcaaaacagtccgatacagcaccttcgaggaggatgcccccggcacggtcatcgggaccctggccgaggacctgcatatgaaagtatcgggtgacacaagcttccgcctgatgaagcaattcaacagctctctgctccgggtgcgcgaaggcgacgggcagctgaccgtcggggacgccggcctggaccgcgagcggctgtgtggccaggccccgcagtgcgtgctggccttcgatgtggtcagcttctcgcaggagcagttccggctggtgcacgtggaggtagaggtgagggacgtcaacgaccacgcgccgcgcttccccagggcccagatcccggtagaggtgtccgagggtgcggcagtgggcacgcgcatccccttggaggtgccggtggacgaggacgtgggcgccaacgggctgcagaccgtgcgcctggccgagccgcacagcccctttcgcgtggagctgcagacgcgagcggacggcgctcagtgcgcagacctggtgctgctgcaggagctggaccgcgagagccaggccgcctacagcctggagctggtggcccaggacggcggccgcccgccgcgctccgccacggctgccctcagcgtgcgcgtcctggatgcgaatgaccacagcccggccttcccgcagggcgccgtggccgaagtggagctggcggaagacgcgcccgtgggctccctgcttctcgacctggacgcagccgaccccgacgagggacctaacggcgacgtggtgttcgcatttggcgcccgcaccccgccggaggcgcgccgcctctttcggcttgacccgcgatcaggccgcctcaccctggccgggcccgtggactacgagcgtcaggacacctacgagctggacgtgcgggcgcaggaccgcggacccgggccccgcgctgccacctgcaaggtcatcgtgcgcatccgagacgtcaatgacaacgcacccgacatcgccatcaccccgctggccgccccaggcgcgccggcaacctcacccttcgccgctgccgccgccgccgctgcactcgggggagcggacgctagctcgccggcgggagccgggacgccggaggctggtgccacttcgctggtgccggagggggcggcgcgcgagagcctggtggccctggtcagcacctcggacagggactcgggcgccaacgggcaagtgcgctgcgccctctatgggcacgagcacttccggctgcagccggcctacgcgggcagctacctggtggtgaccgcggcgtcgctggaccgcgaacgcatcgccgagtacaacttgacgctggtggccgaggatcgcggcgcgcccccgctgcgcacagtgcggccctacacggtgcgtgtgggcgacgagaacgacaacgcgccgctcttcacgcggccggtctatgaggtgtcggtgcgcgagaacaacccgccaggcgcctacctggccacggtggccgcccgcgaccgggacctgggccgcaacggccaggtcacctaccggctgctggaggccgaggtgggccgcgccgggggcgccgtgtccacttatgtctcggtggacccagctaccggagccatctacgcgctgcgcagcttcgactatgagacgctgcgccaactcgacgttcgcatccaagctagcgacggcggctcccctcagctttccagcagcgccctagtgcaagtgcgcgtgctggaccagaacgaccatgcgccagtcctggtgcacccggcgccagccaatggctccctagaagtggcggtgcctgggcgcaccgcaaaggacacggttgtggcccgtgtgcaggcccgggatgcagacgagggagccaacggggagctggcgttcgagctgcagcagcaggagccgcgcgaagccttcgccatcggccgccgcacgggggagatactgctcaccggcgacctctcgcaggagccacccggtcgcgtgttcagggcgctcctggtcatatccgacggcggccgtcccccgctcaccaccaccgcaactgtcagcttcgtggtaacagcagggggcgggcgtgggccggctgcgcctgccagtgcaggaagcccggagcgttcccgcccgcctggctctcggctcggggtgtccgggtcggtgctgcaatgggacacgccgctgatcgtcatcatcgtgctggccgggagctgcacgctgctgctggccgccatcatcgccatcgccaccacctgcaaccgccgcaagaaggagccctacggtgcctccccgggttttggaaaggagccggcgccccctgtggcggtgtggaaaggacactccttcaacaccatttctggcagagaagcagagaagttcagcggcaaagacagcggtaaaggggacagtgatttcaacgacagcgattccgacatcagcggggacgctctgaaaaaggatctcatcaaccacatgcagagtggactgtgggcgtgcaccgctgagtgtaagatcctgggccactctgaccgctgctggagcccatcctgcagcgggcccaacgcacatccatcgcctcacccaccagcccagatgtcaaccttctgtaagagcacgtcactgcctcgggatcctctgcgcagggacaattactaccaggcccagctgcccaagacagtggggctgcagagcgtctatgagaaagtactgcacagagactatgacaggacagtcactctgctctcccctccccgtccagggaggctcccagacctgcaggagattggagtacccctctaccagtcccctcctggcaggtacctgtccccgaagaagggagccaatgaaaatgtgtaatcccatgctgcatgtcttcacacatatacaggtcactccgagaagcccctaagttattgaccggtttcagtgttgtatatataaatatgcaagatgtgccttacaatgaagttgttggaagctatttccaatcacattggtactgtttggtatttgcaaacaaaaatgtagttaatgtaatttttatgaaatgtgtgcagtatttaatttttcttatgctattgactttgatttcaattgcggcttgccattttcttagtgtttttaacctgtacattgtgtaatgtaatgtttgtatataatgaaattttgttatatttttatataataaaagctaaagtggaagttattgccaaaggaactgtctgtaagacaaaaaacaaaacatgttggaattacttaattgaaatttatctttcacctgaaacaacctagtgtttgagaaattttgccttgccaagtataacttgtatatcttgactctgtggtagatttcaagttcaatgttatttaattacatttggttttccgtaaaccgtgtcacttataagcacagtaataaaagatttgtcatgtgtt

SEQ ID NO: 24835 - DNA, 4003 bp, Homo sapiens
  source 1..4003: mol_type = unassigned DNA
agcttctgtaagagacggagaggcgcagagtgagggcgggtccgcgcgtcctcagagcccgctggaggctcggagctgctacccgcagacttctcccgcacagggctcgcaaagagcgtgattccgagagcctgagactgacgcccgacctggaaaccagagaagacttccttagcctttcggatcgcacttgaggctggaggcatgagtcctgtgaggcgttggggcagcccctgccttttccccttgcagctcttcagcctctgctgggtgctctcagtggcccagagcaaaacagtccgatacagcaccttcgaggaggatgcccccggcacggtcatcgggaccctggccgaggacctgcatatgaaagtatcgggtgacacaagcttccgcctgatgaagcaattcaacagctctctgctccgggtgcgcgaaggcgacgggcagctgaccgtcggggacgccggcctggaccgcgagcggctgtgtggccaggccccgcagtgcgtgctggccttcgatgtggtcagcttctcgcaggagcagttccggctggtgcacgtggaggtagaggtgagggacgtcaacgaccacgcgccgcgcttccccagggcccagatcccggtagaggtgtccgagggtgcggcagtgggcacgcgcatccccttggaggtgccggtggacgaggacgtgggcgccaacgggctgcagaccgtgcgcctggccgagccgcacagcccctttcgcgtggagctgcagacgcgagcggacggcgctcagtgcgcagacctggtgctgctgcaggagctggaccgcgagagccaggccgcctacagcctggagctggtggcccaggacggcggccgcccgccgcgctccgccacggctgccctcagcgtgcgcgtcctggatgcgaatgaccacagcccggccttcccgcagggcgccgtggccgaagtggagctggcggaagacgcgcccgtgggctccctgcttctcgacctggacgcagccgaccccgacgagggacctaacggcgacgtggtgttcgcatttggcgcccgcaccccgccggaggcgcgccgcctctttcggcttgacccgcgatcaggccgcctcaccctggccgggcccgtggactacgagcgtcaggacacctacgagctggacgtgcgggcgcaggaccgcggacccgggccccgcgctgccacctgcaaggtcatcgtgcgcatccgagacgtcaatgacaacgcacccgacatcgccatcaccccgctggccgccccaggcgcgccggcaacctcacccttcgccgctgccgccgccgccgctgcactcgggggagcggacgctagctcgccggcgggagccgggacgccggaggctggtgccacttcgctggtgccggagggggcggcgcgcgagagcctggtggccctggtcagcacctcggacagggactcgggcgccaacgggcaagtgcgctgcgccctctatgggcacgagcacttccggctgcagccggcctacgcgggcagctacctggtggtgaccgcggcgtcgctggaccgcgaacgcatcgccgagtacaacttgacgctggtggccgaggatcgcggcgcgcccccgctgcgcacagtgcggccctacacggtgcgtgtgggcgacgagaacgacaacgcgccgctcttcacgcggccggtctatgaggtgtcggtgcgcgagaacaacccgccaggcgcctacctggccacggtggccgcccgcgaccgggacctgggccgcaacggccaggtcacctaccggctgctggaggccgaggtgggccgcgccgggggcgccgtgtccacttatgtctcggtggacccagctaccggagccatctacgcgctgcgcagcttcgactatgagacgctgcgccaactcgacgttcgcatccaagctagcgacggcggctcccctcagctttccagcagcgccctagtgcaagtgcgcgtgctggaccagaacgaccatgcgccagtcctggtgcacccggcgccagccaatggctccctagaagtggcggtgcctgggcgcaccgcaaaggacacggttgtggcccgtgtgcaggcccgggatgcagacgagggagccaacggggagctggcgttcgagctgcagcagcaggagccgcgcgaagccttcgccatcggccgccgcacgggggagatactgctcaccggcgacctctcgcaggagccacccggtcgcgtgttcagggcgctcctggtcatatccgacggcggccgtcccccgctcaccaccaccgcaactgtcagcttcgtggtaacagcagggggcgggcgtgggccggctgcgcctgccagtgcaggaagcccggagcgttcccgcccgcctggctctcggctcggggtgtccgggtcggtgctgcaatgggacacgccgctgatcgtcatcatcgtgctggccgggagctgcacgctgctgctggccgccatcatcgccatcgccaccacctgcaaccgccgcaagaaggaggtgcgcaaagggggggccctccgggaagagcggcccggggcggcgggcggcggagcctcggctcccggctccccggaggaggccgcccggggagccgggcccaggcccaacatgttcgacgtgctcaccttccctggcaccggcaaagcgccctttggcagccccgcggcggacgcgcctccgcctgcggtcgccgcggccgaagtgccgggctcagagggcggcagcgccactggggaaagcgcctgtcacttcgaggggcagcagcggctccgcggcgcgcacgccgagccctacggtgcctccccgggttttggaaaggagccggcgccccctgtggcggtgtggaaaggacactccttcaacaccatttctggcagagaagcagagaagttcagcggcaaagacagcggtaaaggggacagtgatttcaacgacagcgattccgacatcagcggggacgctctgaaaaaggatctcatcaaccacatgcagagtggactgtgggcgtgcaccgctgagtgtaagatcctgggccactctgaccgctgctggagcccatcctgcagcgggcccaacgcacatccatcgcctcacccaccagcccagatgtcaaccttctgtaagagcacgtcactgcctcgggatcctctgcgcagggacaattactaccaggcccagctgcccaagacagtggggctgcagagcgtctatgagaaagtactgcacagagactatgacaggacagtcactctgctctcccctccccgtccagggaggctcccagacctgcaggagattggagtacccctctaccagtcccctcctggcaggtacctgtccccgaagaagggagccaatgaaaatgtgtaatcccatgctgcatgtcttcacacatatacaggtcactccgagaagcccctaagttattgaccggtttcagtgttgtatatataaatatgcaagatgtgccttacaatgaagttgttggaagctatttccaatcacattggtactgtttggtatttgcaaacaaaaatgtagttaatgtaatttttatgaaatgtgtgcagtatttaatttttcttatgctattgactttgatttcaattgcggcttgccattttcttagtgtttttaacctgtacattgtgtaatgtaatgtttgtatataatgaaattttgttatatttttatataataaaagctaaagtggaagttattgccaaaggaactgtctgtaagacaaaaaacaaaacatgttggaattacttaattgaaatttatctttcacctgaaacaacctagtgtttgagaaattttgccttgccaagtataacttgtatatcttgactctgtggtagatttcaagttcaatgttatttaattacatttggttttccgtaaaccgtgtcacttataagcacagtaataaaagatttgtcatgtgtttgaagaa

SEQ ID NO: 24836 - DNA, 2415 bp, Homo sapiens
  source 1..2415: mol_type = unassigned DNA
agcttctgtaagagacggagaggcgcagagtgagggcgggtccgcgcgtcctcagagcccgctggaggctcggagctgctacccgcagacttctcccgcacagggctcgcaaagagcgtgattccgagagcctgagactgacgcccgacctggaaaccagagaagacttccttagcctttcggatcgcacttgaggctggaggcatgagtcctgtgaggcgttggggcagcccctgccttttccccttgcagctcttcagcctctgctgggtgctctcagtggcccagagcaaaacagtccgatacagcaccttcgaggaggatgcccccggcacggtcatcgggaccctggccgaggacctgcatatgaaagtatcgggtgacacaagcttccgcctgatgaagcaattcaacagctctctgctccgggtgcgcgaaggcgacgggcagctgaccgtcggggacgccggcctggaccgcgagcggctgtgtggccaggccccgcagtgcgtgctggccttcgatgtggtcagcttctcgcaggagcagttccggctggtgcacgtggaggtagaggtgagggacgtcaacgaccacgcgccagtcctggtgcacccggcgccagccaatggctccctagaagtggcggtgcctgggcgcaccgcaaaggacacggttgtggcccgtgtgcaggcccgggatgcagacgagggagccaacggggagctggcgttcgagctgcagcagcaggagccgcgcgaagccttcgccatcggccgccgcacgggggagatactgctcaccggcgacctctcgcaggagccacccggtcgcgtgttcagggcgctcctggtcatatccgacggcggccgtcccccgctcaccaccaccgcaactgtcagcttcgtggtaacagcagggggcgggcgtgggccggctgcgcctgccagtgcaggaagcccggagcgttcccgcccgcctggctctcggctcggggtgtccgggtcggtgctgcaatgggacacgccgctgatcgtcatcatcgtgctggccgggagctgcacgctgctgctggccgccatcatcgccatcgccaccacctgcaaccgccgcaagaaggaggtgcgcaaagggggggccctccgggaagagcggcccggggcggcgggcggcggagcctcggctcccggctccccggaggaggccgcccggggagccgggcccaggcccaacatgttcgacgtgctcaccttccctggcaccggcaaagcgccctttggcagccccgcggcggacgcgcctccgcctgcggtcgccgcggccgaagtgccgggctcagagggcggcagcgccactggggaaagcgcctgtcacttcgaggggcagcagcggctccgcggcgcgcacgccgagccctacggtgcctccccgggttttggaaaggagccggcgccccctgtggcggtgtggaaaggacactccttcaacaccatttctggcagagaagcagagaagttcagcggcaaagacagcggtaaaggggacagtgatttcaacgacagcgattccgacatcagcggggacgctctgaaaaaggatctcatcaaccacatgcagagtggactgtgggcgtgcaccgctgagtgtaagatcctgggccactctgaccgctgctggagcccatcctgcagcgggcccaacgcacatccatcgcctcacccaccagcccagatgtcaaccttctgtaagagcacgtcactgcctcgggatcctctgcgcagggacaattactaccaggcccagctgcccaagacagtggggctgcagagcgtctatgagaaagtactgcacagagactatgacaggacagtcactctgctctcccctccccgtccagggaggctcccagacctgcaggagattggagtacccctctaccagtcccctcctggcaggtacctgtccccgaagaagggagccaatgaaaatgtgtaatcccatgctgcatgtcttcacacatatacaggtcactccgagaagcccctaagttattgaccggtttcagtgttgtatatataaatatgcaagatgtgccttacaatgaagttgttggaagctatttccaatcacattggtactgtttggtatttgcaaacaaaaatgtagttaatgtaatttttatgaaatgtgtgcagtatttaatttttcttatgctattgactttgatttcaattgcggcttgccattttcttagtgtttttaacctgtacattgtgtaatgtaatgtttgtatataatgaaattttgttatatttttatataataaaagctaaagtggaagttattgccaaaggaactgtctgtaagacaaaaaacaaaacatgttggaattacttaattgaaatttatctttca

SEQ ID NO: 24837 - DNA, 3103 bp, Homo sapiens
  source 1..3103: mol_type = unassigned DNA
agcttctgtaagagacggagaggcgcagagtgagggcgggtccgcgcgtcctcagagcccgctggaggctcggagctgctacccgcagacttctcccgcacagggctcgcaaagagcgtgattccgagagcctgagactgacgcccgacctggaaaccagagaagacttccttagcctttcggatcgcacttgaggctggaggcatgagtcctgtgaggcgttggggcagcccctgccttttccccttgcagctcttcagcctctgctgggtgctctcagtggcccagagcaaaacagtccgatacagcaccttcgaggaggatgcccccggcacggtcatcgggaccctggccgaggacctgcatatgaaagtatcgggtgacacaagcttccgcctgatgaagcaattcaacagctctctgctccgggtgcgcgaaggcgacgggcagctgaccgtcggggacgccggcctggaccgcgagcggctgtgtggccaggccccgcagtgcgtgctggccttcgatgtggtcagcttctcgcaggagcagttccggctggtgcacgtggaggtagaggtgagggacgtcaacgaccacgcgccgcgcttccccagggcccagatcccggtagaggtgtccgagggtgcggcagtgggcacgcgcatccccttggaggtgccggtggacgaggacgtgggcgccaacgggctgcagaccgtgcgcctggccgagccgcacagcccctttcgcgtggagctgcagacgcgagcggacggcgctcagtgcgcagacctggtgctgctgcaggagctggaccgcgagagccaggccgcctacagcctggagctggtggcccaggacggcggccgcccgccgcgctccgccacggctgccctcagcgtgcgcgtcctggatgcgaatgaccacagcccggccttcccgcagggcgccgtggccgaagtggagctggcggaagacgcgcccgtgggctccctgcttctcgacctggacgcagccgaccccgacgagggacctaacggcgacgtggtgttcgcatttggcgcccgcaccccgccggaggcgcgccgcctctttcggcttgacccgcgatcaggccgcctcaccctggccgggcccgtggactacgagcgtcaggacacctacgagctggacgtgcgggcgcaggaccgcggacccgggccccgcgctgccacctgcaaggtcatcgtgcgcatccgagacgtcaatgacaacgcacccgacatcgccatcaccccgctggccgccccaggcgccggcaacctcacccttcgccgcaacggccaggtcacctaccggctgctggaggccgaggtgggccgcgccgggggcgccgtgtccacttatgtctcggtggacccagctaccggagccatctacgcgctgcgcagcttcgactatgagacgctgcgccaactcgacgttcgcatccaagctagcgacggcggctcccctcagctttccagcagcgccctagtgcaagtgcgcgtgctggaccagaacgaccatgcgccagtcctggtgcacccggcgccagccaatggctccctagaagtggcggtgcctgggcgcaccgcaaaggacacggttgtggcccgtgtgcaggcccgggatgcagacgagggagccaacggggagctggcgttcgagctgcagcagcaggagccgcgcgaagccttcgccatcggccgccgcacgggggagatactgctcaccggcgacctctcgcaggagccacccggtcgcgtgttcagggcgctcctggtcatatccgacggcggccgtcccccgctcaccaccaccgcaactgtcagcttcgtggtaacagcagggggcgggcgtgggccggctgcgcctgccagtgcaggaagcccggagcgttcccgcccgcctggctctcggctcggggtgtccgggtcggtgctgcaatgggacacgccgctgatcgtcatcatcgtgctggccgggagctgcacgctgctgctggccgccatcatcgccatcgccaccacctgcaaccgccgcaagaaggaggtgcgcaaagggggggccctccgggaagagcggcccggggcggcgggcggcggagcctcggctcccggctccccggaggaggccgcccggggagccgggcccaggcccaacatgttcgacgtgctcaccttccctggcaccggcaaagcgccctttggcagccccgcggcggacgcgcctccgcctgcggtcgccgcggccgaagtgccgggctcagagggcggcagcgccactggggaaagcgcctgtcacttcgaggggcagcagcggctccgcggcgcgcacgccgagccctacggtgcctccccgggttttggaaaggagccggcgccccctgtggcggtgtggaaaggacactccttcaacaccatttctggcagagaagcagagaagttcagcggcaaagacagcggtaaaggggacagtgatttcaacgacagcgattccgacatcagcggggacgctctgaaaaaggatctcatcaaccacatgcagagtggactgtgggcgtgcaccgctgagtgtaagatcctgggccactctgaccgctgctggagcccatcctgcagcgggcccaacgcacatccatcgcctcacccaccagcccagatgtcaaccttctgtaagagcacgtcactgcctcgggatcctctgcgcagggacaattactaccaggcccagctgcccaagacagtggggctgcagagcgtctatgagaaagtactgcacagagactatgacaggacagtcactctgctctcccctccccgtccagggaggctcccagacctgcaggagattggagtacccctctaccagtcccctcctggcaggtacctgtccccgaagaagggagccaatgaaaatgtgtaatcccatgctgcatgtcttcacacatatacaggtcactccgagaagcccctaagttattgaccggtttcagtgttgtatatataaatatgcaagatgtgccttacaatgaagttgttggaagctatttccaatcacattggtactgtttggtatttgc

SEQ ID NO: 24838 - DNA, 3663 bp, Homo sapiens
  source 1..3663: mol_type = unassigned DNA
atggacctgagggatttttacctgttggctgctctgattgcctgtttaaggctggattccgcaatagctcaagaacttatttacactattagagaggaattgcctgaaaatgtgcccataggaaacataccaaaggatctgaacatttctcacatcaatgctgccacagggaccagcgccagccttgtctacagactggtttctaaagctggggatgcccctttggtgaaagtttccagcagcactggggaaattttcacaacctccaacagaatagacagagaaaaactctgtgctggcgcctcatatgctgaggagaatgagtgtttctttgaacttgaggtggtgatcctccccaatgatttcttcaggctgatcaaaataaaaataattgtcaaggataccaatgataatgcccccatgtttccatctcctgtcatcaatatttccattccagaaaacactttgatcaacagccgctttccaattccatcagcaacagatcctgacacaggcttcaatggtgtacagcattatgaattgttaaatgggcagagtgtttttggactggatatcgtggaaactccagagggagagaagtggccacaactgattgttcagcaaaacttggatagagaacagaaagatacctatgtgatgaaaatcaaagtagaggatggaggcactccacagaaatccagtacggccatactgcaggtcacagtaagtgatgtaaatgacaacaggccagtgtttaaagagggtcaagtggaggtgcatattccagagaatgctcccgtaggtacctctgtaattcagctccatgccactgatgcagatataggcagtaatgctgaaatccggtacatttttggtgcccaggtcgcccctgcaaccaaaagactctttgctttaaataatactactgggctgattacagttcagaggtccttagatagagaggagacagccattcacaaagtgacagtgctggctagtgacggcagctccactcctgctcgagcaacggttaccatcaatgtcaccgatgtaaatgataaccctcctaatatagacctcaggtacattataagtcccatcaatggcaccgtgtatttatctgagaaagatcctgtcaatacaaagattgccctaattacagtttcagataaggacacagatgtgaatggcaaagtgatctgttttattgaaagagaggtcccatttcatttgaaggcggtatatgacaaccaatatttgttagagacctcttctttgttggactatgagggcaccaaagaattcagctttaaaattgttgcctctgattctgggaagcccagtttaaatcagactgccctggtaagggttaagcttgaggatgaaaatgacaacccaccaattttcaaccagcctgtaattgagctgtcagtttctgaaaacaaccgacgtgggttatacttaacaactattagtgccacagatgaagacagtgggaaaaatgcagacattgtttatcagcttggaccgaatgcctccttctttgatctggaccgaaaaacaggagttttgacagcctccagagtatttgacagagaagaacaagaacgattcatttttacagtaactgccagggacaatgggacccctcccctccaaagccaagcggctgtgattgttactgttctggatgagaatgacaatagccccaagtttactcataatcattttcaattttttgtgtctgagaatctgccaaagtatagtactgtgggggtaatcacagtgacagatgcagatgctggagagaataaagctgtgactctttccattctaaatgacaatgataattttgtgttggatccctattctggagtcataaagtcaaatgtctcatttgatagagagcagcagagttcctacacttttgatgtcaaagccactgatggaggacaaccacctcgttcctctactgcaaaagtaactatcaacgtcatggatgtcaatgacaacagcccagttgtcatttctccaccgtctaatacttcctttaagttggtgcccctctcagccattcctggctccgtggtagcagaagtttttgcagtggatgttgacactggaatgaacgctgaactaaagtatactatagtgagtggaaacaataaaggcttattccggattgatccagtaacaggtaacattactctggaagaaaaaccagcacctactgatgtgggattgcatcgtttggtggtcaacataagtgacctggggtaccctaagtctttgcacacgcttgtgcttgtattcctttatgttaacgacactgctggaaatgcctcctatatctatgacttgatccgcaggactatggagaccccgttggacaggaacataggggatagtagccaaccctatcaaaatgaggactatctaaccatcatgattgccatcatcgccggtgccatggtggtcattgttgtgatcttcgtcaccgttctggtgcgctgtcgccatgcatcaaggttcaaagcagctcagaggagcaagcaaggtgccgaatggatgtccccaaaccaggagaacaagcaaaacaagaaaaagaaaagaaagaaaaggaagtctcccaaaagctctcttttgaactttgttactatcgaagagtccaaacccgatgatgcagttcatgaacctatcaatgggacaataagcctgccggctgaactggaggagcaaagtataggaagatttgactggggcccggcacctccaacaacattcaagcctaacagtcctgacctggccaagcactacaaatctgcttctccacagcctgcttttcatctcaaaccagacactccagtttccgtgaaaaagcaccacgtgattcaggaactccctttggacaacacctttgttgggggttgtgacaccctttctaaacgctcttccactagttcagatcacttcagtgcctcagagtgcagttcccaaggaggcttcaagacaaagggccccttacacaccagacagtcgcagcgccgtgttacgtttcatctccctgatggctcccaggaaagctgcagtgacagtggtctaggagaccatgagccggtgggtagtggaaccctgatctcacaccctcttcctctggttcagccacaggacgaattctatgaccaggcctctccggacaagaggactgaagcagatggcaactctgatcccaactctgatgggcctttgggtccccgaggattagctgaagctacagagatgtgcactcaagagtgcttggttttgggtcactctgataattgctggatgcctcctggcttgggtccatatcaacaccccaaatctcctctctcaacctttgcaccccagaaagaatgggtgaagaaggacaagcttgtgaatgggcacaccctgaccagagcctggaaagaagacagcaacaggaaccagttcaatgaccgtaagcagtatggctccaatgaaggccatttcaacaatggcagccacatgacagacattcctctggcaaatctgaagtcttataagcaagcaggaggtgctactgagagtcctaaggagcaccaactctaagaaaaggctatatgggacctaataactttaaatagacatgctaataccgtg

SEQ ID NO: 24839 - DNA, 4397 bp, Homo sapiens
  source 1..4397: mol_type = unassigned DNA
agagagaggagagggagaaggagagaggggcagaggggaagggagagagggagagcacgcgagacggaaaggagcgcctcagagtctctgaagcacgcaagagataaccgattaggaatttttcgggcaactgtcacccggatagctgtcagagaatcatcatcaccgcaactctgacgtttcctacaagaagttagagacttaagcagtattggcatcggatggaaatggtatgcatgctgctgtggaaaatatccctgagctgaagaagtgcaactatgtgttgtgtgtgctaaatgcccagaagaacccagacccagtgggtaagagagacgaaatgtggagagaatgactaacgacaaatccgtgaatttgttctctggagttgctaatttgccagcccgaagcaacacattttacaaggaggaaacattttgctgcttctgatttctccccaaactggtgctaccagatgcatggctttctatgtgttggaacaaatcattcctaactgcagcatactgggaaaggggaaaggttgaggcaactaaccggctgtctccaaataagtgatgagatataatgcatcctccagtccatgcacgcttcctcttgcaatttgtgcatcattcctcagtggaaacctttaaaccctaaaatccaggaaaagaaaataaatacattatcatggacctgagggatttttacctgttggctgctctgattgcctgtttaaggctggattccgcaatagctcaagaacttatttacactattagagaggaattgcctgaaaatgtgcccataggaaacataccaaaggatctgaacatttctcacatcaatgctgccacagggaccagcgccagccttgtctacagactggtttctaaagctggggatgcccctttggtgaaagtttccagcagcactggggaaattttcacaacctccaacagaatagacagagaaaaactctgtgctggcgcctcatatgctgaggagaatgagtgtttctttgaacttgaggtggtgatcctccccaatgatttcttcaggctgatcaaaataaaaataattgtcaaggataccaatgataatgcccccatgtttccatctcctgtcatcaatatttccattccagaaaacactttgatcaacagccgctttccaattccatcagcaacagatcctgacacaggcttcaatggtgtacagcattatgaattgttaaatgggcagagtgtttttggactggatatcgtggaaactccagagggagagaagtggccacaactgattgttcagcaaaacttggatagagaacagaaagatacctatgtgatgaaaatcaaagtagaggatggaggcactccacagaaatccagtacggccatactgcaggtcacagtaagtgatgtaaatgacaacaggccagtgtttaaagagggtcaagtggaggtgcatattccagagaatgctcccgtaggtacctctgtaattcagctccatgccactgatgcagatataggcagtaatgctgaaatccggtacatttttggtgcccaggtcgcccctgcaaccaaaagactctttgctttaaataatactactgggctgattacagttcagaggtccttagatagagaggagacagccattcacaaagtgacagtgctggctagtgacggcagctccactcctgctcgagcaacggttaccatcaatgtcaccgatgtaaatgataaccctcctaatatagacctcaggtacattataagtcccatcaatggcaccgtgtatttatctgagaaagatcctgtcaatacaaagattgccctaattacagtttcagataaggacacagatgtgaatggcaaagtgatctgttttattgaaagagaggtcccatttcatttgaaggcggtatatgacaaccaatatttgttagagacctcttctttgttggactatgagggcaccaaagaattcagctttaaaattgttgcctctgattctgggaagcccagtttaaatcagactgccctggtaagggttaagcttgaggatgaaaatgacaacccaccaattttcaaccagcctgtaattgagctgtcagtttctgaaaacaaccgacgtgggttatacttaacaactattagtgccacagatgaagacagtgggaaaaatgcagacattgtttatcagcttggaccgaatgcctccttctttgatctggaccgaaaaacaggagttttgacagcctccagagtatttgacagagaagaacaagaacgattcatttttacagtaactgccagggacaatgggacccctcccctccaaagccaagcggctgtgattgttactgttctggatgagaatgacaatagccccaagtttactcataatcattttcaattttttgtgtctgagaatctgccaaagtatagtactgtgggggtaatcacagtgacagatgcagatgctggagagaataaagctgtgactctttccattctaaatgacaatgataattttgtgttggatccctattctggagtcataaagtcaaatgtctcatttgatagagagcagcagagttcctacacttttgatgtcaaagccactgatggaggacaaccacctcgttcctctactgcaaaagtaactatcaacgtcatggatgtcaatgacaacagcccagttgtcatttctccaccgtctaatacttcctttaagttggtgcccctctcagccattcctggctccgtggtagcagaagtttttgcagtggatgttgacactggaatgaacgctgaactaaagtatactatagtgagtggaaacaataaaggcttattccggattgatccagtaacaggtaacattactctggaagaaaaaccagcacctactgatgtgggattgcatcgtttggtggtcaacataagtgacctggggtaccctaagtctttgcacacgcttgtgcttgtattcctttatgttaacgacactgctggaaatgcctcctatatctatgacttgatccgcaggactatggagaccccgttggacaggaacataggggatagtagccaaccctatcaaaatgaggactatctaaccatcatgattgccatcatcgccggtgccatggtggtcattgttgtgatcttcgtcaccgttctggtgcgctgtcgccatgcatcaaggttcaaagcagctcagaggagcaagcaaggtgccgaatggatgtccccaaaccaggagaacaagcaaaacaagaaaaagaaaagaaagaaaaggaagtctcccaaaagctctcttttgaactttgttactatcgaagagtccaaacccgatgatgcagttcatgaacctatcaatgggacaataagcctgccggctgaactggaggagcaaagtataggaagatttgactggggcccggcacctccaacaacattcaagcctaacagtcctgacctggccaagcactacaaatctgcttctccacagcctgcttttcatctcaaaccagacactccagtttccgtgaaaaagcaccacgtgattcaggaactccctttggacaacacctttgttgggggttgtgacaccctttctaaacgctcttccactagttcagatcacttcagtgcctcagagtgcagttcccaaggaggcttcaagacaaagggccccttacacaccagacaggtaaacgagcacttttactggtctataagtactgcatacaagtgcccagtcaaccagtattaacgtgccagtatgtctattgttttggtctaactttagcttagttagaaagaggtaaaaaaaaacttgaccccttttctattcctctggggctcagtcaagaatttttagaacagctttgaaatttctgagttctgagaatattttctcctttcagtttccttcaaatggcaaaagatgaaaagagaaaattattccaaaatgtcccaagataatgtttgctgaagaagaaaaaacctgtcctgatatgccaaattctgctcctgggggtttccaaattgactgcttcaagactttcaccttaccttttgatctaaaaagtcaccttcaaatctcaagttttcaatgacttttgaaggtgtgactgcaattatgttgcagctatggttgctaaaggggttaattttttttttagtctctaaacaggatagtagaatattaaatgtacatcagctgtgaagcacatgatcgttgatagattgcaactaagccatataggaagtcttctctttgatttcaaattattttattgtaatatattaaattcggtacttaatagaaagatttttagtgtccgcagtggccaaatactctttcaaaaaaaaaaaaaaaaa

SEQ ID NO: 24840 - DNA, 5667 bp, Homo sapiens
  source 1..5667: mol_type = unassigned DNA
cggctgtctccaaataagtgatgagatataatgcatcctccagtccatgcacgcttcctcttgcaatttgtgcatcattcctcagtggaaacctttaaaccctaaaatccaggaaaagaaaataaatacattatcatggacctgagggatttttacctgttggctgctctgattgcctgtttaaggctggattccgcaatagctcaagaacttatttacactattagagaggaattgcctgaaaatgtgcccataggaaacataccaaaggatctgaacatttctcacatcaatgctgccacagggaccagcgccagccttgtctacagactggtttctaaagctggggatgcccctttggtgaaagtttccagcagcactggggaaattttcacaacctccaacagaatagacagagaaaaactctgtgctggcgcctcatatgctgaggagaatgagtgtttctttgaacttgaggtggtgatcctccccaatgatttcttcaggctgatcaaaataaaaataattgtcaaggataccaatgataatgcccccatgtttccatctcctgtcatcaatatttccattccagaaaacactttgatcaacagccgctttccaattccatcagcaacagatcctgacacaggcttcaatggtgtacagcattatgaattgttaaatgggcagagtgtttttggactggatatcgtggaaactccagagggagagaagtggccacaactgattgttcagcaaaacttggatagagaacagaaagatacctatgtgatgaaaatcaaagtagaggatggaggcactccacagaaatccagtacggccatactgcaggtcacagtaagtgatgtaaatgacaacaggccagtgtttaaagagggtcaagtggaggtgcatattccagagaatgctcccgtaggtacctctgtaattcagctccatgccactgatgcagatataggcagtaatgctgaaatccggtacatttttggtgcccaggtcgcccctgcaaccaaaagactctttgctttaaataatactactgggctgattacagttcagaggtccttagatagagaggagacagccattcacaaagtgacagtgctggctagtgacggcagctccactcctgctcgagcaacggttaccatcaatgtcaccgatgtaaatgataaccctcctaatatagacctcaggtacattataagtcccatcaatggcaccgtgtatttatctgagaaagatcctgtcaatacaaagattgccctaattacagtttcagataaggacacagatgtgaatggcaaagtgatctgttttattgaaagagaggtcccatttcatttgaaggcggtatatgacaaccaatatttgttagagacctcttctttgttggactatgagggcaccaaagaattcagctttaaaattgttgcctctgattctgggaagcccagtttaaatcagactgccctggtaagggttaagcttgaggatgaaaatgacaacccaccaattttcaaccagcctgtaattgagctgtcagtttctgaaaacaaccgacgtgggttatacttaacaactattagtgccacagatgaagacagtgggaaaaatgcagacattgtttatcagcttggaccgaatgcctccttctttgatctggaccgaaaaacaggagttttgacagcctccagagtatttgacagagaagaacaagaacgattcatttttacagtaactgccagggacaatgggacccctcccctccaaagccaagcggctgtgattgttactgttctggatgagaatgacaatagccccaagtttactcataatcattttcaattttttgtgtctgagaatctgccaaagtatagtactgtgggggtaatcacagtgacagatgcagatgctggagagaataaagctgtgactctttccattctaaatgacaatgataattttgtgttggatccctattctggagtcataaagtcaaatgtctcatttgatagagagcagcagagttcctacacttttgatgtcaaagccactgatggaggacaaccacctcgttcctctactgcaaaagtaactatcaacgtcatggatgtcaatgacaacagcccagttgtcatttctccaccgtctaatacttcctttaagttggtgcccctctcagccattcctggctccgtggtagcagaagtttttgcagtggatgttgacactggaatgaacgctgaactaaagtatactatagtgagtggaaacaataaaggcttattccggattgatccagtaacaggtaacattactctggaagaaaaaccagcacctactgatgtgggattgcatcgtttggtggtcaacataagtgacctggggtaccctaagtctttgcacacgcttgtgcttgtattcctttatgttaacgacactgctggaaatgcctcctatatctatgacttgatccgcaggactatggagaccccgttggacaggaacataggggatagtagccaaccctatcaaaatgaggactatctaaccatcatgattgccatcatcgccggtgccatggtggtcattgttgtgatcttcgtcaccgttctggtgcgctgtcgccatgcatcaaggttcaaagcagctcagaggagcaagcaaggtgccgaatggatgtccccaaaccaggagaacaagcaaaacaagaaaaagaaaagaaagaaaaggaagtctcccaaaagctctcttttgaactttgttactatcgaagagtccaaacccgatgatgcagttcatgaacctatcaatgggacaataagcctgccggctgaactggaggagcaaagtataggaagatttgactggggcccggcacctccaacaacattcaagcctaacagtcctgacctggccaagcactacaaatctgcttctccacagcctgcttttcatctcaaaccagacactccagtttccgtgaaaaagcaccacgtgattcaggaactccctttggacaacacctttgttgggggttgtgacaccctttctaaacgctcttccactagttcagatcacttcagtgcctcagagtgcagttcccaaggaggcttcaagacaaagggccccttacacaccagacagtgtaactcacacagcaaaagtgacaatattcctgtcactcctcagaaatgtcccagctccacgggtttccacattcaggagaatgaagaaagccattacgagtcgcagcgccgtgttacgtttcatctccctgatggctcccaggaaagctgcagtgacagtggtctaggagaccatgagccggtgggtagtggaaccctgatctcacaccctcttcctctggttcagccacaggacgaattctatgaccaggcctctccggacaagaggactgaagcagatggcaactctgatcccaactctgatgggcctttgggtccccgaggattagctgaagctacagagatgtgcactcaagagtgcttggttttgggtcactctgataattgctggatgcctcctggcttgggtccatatcaacaccccaaatctcctctctcaacctttgcaccccagaaagaatgggtgaagaaggacaagcttgtgaatgggcacaccctgaccagagcctggaaagaagacagcaacaggaaccagttcaatgaccgtaagcagtatggctccaatgaaggccatttcaacaatggcagccacatgacagacattcctctggcaaatctgaagtcttataagcaagcaggaggtgctactgagagtcctaaggagcaccaactctaagaaaaggctatatgggacctaataactttaaatagacatgctaataccgtgtgcgtcagagctttatgtattcaatagatctctacaactatgccccttctagcagggatacctataactttgtgttagcaccatggagaatacaatgtttttgcaacatatgagagaagatagttctagccatgcaattttgtttactagaattgattacactctccagagatctctccattgtgcaaattttttttattattgcattttattttgaccctggactgctgctatgaacaatagaatatgcatttggaaagtaagaaagtttcatggattagagtgactgaaaaacatatccagttagaaaattgtgcttttttttttttttttttttttttttgtcattgatttgtgctgggactgctatacttgacattatactgcaaacaaaacttaaagagataagcattaaacctattgtgctgttaacaacgttagtggacacttgtaagtcaatcagtgttaaagtatttgtaaatagaagcaagctattattaacaacttttgtgtacttataatgttcacctaaaaatgttgtagcataattctgtgttttatggttgcttctgtccttctttttatttacctctttgttgttatttttgttgtttctttcagtgaggtgtttctgtgttagtagtctgtcttgacacacattgttcaaacaatctcaagcacttgtgtttaaaaaaggttctgaaatcttgcttctcatatgatagcttatgatgccggaattctgtaaacaataaagatgaaagaaaaaatgaaaactttatacaaaaaaggacttctgcaaaagcttggaaattcagaacctattttttatcatcttattttcaaagtaggcaaaagcaaaatcacttaattagtaccattaagtgagagagtaatggaaaactgttatccatcaaaagtgatataatatcctgtacttgtcactcatgtaaaactaatgtatcaaaattagcatatatggaagaaaaatcactattcaaaaatagtttcaattgggcaaatgtgtgtctacaactttgttgaaatggcagagtctgtgttgatcctcatatacaataatgttgttgtaacacaagtgttattagaccatagccacaaaatatttaatgtgttgtgccttcatgatgtaacagaacattctccaggtagggtagttgggggaaataaagggataaatctctaattattgctgtttaactgtttgttatcatagttggtcaatgcctggcaggtaccagcatattgtcacttaggtcaaaccaataaagtgacaactaatgttaataagatctcagttgcacgtgcaaacaaatccaaattcgaacattcttaggaggtttttgttaaggcatgacagatgatttaaacaaataaatagcatgcaacaaaatgtctttattgaaagaagtggaagttatcttaatgccacggttcaccatcaatttaaaagtaaaaaaaacaaaaaaaaaacaaaaaatttaaaaaaaaggtttgctaatctgatagttaatttgttcttaccaaaaaataaaattactttgtaaatagcagttcacatttttccacagtataatggaaaataatgggtaggggtgcattgcttattgaagtacatttttgtcggtttgtgaggggtgtttgatgactttgacagaataaatatctaaacaattatccttgttactgctttgccagttctacgttatttacaattattcagctcttgcaataaatgttctgaattcc

SEQ ID NO: 24841 - DNA, 5834 bp, Homo sapiens
  source 1..5834: mol_type = unassigned DNA
agagagaggagagggagaaggagagaggggcagaggggaagggagagagggagagcacgcgagacggaaaggagcgcctcagagtctctgaagcacgcaagagataaccgattaggaatttttcgggcaactgtcacccggatagctgtcagagaatcatcatcaccgcaactctgacgtttcctacaagaagttagagacttaagcagtattggcatcggatggaaatggtatgcatgctgctgtggaaaatatccctgagctgaagaagtgcaactatgtgttgtgtgtgctaaatgcccagaagaacccagacccagtgggtaagagagacgaaatgtggagagaatgactaacgacaaatccgtgaatttgttctctggagttgctaatttgccagcccgaagcaacacattttacaaggaggaaacattttgctgcttctgatttctccccaaactggtgctaccagatgcatggctttctatgtgttggaacaaatcattcctaactgcagcatactgggaaaggggaaaggttgaggcaactaaccggctgtctccaaataagtgatgagatataatgcatcctccagtccatgcacgcttcctcttgcaatttgtgcatcattcctcagtggaaacctttaaaccctaaaatccaggaaaagaaaataaatacattatcatggacctgagggatttttacctgttggctgctctgattgcctgtttaaggctggattccgcaatagctcaagaacttatttacactattagagaggaattgcctgaaaatgtgcccataggaaacataccaaaggatctgaacatttctcacatcaatgctgccacagggaccagcgccagccttgtctacagactggtttctaaagctggggatgcccctttggtgaaagtttccagcagcactggggaaattttcacaacctccaacagaatagacagagaaaaactctgtgctggcgcctcatatgctgaggagaatgagtgtttctttgaacttgaggtggtgatcctccccaatgatttcttcaggctgatcaaaataaaaataattgtcaaggataccaatgataatgcccccatgtttccatctcctgtcatcaatatttccattccagaaaacactttgatcaacagccgctttccaattccatcagcaacagatcctgacacaggcttcaatggtgtacagcattatgaattgttaaatgggcagagtgtttttggactggatatcgtggaaactccagagggagagaagtggccacaactgattgttcagcaaaacttggatagagaacagaaagatacctatgtgatgaaaatcaaagtagaggatggaggcactccacagaaatccagtacggccatactgcaggtcacagtaagtgatgtaaatgacaacaggccagtgtttaaagagggtcaagtggaggtgcatattccagagaatgctcccgtaggtacctctgtaattcagctccatgccactgatgcagatataggcagtaatgctgaaatccggtacatttttggtgcccaggtcgcccctgcaaccaaaagactctttgctttaaataatactactgggctgattacagttcagaggtccttagatagagaggagacagccattcacaaagtgacagtgctggctagtgacggcagctccactcctgctcgagcaacggttaccatcaatgtcaccgatgtaaatgataaccctcctaatatagacctcaggtacattataagtcccatcaatggcaccgtgtatttatctgagaaagatcctgtcaatacaaagattgccctaattacagtttcagataaggacacagatgtgaatggcaaagtgatctgttttattgaaagagaggtcccatttcatttgaaggcggtatatgacaaccaatatttgttagagacctcttctttgttggactatgagggcaccaaagaattcagctttaaaattgttgcctctgattctgggaagcccagtttaaatcagactgccctggtaagggttaagcttgaggatgaaaatgacaacccaccaattttcaaccagcctgtaattgagctgtcagtttctgaaaacaaccgacgtgggttatacttaacaactattagtgccacagatgaagacagtgggaaaaatgcagacattgtttatcagcttggaccgaatgcctccttctttgatctggaccgaaaaacaggagttttgacagcctccagagtatttgacagagaagaacaagaacgattcatttttacagtaactgccagggacaatgggacccctcccctccaaagccaagcggctgtgattgttactgttctggatgagaatgacaatagccccaagtttactcataatcattttcaattttttgtgtctgagaatctgccaaagtatagtactgtgggggtaatcacagtgacagatgcagatgctggagagaataaagctgtgactctttccattctaaatgacaatgataattttgtgttggatccctattctggagtcataaagtcaaatgtctcatttgatagagagcagcagagttcctacacttttgatgtcaaagccactgatggaggacaaccacctcgttcctctactgcaaaagtaactatcaacgtcatggatgtcaatgacaacagcccagttgtcatttctccaccgtctaatacttcctttaagttggtgcccctctcagccattcctggctccgtggtagcagaagtttttgcagtggatgttgacactggaatgaacgctgaactaaagtatactatagtgagtggaaacaataaaggcttattccggattgatccagtaacaggtaacattactctggaagaaaaaccagcacctactgatgtgggattgcatcgtttggtggtcaacataagtgacctggggtaccctaagtctttgcacacgcttgtgcttgtattcctttatgttaacgacactgctggaaatgcctcctatatctatgacttgatccgcaggactatggagaccccgttggacaggaacataggggatagtagccaaccctatcaaaatgaggactatctaaccatcatgattgccatcatcgccggtgccatggtggtcattgttgtgatcttcgtcaccgttctggtgcgctgtcgccatgcatcaaggttcaaagcagctcagaggagcaagcaaggtgccgaatggatgtccccaaaccaggagaacaagcaaaacaagaaaaagaaaagaaagaaaaggaagtctcccaaaagctctcttttgaactttgttactatcgaagagtccaaacccgatgatgcagttcatgaacctatcaatgggacaataagcctgccggctgaactggaggagcaaagtataggaagatttgactggggcccggcacctccaacaacattcaagcctaacagtcctgacctggccaagcactacaaatctgcttctccacagcctgcttttcatctcaaaccagacactccagtttccgtgaaaaagcaccacgtgattcaggaactccctttggacaacacctttgttgggggttgtgacaccctttctaaacgctcttccactagttcagatcacttcagtgcctcagagtgcagttcccaaggaggcttcaagacaaagggccccttacacaccagacagtcgcagcgccgtgttacgtttcatctccctgatggctcccaggaaagctgcagtgacagtggtctaggagaccatgagccggtgggtagtggaaccctgatctcacaccctcttcctctggttcagccacaggacgaattctatgaccaggcctctccggacaagaggactgaagcagatggcaactctgatcccaactctgatgggcctttgggtccccgaggattagctgaagctacagagatgtgcactcaagagtgcttggttttgggtcactctgataattgctggatgcctcctggcttgggtccatatcaacaccccaaatctcctctctcaacctttgcaccccagaaagaatgggtgaagaaggacaagcttgtgaatgggcacaccctgaccagagcctggaaagaagacagcaacaggaaccagttcaatgaccgtaagcagtatggctccaatgaaggccatttcaacaatggcagccacatgacagacattcctctggcaaatctgaagtcttataagcaagcaggaggtgctactgagagtcctaaggagcaccaactctaagaaaaggctatatgggacctaataactttaaatagacatgctaataccgtgtgcgtcagagctttatgtattcaatagatctctacaactatgccccttctagcagggatacctataactttgtgttagcaccatggagaatacaatgtttttgcaacatatgagagaagatagttctagccatgcaattttgtttactagaattgattacactctccagagatctctccattgtgcaaattttttttattattgcattttattttgaccctggactgctgctatgaacaatagaatatgcatttggaaagtaagaaagtttcatggattagagtgactgaaaaacatatccagttagaaaattgtgcttttttttttttttttttttttttttgtcattgatttgtgctgggactgctatacttgacattatactgcaaacaaaacttaaagagataagcattaaacctattgtgctgttaacaacgttagtggacacttgtaagtcaatcagtgttaaagtatttgtaaatagaagcaagctattattaacaacttttgtgtacttataatgttcacctaaaaatgttgtagcataattctgtgttttatggttgcttctgtccttctttttatttacctctttgttgttatttttgttgtttctttcagtgaggtgtttctgtgttagtagtctgtcttgacacacattgttcaaacaatctcaagcacttgtgtttaaaaaaggttctgaaatcttgcttctcatatgatagcttatgatgccggaattctgtaaacaataaagatgaaagaaaaaatgaaaactttatacaaaaaaggacttctgcaaaagcttggaaattcagaacctattttttatcatcttattttcaaagtaggcaaaagcaaaatcacttaattagtaccattaagtgagagagtaatggaaaactgttatccatcaaaagtgatataatatcctgtacttgtcactcatgtaaaactaatgtatcaaaattagcatatatggaagaaaaatcactattcaaaaatagtttcaattgggcaaatgtgtgtctacaactttgttgaaatggcagagtctgtgttgatcctcatatacaataatgttgttgtaacacaagtgttattagaccatagccacaaaatatttaatgtgttgtgccttcatgatgtaacagaacattctccaggtagggtagttgggggaaataaagggataaatctctaattattgctgtttaactgtttgttatcatagttggtcaatgcctggcaggtaccagcatattgtcacttaggtcaaaccaataaagtgacaactaatgttaataagatctcagttgcacgtgcaaacaaatccaaattcgaacattcttaggaggtttttgttaaggcatgacagatgatttaaacaaataaatagcatgcaacaaaatgtctttattgaaagaagtggaagttatcttaatgccacggttcaccatcaatttaaaagtaaaaaaaacaaa

SEQ ID NO: 24842 - DNA, 6226 bp, Homo sapiens
  source 1..6226: mol_type = unassigned DNA
agttcagagagaggagagggagaaggagagaggggcagaggggaagggagagagggagagcacgcgagacggaaaggagcgcctcagagtctctgaagcacgcaagagataaccgattaggaatttttcgggcaactgtcacccggatagctgtcagagaatcatcatcaccgcaactctgacgtttcctacaagaagttagagacttaagcagtattggcatcggatggaaatggtatgcatgctgctgtggaaaatatccctgagctgaagaagtgcaactatgtgttgtgtgtgctaaatgcccagaagaacccagacccagtgggtaagagagacgaaatgtggagagaatgactaacgacaaatccgtgaatttgttctctggagttgctaatttgccagcccgaagcaacacattttacaaggaggaaacattttgctgcttctgatttctccccaaactggtgctaccagatgcatggctttctatgtgttggaacaaatcattcctaactgcagcatactgggaaaggggaaaggttgaggcaactaaccggctgtctccaaataagtgatgagatataatgcatcctccagtccatgcacgcttcctcttgcaatttgtgcatcattcctcagtggaaacctttaaaccctaaaatccaggaaaagaaaataaatacattatcatggacctgagggatttttacctgttggctgctctgattgcctgtttaaggctggattccgcaatagctcaagaacttatttacactattagagaggaattgcctgaaaatgtgcccataggaaacataccaaaggatctgaacatttctcacatcaatgctgccacagggaccagcgccagccttgtctacagactggtttctaaagctggggatgcccctttggtgaaagtttccagcagcactggggaaattttcacaacctccaacagaatagacagagaaaaactctgtgctggcgcctcatatgctgaggagaatgagtgtttctttgaacttgaggtggtgatcctccccaatgatttcttcaggctgatcaaaataaaaataattgtcaaggataccaatgataatgcccccatgtttccatctcctgtcatcaatatttccattccagaaaacactttgatcaacagccgctttccaattccatcagcaacagatcctgacacaggcttcaatggtgtacagcattatgaattgttaaatgggcagagtgtttttggactggatatcgtggaaactccagagggagagaagtggccacaactgattgttcagcaaaacttggatagagaacagaaagatacctatgtgatgaaaatcaaagtagaggatggaggcactccacagaaatccagtacggccatactgcaggtcacagtaagtgatgtaaatgacaacaggccagtgtttaaagagggtcaagtggaggtgcatattccagagaatgctcccgtaggtacctctgtaattcagctccatgccactgatgcagatataggcagtaatgctgaaatccggtacatttttggtgcccaggtcgcccctgcaaccaaaagactctttgctttaaataatactactgggctgattacagttcagaggtccttagatagagaggagacagccattcacaaagtgacagtgctggctagtgacggcagctccactcctgctcgagcaacggttaccatcaatgtcaccgatgtaaatgataaccctcctaatatagacctcaggtacattataagtcccatcaatggcaccgtgtatttatctgagaaagatcctgtcaatacaaagattgccctaattacagtttcagataaggacacagatgtgaatggcaaagtgatctgttttattgaaagagaggtcccatttcatttgaaggcggtatatgacaaccaatatttgttagagacctcttctttgttggactatgagggcaccaaagaattcagctttaaaattgttgcctctgattctgggaagcccagtttaaatcagactgccctggtaagggttaagcttgaggatgaaaatgacaacccaccaattttcaaccagcctgtaattgagctgtcagtttctgaaaacaaccgacgtgggttatacttaacaactattagtgccacagatgaagacagtgggaaaaatgcagacattgtttatcagcttggaccgaatgcctccttctttgatctggaccgaaaaacaggagttttgacagcctccagagtatttgacagagaagaacaagaacgattcatttttacagtaactgccagggacaatgggacccctcccctccaaagccaagcggctgtgattgttactgttctggatgagaatgacaatagccccaagtttactcataatcattttcaattttttgtgtctgagaatctgccaaagtatagtactgtgggggtaatcacagtgacagatgcagatgctggagagaataaagctgtgactctttccattctaaatgacaatgataattttgtgttggatccctattctggagtcataaagtcaaatgtctcatttgatagagagcagcagagttcctacacttttgatgtcaaagccactgatggaggacaaccacctcgttcctctactgcaaaagtaactatcaacgtcatggatgtcaatgacaacagcccagttgtcatttctccaccgtctaatacttcctttaagttggtgcccctctcagccattcctggctccgtggtagcagaagtttttgcagtggatgttgacactggaatgaacgctgaactaaagtatactatagtgagtggaaacaataaaggcttattccggattgatccagtaacaggtaacattactctggaagaaaaaccagcacctactgatgtgggattgcatcgtttggtggtcaacataagtgacctggggtaccctaagtctttgcacacgcttgtgcttgtattcctttatgttaacgacactgctggaaatgcctcctatatctatgacttgatccgcaggactatggagaccccgttggacaggaacataggggatagtagccaaccctatcaaaatgaggactatctaaccatcatgattgccatcatcgccggtgccatggtggtcattgttgtgatcttcgtcaccgttctggtgcgctgtcgccatgcatcaaggttcaaagcagctcagaggagcaagcaaggtgccgaatggatgtccccaaaccaggagaacaagcaaaacaagaaaaagaaaagaaagaaaaggaagtctcccaaaagctctcttttgaactttgttactatcgaagagtccaaacccgatgatgcagttcatgaacctatcaatgggacaataagcctgccggctgaactggaggagcaaagtataggaagatttgactggggcccggcacctccaacaacattcaagcctaacagtcctgacctggccaagcactacaaatctgcttctccacagcctgcttttcatctcaaaccagacactccagtttccgtgaaaaagcaccacgtgattcaggaactccctttggacaacacctttgttgggggttgtgacaccctttctaaacgctcttccactagttcagatcacttcagtgcctcagagtgcagttcccaaggaggcttcaagacaaagggccccttacacaccagacagtgtaactcacacagcaaaagtgacaatattcctgtcactcctcagaaatgtcccagctccacgggtttccacattcaggagaatgaagaaagccattacgagtcgcagcgccgtgttacgtttcatctccctgatggctcccaggaaagctgcagtgacagtggtctaggagaccatgagccggtgggtagtggaaccctgatctcacaccctcttcctctggttcagccacaggacgaattctatgaccaggcctctccggacaagaggactgaagcagatggcaactctgatcccaactctgatgggcctttgggtccccgaggattagctgaagctacagagatgtgcactcaagagtgcttggttttgggtcactctgataattgctggatgcctcctggcttgggtccatatcaacaccccaaatctcctctctcaacctttgcaccccagaaagaatgggtgaagaaggacaagcttgtgaatgggcacaccctgaccagagcctggaaagaagacagcaacaggaaccagttcaatgaccgtaagcagtatggctccaatgaaggccatttcaacaatggcagccacatgacagacattcctctggcaaatctgaagtcttataagcaagcaggaggtgctactgagagtcctaaggagcaccaactctaagaaaaggctatatgggacctaataactttaaatagacatgctaataccgtgtgcgtcagagctttatgtattcaatagatctctacaactatgccccttctagcagggatacctataactttgtgttagcaccatggagaatacaatgtttttgcaacatatgagagaagatagttctagccatgcaattttgtttactagaattgattacactctccagagatctctccattgtgcaaattttttttattattgcattttattttgaccctggactgctgctatgaacaatagaatatgcatttggaaagtaagaaagtttcatggattagagtgactgaaaaacatatccagttagaaaattgtgcttttttttttttttttttttttttttgtcattgatttgtgctgggactgctatacttgacattatactgcaaacaaaacttaaagagataagcattaaacctattgtgctgttaacaacgttagtggacacttgtaagtcaatcagtgttaaagtatttgtaaatagaagcaagctattattaacaacttttgtgtacttataatgttcacctaaaaatgttgtagcataattctgtgttttatggttgcttctgtccttctttttatttacctctttgttgttatttttgttgtttctttcagtgaggtgtttctgtgttagtagtctgtcttgacacacattgttcaaacaatctcaagcacttgtgtttaaaaaaggttctgaaatcttgcttctcatatgatagcttatgatgccggaattctgtaaacaataaagatgaaagaaaaaatgaaaactttatacaaaaaaggacttctgcaaaagcttggaaattcagaacctattttttatcatcttattttcaaagtaggcaaaagcaaaatcacttaattagtaccattaagtgagagagtaatggaaaactgttatccatcaaaagtgatataatatcctgtacttgtcactcatgtaaaactaatgtatcaaaattagcatatatggaagaaaaatcactattcaaaaatagtttcaattgggcaaatgtgtgtctacaactttgttgaaatggcagagtctgtgttgatcctcatatacaataatgttgttgtaacacaagtgttattagaccatagccacaaaatatttaatgtgttgtgccttcatgatgtaacagaacattctccaggtagggtagttgggggaaataaagggataaatctctaattattgctgtttaactgtttgttatcatagttggtcaatgcctggcaggtaccagcatattgtcacttaggtcaaaccaataaagtgacaactaatgttaataagatctcagttgcacgtgcaaacaaatccaaattcgaacattcttaggaggtttttgttaaggcatgacagatgatttaaacaaataaatagcatgcaacaaaatgtctttattgaaagaagtggaagttatcttaatgccacggttcaccatcaatttaaaagtaaaaaaaacaaaaaaaaaacaaaaaatttaaaaaaaaggtttgctaatctgatagttaatttgttcttaccaaaaaataaaattactttgtaaatagcagttcacatttttccacagtataatggaaaataatgggtaggggtgcattgcttattgaagtacatttttgtcggtttgtgaggggtgtttgatgactttgacagaataaatatctaaacaattatccttgttactgctttgccagttctacgttatttacaattattcagctcttgcaataaatgttctgaattcctg

SEQ ID NO: 24843 - DNA, 2571 bp, Homo sapiens
  source 1..2571: mol_type = unassigned DNA
atggtgttttctaggagagggggcctgggagcccgggatctgcttctttggcttctgctcctcgcagcctgggaggtggggagcggccagctccactactcgatcccggaggaagccaaacacggcaccttcgttggccgcgttgctcaggacctgggactggagctggcggagctggtgcctcgcctgttccgggtggcgtccaaaacacacagggaccttctggaggtaaatctgcagaatggcattttgtttgtgaattctcggatcgatcgcgaggagctgtgccagtggagcgcggagtgcagcatccacctggagttgatcgccgacaggccgctgcaggttttccatgtggaggtgaaggtgaaagacattaacgataatccacccgtcttcaggggcagagaacaaataatatttattcctgaatctagactcctgaattcgcgttttccgatagaaggagctgctgatgcagacattggtgctaacgctcttctaacgtacacgctcagcccgagtgattatttctctttggatgtagaggcaagtgatgaactgagtaaatctctttggcttgaattgagaaaatatttggatagagaagaaacaccagaacttcacttattactgactgccactgatgggggcaaaccggagctgcaaggtacagttgagctgctgatcaccgtcctcgacgttaatgataacgccccactgtttgaccaggccgtatacagagtccacttgttagagactacagcaaatggaacattagtgaccacattaaatgcctctgatgctgacgaaggtgtaaatggtgaagtcgtcttttcctttgacagtggtatttctcgtgacattcaagaaaaattcaaagttgattccagctcaggagaaattaggttaattgataaactggattatgaagaaacaaaatcctacgaaattcaagtaaaggcagttgataaaggaagtcctccgatgtcaaatcactgtaaggttttggtgaaagtgctggatgtaaatgataatgctccagaactggcggtcacttcattgtatttgcctatcagagaggacgctccactcagcaccgtcatcgccctcatcaccgtgtctgaccgtgactcaggtgccaacgggcaggtgacttgctccttaatgccccacgtccccttcaagctggtgtccaccttcaagaattactactcgttggtgttggacagcgccctggatcgcgagagcctgtcggtctatgagctggtggtgaccgcgcgggacgggggctcgccttcgctgtgggccacggccagggtgtccgtggaggtggccgacgtgaatgacaacgcgcctgcgttcgcgcagcccgagtacacagtattcgtgaaggagaacaacccgccgggctgccacatcttcacggtgtctgcgcgggacgcggacgcgcaggagaacgcgctggtgtcctattcgctggtggaacggcgggtgggcgagcgcgcgctgtcgaactacgtgtcagtgcacgcggagagcggcaaggtgtacgcactgcagcccctggaccacgaggagctggagctgctgcagttccaggtgagcgcgcgggatgcgggcgtgccgcctctgggcagcaacgtgacgctgcaggtgttcgtgctggacgagaacgacaacgcgccggcgctgctggcgcctcgagtgggtggcactattggtgcagtcagtgagctggtgccgcgattggtgggtgcgggtcatgtggtggcgaaggtgcgcgcagtggacgccgactcgggctacaacgcgtggctgtcctatgaactgcagccggcagcaggcggcgcgcgcatcccgttccgcgtggggctgtacacgggcgagatcagcacgactcgtgtcctggacgaggctgacttgtcgcgctaccgccttctggtgctagtgaaggatcacggtgagccggcgctgacagccacggccactgtgcttgtatctctggtggagagcggccaggcgccaaaggcgtcttcgcgggcgtcggtgggtgtcgcgggcccagaggcggcgctggtggatgtcaacgtgtacctgatcatcgccatctgcgcggtgtccagcctgctggtgctcacactgctgctgtacacggcgctgcggtgctcagtgccgcccactgagggtgcgtatgtgccgggcaagcccactctggtgtgctccagcgcgttggggagctggtcgaactcacagcagaggcggcagagggtgtgctctagcgagggcccacccaagaccgacctcatggccttcagcccaggcctatctccaagtcttaacacgtcagaaagaaatgaacaaccagaagcaaatttggatctttctggtaatgtaagtccaactttcgagttttggctttaaatatttttcatatttaacttgtctaatcatcttttcaaatatcactttaaaaaatgtcttcaaggtgttcactaacgttgaaataaatcataccattgaatgtagatatcctattaatggcagttttgtcttgaatggaactagaaa

SEQ ID NO: 24844 - DNA, 4468 bp, Homo sapiens
  source 1..4468: mol_type = unassigned DNA
atggtgttttctaggagagggggcctgggagcccgggatctgcttctttggcttctgctcctcgcagcctgggaggtggggagcggccagctccactactcgatcccggaggaagccaaacacggcaccttcgttggccgcgttgctcaggacctgggactggagctggcggagctggtgcctcgcctgttccgggtggcgtccaaaacacacagggaccttctggaggtaaatctgcagaatggcattttgtttgtgaattctcggatcgatcgcgaggagctgtgccagtggagcgcggagtgcagcatccacctggagttgatcgccgacaggccgctgcaggttttccatgtggaggtgaaggtgaaagacattaacgataatccacccgtcttcaggggcagagaacaaataatatttattcctgaatctagactcctgaattcgcgttttccgatagaaggagctgctgatgcagacattggtgctaacgctcttctaacgtacacgctcagcccgagtgattatttctctttggatgtagaggcaagtgatgaactgagtaaatctctttggcttgaattgagaaaatatttggatagagaagaaacaccagaacttcacttattactgactgccactgatgggggcaaaccggagctgcaaggtacagttgagctgctgatcaccgtcctcgacgttaatgataacgccccactgtttgaccaggccgtatacagagtccacttgttagagactacagcaaatggaacattagtgaccacattaaatgcctctgatgctgacgaaggtgtaaatggtgaagtcgtcttttcctttgacagtggtatttctcgtgacattcaagaaaaattcaaagttgattccagctcaggagaaattaggttaattgataaactggattatgaagaaacaaaatcctacgaaattcaagtaaaggcagttgataaaggaagtcctccgatgtcaaatcactgtaaggttttggtgaaagtgctggatgtaaatgataatgctccagaactggcggtcacttcattgtatttgcctatcagagaggacgctccactcagcaccgtcatcgccctcatcaccgtgtctgaccgtgactcaggtgccaacgggcaggtgacttgctccttaatgccccacgtccccttcaagctggtgtccaccttcaagaattactactcgttggtgttggacagcgccctggatcgcgagagcctgtcggtctatgagctggtggtgaccgcgcgggacgggggctcgccttcgctgtgggccacggccagggtgtccgtggaggtggccgacgtgaatgacaacgcgcctgcgttcgcgcagcccgagtacacagtattcgtgaaggagaacaacccgccgggctgccacatcttcacggtgtctgcgcgggacgcggacgcgcaggagaacgcgctggtgtcctattcgctggtggaacggcgggtgggcgagcgcgcgctgtcgaactacgtgtcagtgcacgcggagagcggcaaggtgtacgcactgcagcccctggaccacgaggagctggagctgctgcagttccagccacgacagcccaaccctgactggcgttactctgcctccctgagagcaggcatgcacagctctgtgcacctagaggaggctggcattctacgggctggtccaggagggcctgatcagcagtggccaacagtatccagtgcaacaccagaaccagaggcaggagaagtgtcccctccagtcggtgcgggtgtcaacagcaacagctggacctttaaatacggaccaggcaaccccaaacaatccggtcccggtgagttgcccgacaaattcattatcccaggatctcctgcaatcatctccatccggcaggagcctactaacagccaaattgacaaaagtgacttcataaccttcggcaaaaaggaggagaccaagaaaaagaagaaaaagaagaagggtaacaagacccaggagaaaaaagagaaagggaacagcacgactgacaacagtgaccagtgaggtcctcaaatggaaacaagccacttagccagtttttgtaataatggcaaatctctcccatgtagcaattccctgctcctttttcctatctacatgagccctcttagagacctcagaaatctgcagaaagttccctgtgtctgtctagaacgcatttaacaggttttgtcgtaaaagctttactaagtctggtgttaactctttctctccactctggcttgttttcagaacctaaaaagcagacccaagtttcctttctcctccgccgcaaaggagaggcttcccagccccgccagtgagaggttggactctctgccctgtgctccggggatcctgtcttgatgacacttgcagggcaggctgaaaagttttgagattgagcagcttgggagtttgtggccactgggtatgtgtggctaccgcgggtatgcgagtgccagatattggctgagacgagccagcttagactaattggtacaaggaaggcaagaaaacaaagacaaataaacagcggaagttatcagtatggaggggaagtgtaaacttaaagggaccagactttctaaatcttacaactcaagaggtggcagccaccctctaggagacaaaactacccccactgacaaggctttaggagaccctaaagtctgttggctgtgacgtcattatacctaaaatctgcatcatacctgcaagccaacagttcagtgttttaacagagaaccaccctgggaaacagaagcagatctgatgtgtttcctatacatgtcctgtgctcactttattaaaaattcttttgcacacaatgtttatgaaaaggccagatccttttccaatacttatgcaaaagcaaaagaaaaccccgacacctcacctttcgctgtttgttgtttcatagatttatttaaaaaaagagaaagtctatagctataaatctttaaagagaaatatgaatacaattcccctaaactctcctcaaaagagaattcagtctacagccatttaaatgatcattgctgctacagaagtgctttaagagaattgcctgaaacatctgtattatatcggccacctgccaatcacagctttactctttcaggtcactctggggctgcctcttgcatgtattactaaataaaatgatctctctttctctctctctctctcttttctaagaaacaattatgtgcactttgatacacaaccttctctaaccaactatatatcaagacccaaaaattgaagaaaaatattgttttctcatacagtgagcagatttttcaatctactaattctgtgacttgtcttggtgtgctagcctacaccttctctttggtttagttttccttttctataacactctgaattgctaatcttactaacacctatgatgttacctgaaatcaatctcccatatgtatgctgtatgctatgctaagactcctgaaatatacttactctgtgcttgtgtatgtgaatgttaatgcaactattacctagagtgaactttaagctttattgttgaatgtaattccattatatttccttttgtacacctgtgaaaaagtggagtagtgtttttttaaccattgttaatcagcttttgtgtatgaaagacacagtaaaatttctttcttaaatcaagatactggtgattcaaggaattttatttatggtccagccaagagccatctcgtgccaagacttctgctggcaagggaatggataaagctgttttgttctagtaacaattttggaatgaatactgacaatattccatgagggtgtgcaagcacaaattttaccaatctgacctctttgaagttgcagaatgctttgaaattctaatggtatctgaaatatcagctcatagaaagtaacaaaatttgctgtcaccttaaataagacattttaattttgttataatgtacaatttagaagtttgattaattatattatctatttaggcattaatataaaagaggtaggagtctgttatttaaaaaaagcattaaatttaaaaaaaaactgtcttgtctacttttagcttcattctcccatattttgaagggtgtgtaacttcagctctgcaggattgcatggggtaaaacttgttaccaacacatgtgaaccattgctacattgtaggttgtgatcattttgccccactgaagcccatgtatctgaccttacgtgccttttgaactaggagaatcgggctaatttattaatgatgataattataatgtatctgtacagcactttttacatttgcgaagtgctttccaatccatgttagttactagttattacagctgtaaggataaaacacgtcatgtggattcattttgaattggtgctattggtatttcctctgttattgctaataaatgaaaatggtggtatg

SEQ ID NO: 24845 - DNA, 5260 bp, Homo sapiens
  source 1..5260: mol_type = unassigned DNA
atggtgttttctaggagagggggcctgggagcccgggatctgcttctttggcttctgctcctcgcagcctgggaggtggggagcggccagctccactactcgatcccggaggaagccaaacacggcaccttcgttggccgcgttgctcaggacctgggactggagctggcggagctggtgcctcgcctgttccgggtggcgtccaaaacacacagggaccttctggaggtaaatctgcagaatggcattttgtttgtgaattctcggatcgatcgcgaggagctgtgccagtggagcgcggagtgcagcatccacctggagttgatcgccgacaggccgctgcaggttttccatgtggaggtgaaggtgaaagacattaacgataatccacccgtcttcaggggcagagaacaaataatatttattcctgaatctagactcctgaattcgcgttttccgatagaaggagctgctgatgcagacattggtgctaacgctcttctaacgtacacgctcagcccgagtgattatttctctttggatgtagaggcaagtgatgaactgagtaaatctctttggcttgaattgagaaaatatttggatagagaagaaacaccagaacttcacttattactgactgccactgatgggggcaaaccggagctgcaaggtacagttgagctgctgatcaccgtcctcgacgttaatgataacgccccactgtttgaccaggccgtatacagagtccacttgttagagactacagcaaatggaacattagtgaccacattaaatgcctctgatgctgacgaaggtgtaaatggtgaagtcgtcttttcctttgacagtggtatttctcgtgacattcaagaaaaattcaaagttgattccagctcaggagaaattaggttaattgataaactggattatgaagaaacaaaatcctacgaaattcaagtaaaggcagttgataaaggaagtcctccgatgtcaaatcactgtaaggttttggtgaaagtgctggatgtaaatgataatgctccagaactggcggtcacttcattgtatttgcctatcagagaggacgctccactcagcaccgtcatcgccctcatcaccgtgtctgaccgtgactcaggtgccaacgggcaggtgacttgctccttaatgccccacgtccccttcaagctggtgtccaccttcaagaattactactcgttggtgttggacagcgccctggatcgcgagagcctgtcggtctatgagctggtggtgaccgcgcgggacgggggctcgccttcgctgtgggccacggccagggtgtccgtggaggtggccgacgtgaatgacaacgcgcctgcgttcgcgcagcccgagtacacagtattcgtgaaggagaacaacccgccgggctgccacatcttcacggtgtctgcgcgggacgcggacgcgcaggagaacgcgctggtgtcctattcgctggtggaacggcgggtgggcgagcgcgcgctgtcgaactacgtgtcagtgcacgcggagagcggcaaggtgtacgcactgcagcccctggaccacgaggagctggagctgctgcagttccaggtgagcgcgcgggatgcgggcgtgccgcctctgggcagcaacgtgacgctgcaggtgttcgtgctggacgagaacgacaacgcgccggcgctgctggcgcctcgagtgggtggcactattggtgcagtcagtgagctggtgccgcgattggtgggtgcgggtcatgtggtggcgaaggtgcgcgcagtggacgccgactcgggctacaacgcgtggctgtcctatgaactgcagccggcagcaggcggcgcgcgcatcccgttccgcgtggggctgtacacgggcgagatcagcacgactcgtgtcctggacgaggctgacttgtcgcgctaccgccttctggtgctagtgaaggatcacggtgagccggcgctgacagccacggccactgtgcttgtatctctggtggagagcggccaggcgccaaaggcgtcttcgcgggcgtcggtgggtgtcgcgggcccagaggcggcgctggtggatgtcaacgtgtacctgatcatcgccatctgcgcggtgtccagcctgctggtgctcacactgctgctgtacacggcgctgcggtgctcagtgccgcccactgagggtgcgtatgtgccgggcaagcccactctggtgtgctccagcgcgttggggagctggtcgaactcacagcagaggcggcagagggtgtgctctagcgagggcccacccaagaccgacctcatggccttcagcccaggcctatctccaagtcttaacacgtcagaaagaaatgaacaaccagaagcaaatttggatctttctggtaatccacgacagcccaaccctgactggcgttactctgcctccctgagagcaggcatgcacagctctgtgcacctagaggaggctggcattctacgggctggtccaggagggcctgatcagcagtggccaacagtatccagtgcaacaccagaaccagaggcaggagaagtgtcccctccagtcggtgcgggtgtcaacagcaacagctggacctttaaatacggaccaggcaaccccaaacaatccggtcccggtgagttgcccgacaaattcattatcccaggatctcctgcaatcatctccatccggcaggagcctactaacagccaaattgacaaaagtgacttcataaccttcggcaaaaaggaggagaccaagaaaaagaagaaaaagaagaagggtaacaagacccaggagaaaaaagagaaagggaacagcacgactgacaacagtgaccagtgaggtcctcaaatggaaacaagccacttagccagtttttgtaataatggcaaatctctcccatgtagcaattccctgctcctttttcctatctacatgagccctcttagagacctcagaaatctgcagaaagttccctgtgtctgtctagaacgcatttaacaggttttgtcgtaaaagctttactaagtctggtgttaactctttctctccactctggcttgttttcagaacctaaaaagcagacccaagtttcctttctcctccgccgcaaaggagaggcttcccagccccgccagtgagaggttggactctctgccctgtgctccggggatcctgtcttgatgacacttgcagggcaggctgaaaagttttgagattgagcagcttgggagtttgtggccactgggtatgtgtggctaccgcgggtatgcgagtgccagatattggctgagacgagccagcttagactaattggtacaaggaaggcaagaaaacaaagacaaataaacagcggaagttatcagtatggaggggaagtgtaaacttaaagggaccagactttctaaatcttacaactcaagaggtggcagccaccctctaggagacaaaactacccccactgacaaggctttaggagaccctaaagtctgttggctgtgacgtcattatacctaaaatctgcatcatacctgcaagccaacagttcagtgttttaacagagaaccaccctgggaaacagaagcagatctgatgtgtttcctatacatgtcctgtgctcactttattaaaaattcttttgcacacaatgtttatgaaaaggccagatccttttccaatacttatgcaaaagcaaaagaaaaccccgacacctcacctttcgctgtttgttgtttcatagatttatttaaaaaaagagaaagtctatagctataaatctttaaagagaaatatgaatacaattcccctaaactctcctcaaaagagaattcagtctacagccatttaaatgatcattgctgctacagaagtgctttaagagaattgcctgaaacatctgtattatatcggccacctgccaatcacagctttactctttcaggtcactctggggctgcctcttgcatgtattactaaataaaatgatctctctttctctctctctctctcttttctaagaaacaattatgtgcactttgatacacaaccttctctaaccaactatatatcaagacccaaaaattgaagaaaaatattgttttctcatacagtgagcagatttttcaatctactaattctgtgacttgtcttggtgtgctagcctacaccttctctttggtttagttttccttttctataacactctgaattgctaatcttactaacacctatgatgttacctgaaatcaatctcccatatgtatgctgtatgctatgctaagactcctgaaatatacttactctgtgcttgtgtatgtgaatgttaatgcaactattacctagagtgaactttaagctttattgttgaatgtaattccattatatttccttttgtacacctgtgaaaaagtggagtagtgtttttttaaccattgttaatcagcttttgtgtatgaaagacacagtaaaatttctttcttaaatcaagatactggtgattcaaggaattttatttatggtccagccaagagccatctcgtgccaagacttctgctggcaagggaatggataaagctgttttgttctagtaacaattttggaatgaatactgacaatattccatgagggtgtgcaagcacaaattttaccaatctgacctctttgaagttgcagaatgctttgaaattctaatggtatctgaaatatcagctcatagaaagtaacaaaatttgctgtcaccttaaataagacattttaattttgttataatgtacaatttagaagtttgattaattatattatctatttaggcattaatataaaagaggtaggagtctgttatttaaaaaaagcattaaatttaaaaaaaaactgtcttgtctacttttagcttcattctcccatattttgaagggtgtgtaacttcagctctgcaggattgcatggggtaaaacttgttaccaacacatgtgaaccattgctacattgtaggttgtgatcattttgccccactgaagcccatgtatctgaccttacgtgccttttgaactaggagaatcgggctaatttattaatgatgataattataatgtatctgtacagcactttttacatttgcgaagtgctttccaatccatgttagttactagttattacagctgtaaggataaaacacgtcatgtggattcattttgaattggtgctattggtatttcctctgttattgctaataaatgaaaatggtggtatg

SEQ ID NO: 24846 - DNA, 5254 bp, Homo sapiens
  source 1..5254: mol_type = unassigned DNA
atggtttccagatgtagctgcctgggggtccagtgtctgctgctctcgcttcttctcctcgcagcctgggaggtggggagcggccagctccactactcagtctacgaggaggccagacacggcaccttcgtgggccgcatcgcgcaggacctggggctggagctggcggagctggtgcagcgcctgttccgggtggcgtccaaaagacacggggaccttctggaggtaaatctgcagaatggcattttgtttgtgaattctcggattgaccgcgaggagctgtgcgggcggagcgtggagtgcagcatccacctggaggtgatcgtggacaggccgctgcaggttttccatgtggacgtggaagtgaaggacattaacgacaacccgcccaggttctccgtaacagaacaaaagctctcaatacctgaatccagactgcttgactctcgatttccactagaaggcgcatctgatgcggatgttggagagaacgcattgcttacttacaaactcagtccaaatgagtattttgttcttgatattataaacaaaaaagacaaagacaaattcccagtgcttgttctgcggaagctgctggatcgtgaagaaaatcctcagctaaagttgttgttgacagcaactgatggaggcaaacctgaatttaccggatctgtttctctgctgatcctggtgttagatgccaatgataacgcccctatctttgacagaccggtttatgaagttaagatgtatgaaaatcaagtgaaccaaacattagtaatacggctcaacgcttctgattcggatgaaggaataaacaaggaaatgatgtattcatttagctctttggtcccacccacgataagaaggaaattttggataaacgaaaggacgggagaaataaaagtaaatgatgctattgactttgaggacagtaacacttatgaaattcatgtagatgttacagataagggaaacccacctatggttggtcactgcacggtcctagtggaactactggatgaaaatgataattcacctgaggtgattgtcacttctctgtctctcccagtgaaagaagatgctcaagtgggcaccgtcattgccctaatcagcgtttctgaccatgattcaggagccaacggacaggtcacctgctctctgacgcctcacgttccgttcaagctggtgtccacctacaagaattactactcattggtgctggacagcgctctggaccgcgagagggtgtcggcctatgagctggtggtgaccgcgcgggacgggggctcgcctccgctgtgggccacggccagcgtgtctgtggaggtggccgacgtgaacgacaacgcgcctgcgttcgcgcagtccgagtacacggtgttcgtgaaggagaacaacccgccaggctgccacatcttcacggtgtctgcgtgggacgcggacgcgcaggagaacgccctggtgtcctactctctggtggagcggcggttgggcgagcgctcgctgtcgagctacgtgtcggtgcacgcggagagcggcaaggtgtacgcgctgcagccgctggaccacgaggagctggagctgctacagttccaggtgagcgcgcgcgatgggggcgtgccgcctctgggcagcaacttgacgctgcaggtgttcgtgctggacgagaacgacaacgctcccgcgctgctggcgtctcccgctggcagcgcgggcggtgcagtcagtgagctggtgctgcggtcggtggttgcgggtcacgtggtggctaaggtgcgcgcagtggacgctgactctggatacaacgcgtggctgtcgtatgaattgcagtcggcggcggttggtgcacgcatcccgtttcgcgtggggctgtacacgggcgagatcagtacgacgcgcgctctggatgagactgactcgccacgccagcgcctactggtgctggtgaaggaccatggcgagccgtcgctgacggccacggccactgtgcttgtgtcgcttgtggagggcagccaggcacccaaggcctcgtcgcgggcttcagtgggcgtggcgcccgaggtggccctggtggatgtcaacgtgtacctgatcatcgccatctgcgcggtgtccagcttgctggtgctcacgctgctgctgtacactgcactgaggtgctcggcggcgcccaccgagggcgcatgtgggccggtgaagcccacgctggtgtgctctagcgcggtggggagctggtcttactcgcagcagaggcggcagagggtgtgttctggggagggcctgcccaaggcggacctcatggccttcagccccagccttccaccatgcccaatggtagatgtggacggggaagatcagtctattggaggggaccactctaggaagccacgacagcccaaccctgactggcgttactctgcctccctgagagcaggcatgcacagctctgtgcacctagaggaggctggcattctacgggctggtccaggagggcctgatcagcagtggccaacagtatccagtgcaacaccagaaccagaggcaggagaagtgtcccctccagtcggtgcgggtgtcaacagcaacagctggacctttaaatacggaccaggcaaccccaaacaatccggtcccggtgagttgcccgacaaattcattatcccaggatctcctgcaatcatctccatccggcaggagcctactaacagccaaattgacaaaagtgacttcataaccttcggcaaaaaggaggagaccaagaaaaagaagaaaaagaagaagggtaacaagacccaggagaaaaaagagaaagggaacagcacgactgacaacagtgaccagtgaggtcctcaaatggaaacaagccacttagccagtttttgtaataatggcaaatctctcccatgtagcaattccctgctcctttttcctatctacatgagccctcttagagacctcagaaatctgcagaaagttccctgtgtctgtctagaacgcatttaacaggttttgtcgtaaaagctttactaagtctggtgttaactctttctctccactctggcttgttttcagaacctaaaaagcagacccaagtttcctttctcctccgccgcaaaggagaggcttcccagccccgccagtgagaggttggactctctgccctgtgctccggggatcctgtcttgatgacacttgcagggcaggctgaaaagttttgagattgagcagcttgggagtttgtggccactgggtatgtgtggctaccgcgggtatgcgagtgccagatattggctgagacgagccagcttagactaattggtacaaggaaggcaagaaaacaaagacaaataaacagcggaagttatcagtatggaggggaagtgtaaacttaaagggaccagactttctaaatcttacaactcaagaggtggcagccaccctctaggagacaaaactacccccactgacaaggctttaggagaccctaaagtctgttggctgtgacgtcattatacctaaaatctgcatcatacctgcaagccaacagttcagtgttttaacagagaaccaccctgggaaacagaagcagatctgatgtgtttcctatacatgtcctgtgctcactttattaaaaattcttttgcacacaatgtttatgaaaaggccagatccttttccaatacttatgcaaaagcaaaagaaaaccccgacacctcacctttcgctgtttgttgtttcatagatttatttaaaaaaagagaaagtctatagctataaatctttaaagagaaatatgaatacaattcccctaaactctcctcaaaagagaattcagtctacagccatttaaatgatcattgctgctacagaagtgctttaagagaattgcctgaaacatctgtattatatcggccacctgccaatcacagctttactctttcaggtcactctggggctgcctcttgcatgtattactaaataaaatgatctctctttctctctctctctctcttttctaagaaacaattatgtgcactttgatacacaaccttctctaaccaactatatatcaagacccaaaaattgaagaaaaatattgttttctcatacagtgagcagatttttcaatctactaattctgtgacttgtcttggtgtgctagcctacaccttctctttggtttagttttccttttctataacactctgaattgctaatcttactaacacctatgatgttacctgaaatcaatctcccatatgtatgctgtatgctatgctaagactcctgaaatatacttactctgtgcttgtgtatgtgaatgttaatgcaactattacctagagtgaactttaagctttattgttgaatgtaattccattatatttccttttgtacacctgtgaaaaagtggagtagtgtttttttaaccattgttaatcagcttttgtgtatgaaagacacagtaaaatttctttcttaaatcaagatactggtgattcaaggaattttatttatggtccagccaagagccatctcgtgccaagacttctgctggcaagggaatggataaagctgttttgttctagtaacaattttggaatgaatactgacaatattccatgagggtgtgcaagcacaaattttaccaatctgacctctttgaagttgcagaatgctttgaaattctaatggtatctgaaatatcagctcatagaaagtaacaaaatttgctgtcaccttaaataagacattttaattttgttataatgtacaatttagaagtttgattaattatattatctatttaggcattaatataaaagaggtaggagtctgttatttaaaaaaagcattaaatttaaaaaaaaactgtcttgtctacttttagcttcattctcccatattttgaagggtgtgtaacttcagctctgcaggattgcatggggtaaaacttgttaccaacacatgtgaaccattgctacattgtaggttgtgatcattttgccccactgaagcccatgtatctgaccttacgtgccttttgaactaggagaatcgggctaatttattaatgatgataattataatgtatctgtacagcactttttacatttgcgaagtgctttccaatccatgttagttactagttattacagctgtaaggataaaacacgtcatgtggattcattttgaattggtgctattggtatttcctctgttattgctaataaatgaaaatggtggtatg

SEQ ID NO: 24847 - DNA, 3788 bp, Homo sapiens
  source 1..3788: mol_type = unassigned DNA
ccgctgattcgtcgatttgtaaaacaagagaaggataagatggtttccagatgtagctgcctgggggtccagtgtctgctgctctcgcttcttctcctcgcagcctgggaggtggggagcggccagctccactactcagtctacgaggaggccagacacggcaccttcgtgggccgcatcgcgcaggacctggggctggagctggcggagctggtgcagcgcctgttccgggtggcgtccaaaagacacggggaccttctggaggtaaatctgcagaatggcattttgtttgtgaattctcggattgaccgcgaggagctgtgcgggcggagcgtggagtgcagcatccacctggaggtgatcgtggacaggccgctgcaggttttccatgtggacgtggaagtgaaggacattaacgacaacccgcccaggttctccgtaacagaacaaaagctctcaatacctgaatccagactgcttgactctcgatttccactagaaggcgcatctgatgcggatgttggagagaacgcattgcttacttacaaactcagtccaaatgagtattttgttcttgatattataaacaaaaaagacaaagacaaattcccagtgcttgttctgcggaagctgctggatcgtgaagaaaatcctcagctaaagttgttgttgacagcaactgatggaggcaaacctgaatttaccggatctgtttctctgctgatcctggtgttagatgccaatgataacgcccctatctttgacagaccggtttatgaagttaagatgtatgaaaatcaagtgaaccaaacattagtaatacggctcaacgcttctgattcggatgaaggaataaacaaggaaatgatgtattcatttagctctttggtcccacccacgataagaaggaaattttggataaacgaaaggacgggagaaataaaagtaaatgatgctattgactttgaggacagtaacacttatgaaattcatgtagatgttacagataagggaaacccacctatggttggtcactgcacggtcctagtggaactactggatgaaaatgataattcacctgaggtgattgtcacttctctgtctctcccagtgaaagaagatgctcaagtgggcaccgtcattgccctaatcagcgtttctgaccatgattcaggagccaacggacaggtcacctgctctctgacgcctcacgttccgttcaagctggtgtccacctacaagaattactactcattggtgctggacagcgctctggaccgcgagagggtgtcggcctatgagctggtggtgaccgcgcgggacgggggctcgcctccgctgtgggccacggccagcgtgtctgtggaggtggccgacgtgaacgacaacgcgcctgcgttcgcgcagtccgagtacacggtgttcgtgaaggagaacaacccgccaggctgccacatcttcacggtgtctgcgtgggacgcggacgcgcaggagaacgccctggtgtcctactctctggtggagcggcggttgggcgagcgctcgctgtcgagctacgtgtcggtgcacgcggagagcggcaaggtgtacgcgctgcagccgctggaccacgaggagctggagctgctacagttccagccacgacagcccaaccctgactggcgttactctgcctccctgagagcaggcatgcacagctctgtgcacctagaggaggctggcattctacgggctggtccaggagggcctgatcagcagtggccaacagtatccagtgcaacaccagaaccagaggcaggagaagtgtcccctccagtcggtgcgggtgtcaacagcaacagctggacctttaaatacggaccaggcaaccccaaacaatccggtcccggtgagttgcccgacaaattcattatcccaggatctcctgcaatcatctccatccggcaggagcctactaacagccaaattgacaaaagtgacttcataaccttcggcaaaaaggaggagaccaagaaaaagaagaaaaagaagaagggtaacaagacccaggagaaaaaagagaaagggaacagcacgactgacaacagtgaccagtgaggtcctcaaatggaaacaagccacttagccagtttttgtaataatggcaaatctctcccatgtagcaattccctgctcctttttcctatctacatgagccctcttagagacctcagaaatctgcagaaagttccctgtgtctgtctagaacgcatttaacaggttttgtcgtaaaagctttactaagtctggtgttaactctttctctccactctggcttgttttcagaacctaaaaagcagacccaagtttcctttctcctccgccgcaaaggagaggcttcccagccccgccagtgagaggttggactctctgccctgtgctccggggatcctgtcttgatgacacttgcagggcaggctgaaaagttttgagattgagcagcttgggagtttgtggccactgggtatgtgtggctaccgcgggtatgcgagtgccagatattggctgagacgagccagcttagactaattggtacaaggaaggcaagaaaacaaagacaaataaacagcggaagttatcagtatggaggggaagtgtaaacttaaagggaccagactttctaaatcttacaactcaagaggtggcagccaccctctaggagacaaaactacccccactgacaaggctttaggagaccctaaagtctgttggctgtgacgtcattatacctaaaatctgcatcatacctgcaagccaacagttcagtgttttaacagagaaccaccctgggaaacagaagcagatctgatgtgtttcctatacatgtcctgtgctcactttattaaaaattcttttgcacacaatgtttatgaaaaggccagatccttttccaatacttatgcaaaagcaaaagaaaaccccgacacctcacctttcgctgtttgttgtttcatagatttatttaaaaaaagagaaagtctatagctataaatctttaaagagaaatatgaatacaattcccctaaactctcctcaaaagagaattcagtctacagccatttaaatgatcattgctgctacagaagtgctttaagagaattgcctgaaacatctgtattatatcggccacctgccaatcacagctttactctttcaggtcactctggggctgcctcttgcatgtattactaaataaaatgatctctctttctctctctctctctcttttctaagaaacaattatgtgcactttgatacacaaccttctctaaccaactatatatcaagacccaaaaattgaagaaaaatattgttttctcatacagtgagcagatttttcaatctactaattctgtgacttgtcttggtgtgctagcctacaccttctctttggtttagttttccttttctataacactctgaattgctaatcttactaacacctatgatgttacctgaaatcaatctcccatatgtatgctgtatgctatgctaagactcctgaaatatacttactctgtgcttgtgtatgtgaatgttaatgcaactattacctagagtgaactttaagctttattgttgaatgtaattccattatatttccttttgtacacctgtgaaaaagtggagtagtgtttttttaaccattgttaatcagcttttgtgtatgaaagacacagtaaaatttctttcttaaatcaagatactggtgattcaaggaattttatttatggtccagccaagagcca

SEQ ID NO: 24848 - DNA, 5257 bp, Homo sapiens
  source 1..5257: mol_type = unassigned DNA
atgtttggttttcagagaaggggattgggcaccccacgactacagctctggcttctcctcctcgaattctgggaggtggggagcggccagctccactactccgtctcggaggaggccaaacacggcaccttcgtgggccgcatcgcgcaggacctggggctggagctggcggagctggtgcagcgcctgttccgggtggcgtccaaaacacatggggaccttctggaggtaaatctgcagaatggcattttgtttgtgaattctcggatcgaccgcgaggagctgtgcgggcagagcgcggagtgcagcatccacctggaggtgatcgtggacaggccgctgcaggttttccatgtgaacgtggaggtgaaggacattaacgacaacccgccggtgttctcgctcagagaacaaaagctgctgattgcggaatctaagcaatcggactcgcgttttccactagagggagcttctgatgctgacattgaagagaatgctctattgacctacaggctaagtaaaaatgagtatttttctttagattcaccaacaaatggtaagcagattaaaagactgtcacttattttaaagaagtctctggatagagagaaaactccggaacttaatttgctgctaacagctacagacgggggaaaaccagagcttactggcaccgttcggctgttagtccaagtcttggatgtcaacgacaatgatccagagtttgataaatcagaatataaggtgagccttatggaaaatgctgctaaagaaactcttgtgctcaaactaaacgccacagaccgagacgaaggagtcaatggagaggtaacatactccttaatgtcaattaagcccaatggaagacacttatttacactagatcaaaataatggagaagtgagggtcaatggaactttagattatgaagaaaacaagttttataaaattgaagtacaggctacagataaggggactcccccaatggcaggtcactgtacagtctgggtggaaatcttggacaccaacgataactctcctgaagtcgccgtgacttccttgtccctcccagtacgagaggacgctcagcccagcacggtcattgccctgatcagcgtgtctgaccgtgactcaggtgtcaacggacaggtgacctgctcgctgacgccccacgttcccttcaagctggtgtccaccttcaagaattactactcgttggtgctggacagcgccctggaccgcgagaacgtgtgggcctatgaactggtggtgactgcgcgggatgggggttcgccttctctgtgggccacggccagggtatccgtggaggtggccgacgtgaacgacaatgcgcctgcgttcgcacagcccgagtacaccgtgttcgtgaaggagaacaacccaccaggctgccacatcttcacagtgtcggcgcgggacgcggacgcgcaggagaacgcgctggtgtcctactcgctggtggagcggcggttgggcgaccgcgcgctgtcgagctacgtgtcggtgcacgcggagagcggcaaggtgtacgcgctgcagccgttggaccacgaggagctggagctgctacagttccaggtgagcgcgcgcgatgcgggcgtgccgcctctgagcagcaacgtgacgctgcaggtgttcgtgctggacgagaacgacaacgcgccggcactgctggcgactcaggctggcagcgcgggaggcgcagttaacaagctagtaccgcggtcggtgggtgcgggccacgtggtggcgaaggtgcgcgcagtggatgcggactcaggctacaacgcgtggctttcatatgaattgcagccggcggcgggcggctcgcgcatcccgttccgcgtggggctgtacacgggcgagataagcacaacgcgtgccctggacgaggcagactcgccgcgccaccgacttctagtactggtgaaggatcacggtgagccggcgctgacggccacggccaccgtgctggtgtcgttggtggagagcggacaggcgccaaaggcctcttcccggactttggcgggcgccgcgagcccagaggctgcgctggtggatgtcaacgtgtacctgatcatcgccatctgcgtggtgtccagcctcctggtactcacgctgctgctgtatacggcgctgtggtggtcggcaacgcccactgagggcgcgtgcgcgccggggaagcccacgctggtgtgctcccgcgcggtggggagctggtcatactcgcagcagaggcggcagagggtgtgctctgaggagggcccacctaagacggacctcatggccttcagccccagtcttcctctaggtctgaataaagaggaggaaggggaaagacaggagccagggtcaaatcaccccggacagccacgacagcccaaccctgactggcgttactctgcctccctgagagcaggcatgcacagctctgtgcacctagaggaggctggcattctacgggctggtccaggagggcctgatcagcagtggccaacagtatccagtgcaacaccagaaccagaggcaggagaagtgtcccctccagtcggtgcgggtgtcaacagcaacagctggacctttaaatacggaccaggcaaccccaaacaatccggtcccggtgagttgcccgacaaattcattatcccaggatctcctgcaatcatctccatccggcaggagcctactaacagccaaattgacaaaagtgacttcataaccttcggcaaaaaggaggagaccaagaaaaagaagaaaaagaagaagggtaacaagacccaggagaaaaaagagaaagggaacagcacgactgacaacagtgaccagtgaggtcctcaaatggaaacaagccacttagccagtttttgtaataatggcaaatctctcccatgtagcaattccctgctcctttttcctatctacatgagccctcttagagacctcagaaatctgcagaaagttccctgtgtctgtctagaacgcatttaacaggttttgtcgtaaaagctttactaagtctggtgttaactctttctctccactctggcttgttttcagaacctaaaaagcagacccaagtttcctttctcctccgccgcaaaggagaggcttcccagccccgccagtgagaggttggactctctgccctgtgctccggggatcctgtcttgatgacacttgcagggcaggctgaaaagttttgagattgagcagcttgggagtttgtggccactgggtatgtgtggctaccgcgggtatgcgagtgccagatattggctgagacgagccagcttagactaattggtacaaggaaggcaagaaaacaaagacaaataaacagcggaagttatcagtatggaggggaagtgtaaacttaaagggaccagactttctaaatcttacaactcaagaggtggcagccaccctctaggagacaaaactacccccactgacaaggctttaggagaccctaaagtctgttggctgtgacgtcattatacctaaaatctgcatcatacctgcaagccaacagttcagtgttttaacagagaaccaccctgggaaacagaagcagatctgatgtgtttcctatacatgtcctgtgctcactttattaaaaattcttttgcacacaatgtttatgaaaaggccagatccttttccaatacttatgcaaaagcaaaagaaaaccccgacacctcacctttcgctgtttgttgtttcatagatttatttaaaaaaagagaaagtctatagctataaatctttaaagagaaatatgaatacaattcccctaaactctcctcaaaagagaattcagtctacagccatttaaatgatcattgctgctacagaagtgctttaagagaattgcctgaaacatctgtattatatcggccacctgccaatcacagctttactctttcaggtcactctggggctgcctcttgcatgtattactaaataaaatgatctctctttctctctctctctctcttttctaagaaacaattatgtgcactttgatacacaaccttctctaaccaactatatatcaagacccaaaaattgaagaaaaatattgttttctcatacagtgagcagatttttcaatctactaattctgtgacttgtcttggtgtgctagcctacaccttctctttggtttagttttccttttctataacactctgaattgctaatcttactaacacctatgatgttacctgaaatcaatctcccatatgtatgctgtatgctatgctaagactcctgaaatatacttactctgtgcttgtgtatgtgaatgttaatgcaactattacctagagtgaactttaagctttattgttgaatgtaattccattatatttccttttgtacacctgtgaaaaagtggagtagtgtttttttaaccattgttaatcagcttttgtgtatgaaagacacagtaaaatttctttcttaaatcaagatactggtgattcaaggaattttatttatggtccagccaagagccatctcgtgccaagacttctgctggcaagggaatggataaagctgttttgttctagtaacaattttggaatgaatactgacaatattccatgagggtgtgcaagcacaaattttaccaatctgacctctttgaagttgcagaatgctttgaaattctaatggtatctgaaatatcagctcatagaaagtaacaaaatttgctgtcaccttaaataagacattttaattttgttataatgtacaatttagaagtttgattaattatattatctatttaggcattaatataaaagaggtaggagtctgttatttaaaaaaagcattaaatttaaaaaaaaactgtcttgtctacttttagcttcattctcccatattttgaagggtgtgtaacttcagctctgcaggattgcatggggtaaaacttgttaccaacacatgtgaaccattgctacattgtaggttgtgatcattttgccccactgaagcccatgtatctgaccttacgtgccttttgaactaggagaatcgggctaatttattaatgatgataattataatgtatctgtacagcactttttacatttgcgaagtgctttccaatccatgttagttactagttattacagctgtaaggataaaacacgtcatgtggattcattttgaattggtgctattggtatttcctctgttattgctaataaatgaaaatggtggtatg

SEQ ID NO: 24849 - DNA, 5233 bp, Homo sapiens
  source 1..5233: mol_type = unassigned DNA
atggtgattatcggaccaagaggcccgggatcccagcgtctgctgctctcgcttctgctccttgcagcctgggaggtggggagcggccagctccactactccgtctacgaggaggccaaacacggcaccttcgtgggccgcatcgctcaggacctggggctggagctggcggagctggtgccgcgcctgttccgggtggcgtccaaaagacacggggaccttctggaggtaaatctgcagaatggcattttgtttgtgaattctcggatcgaccgcgagaagctgtgcgggcggagcgcggagtgcagtatccacctggaggtgatcgtggacaggccgctgcaggttttccatgtggacgtggaggtgaaggacattaacgacaacccgccggtgttcagagaaagggaacaaaaggtacctgtttctgaatctgcgcctctggactctcattttcctctagagggcgcttctgatgcggatatcggcgtaaactctcttttgacctatgcgttaagtctaaatgagaattttgagcttaaaataaaaacaaaaaaagataaaagtatattgcctgaattagttcttcggaagttattggacagagagcaaacgccaaaactcaatttattgctgatggtaatcgatggcggtaaaccagaactaacagggtctgtccagattcaaataaccgtcctggatgtgaatgacaatggtccggcgtttgataagcccagctataaagtagtgttgtctgaaaatgtccaaaacgacacaagagtgatccaactaaatgcttccgatccagacgaaggacttaatggagaaatttcctatgggatcaaaatgattttgccagtgagtgagaaatgtatgttttcaataaatccagacacaggtgaaattagaatttatggtgaactggattttgaagagaataatgcctatgaaattcaggttaacgccattgataaagggattccttccatggcaggtcacagcatggtcctggtggaagttctggacgtgaatgacaatgtccctgaagtaatggttacttcactgtcgctccctgtgcaagaggatgctcaggtgggtaccgtcattgccctgattagcgtgtcggatcgtgactctggagccaatggacaggtcatctgctcactgacacctcatgttcccttcaagctggtgtccacctacaagaattactactcgttggtgctggacagcgccctggaccgcgagagcgtgtcggcctatgagctggtggtgactgcgcgggatgggggctcgccttcgctgtgggccacggctagagtgtccgtggaggtggccgacgtgaacgacaatgcgcctgcgttcgcgcagcccgagtacacagtgttcgtgaaggagaacaacccgccgggctgccacatcttcacggtgtcggcatgggacgcggacgcgcagaagaacgcgctggtgtcctactcgctggtggagcggcgggtgggcgagcacgcactgtcgagctacgtgtcggtgcacgcggagagcggcaaggtgtacgcgctgcagccgctagaccacgaggagctggagctgctgcagttccaggtgagcgcgcgcgacgccggcgtgccgcctctgggcagcaacgtgacgctgcaggtgttcgtgctggacgagaacgacaacgcgccggcactgctggcgactccggctggcagcgcaggaggcgcagttagcgagttggtaccgcggtcggtgggtgcgggccacgtggtggcgaaagtgcgcgcggtggacgctgactccggctataacgcttggctgtcctacgagttgcaaccggcggcggtcggcgcgcacatcccgttccacgtggggctgtacactggcgagatcagcacgacacgcatcctggatgaggcggacgctccgcgccaccgcctgctggtgctggtgaaggaccacggtgagcccgcgctgacgtccacggccacggtgctggtgtcgctggtggagaacggccaggccccaaagacgtcgtcgcgggcctcagtgggcgctgtggatcccgaagcggctctggtggatattaacgtgtacctcatcatcgccatctgtgcggtgtccagcctgctggtgctcacgctgctgctgtacactgcgctgcgttgctcagcgccgcccaccgtgagccggtgcgcgccgggcaagcccacgctggtgtgctccagcgccgtggggagttggtcttactcgcagcagaggaggcagagggtgtgctctgcagagagcccgcccaagacggacctcatggccttcagcccaagccttcagctgtctcgagaagattgtttaaatcctcccagtgaaccacgacagcccaaccctgactggcgttactctgcctccctgagagcaggcatgcacagctctgtgcacctagaggaggctggcattctacgggctggtccaggagggcctgatcagcagtggccaacagtatccagtgcaacaccagaaccagaggcaggagaagtgtcccctccagtcggtgcgggtgtcaacagcaacagctggacctttaaatacggaccaggcaaccccaaacaatccggtcccggtgagttgcccgacaaattcattatcccaggatctcctgcaatcatctccatccggcaggagcctactaacagccaaattgacaaaagtgacttcataaccttcggcaaaaaggaggagaccaagaaaaagaagaaaaagaagaagggtaacaagacccaggagaaaaaagagaaagggaacagcacgactgacaacagtgaccagtgaggtcctcaaatggaaacaagccacttagccagtttttgtaataatggcaaatctctcccatgtagcaattccctgctcctttttcctatctacatgagccctcttagagacctcagaaatctgcagaaagttccctgtgtctgtctagaacgcatttaacaggttttgtcgtaaaagctttactaagtctggtgttaactctttctctccactctggcttgttttcagaacctaaaaagcagacccaagtttcctttctcctccgccgcaaaggagaggcttcccagccccgccagtgagaggttggactctctgccctgtgctccggggatcctgtcttgatgacacttgcagggcaggctgaaaagttttgagattgagcagcttgggagtttgtggccactgggtatgtgtggctaccgcgggtatgcgagtgccagatattggctgagacgagccagcttagactaattggtacaaggaaggcaagaaaacaaagacaaataaacagcggaagttatcagtatggaggggaagtgtaaacttaaagggaccagactttctaaatcttacaactcaagaggtggcagccaccctctaggagacaaaactacccccactgacaaggctttaggagaccctaaagtctgttggctgtgacgtcattatacctaaaatctgcatcatacctgcaagccaacagttcagtgttttaacagagaaccaccctgggaaacagaagcagatctgatgtgtttcctatacatgtcctgtgctcactttattaaaaattcttttgcacacaatgtttatgaaaaggccagatccttttccaatacttatgcaaaagcaaaagaaaaccccgacacctcacctttcgctgtttgttgtttcatagatttatttaaaaaaagagaaagtctatagctataaatctttaaagagaaatatgaatacaattcccctaaactctcctcaaaagagaattcagtctacagccatttaaatgatcattgctgctacagaagtgctttaagagaattgcctgaaacatctgtattatatcggccacctgccaatcacagctttactctttcaggtcactctggggctgcctcttgcatgtattactaaataaaatgatctctctttctctctctctctctcttttctaagaaacaattatgtgcactttgatacacaaccttctctaaccaactatatatcaagacccaaaaattgaagaaaaatattgttttctcatacagtgagcagatttttcaatctactaattctgtgacttgtcttggtgtgctagcctacaccttctctttggtttagttttccttttctataacactctgaattgctaatcttactaacacctatgatgttacctgaaatcaatctcccatatgtatgctgtatgctatgctaagactcctgaaatatacttactctgtgcttgtgtatgtgaatgttaatgcaactattacctagagtgaactttaagctttattgttgaatgtaattccattatatttccttttgtacacctgtgaaaaagtggagtagtgtttttttaaccattgttaatcagcttttgtgtatgaaagacacagtaaaatttctttcttaaatcaagatactggtgattcaaggaattttatttatggtccagccaagagccatctcgtgccaagacttctgctggcaagggaatggataaagctgttttgttctagtaacaattttggaatgaatactgacaatattccatgagggtgtgcaagcacaaattttaccaatctgacctctttgaagttgcagaatgctttgaaattctaatggtatctgaaatatcagctcatagaaagtaacaaaatttgctgtcaccttaaataagacattttaattttgttataatgtacaatttagaagtttgattaattatattatctatttaggcattaatataaaagaggtaggagtctgttatttaaaaaaagcattaaatttaaaaaaaaactgtcttgtctacttttagcttcattctcccatattttgaagggtgtgtaacttcagctctgcaggattgcatggggtaaaacttgttaccaacacatgtgaaccattgctacattgtaggttgtgatcattttgccccactgaagcccatgtatctgaccttacgtgccttttgaactaggagaatcgggctaatttattaatgatgataattataatgtatctgtacagcactttttacatttgcgaagtgctttccaatccatgttagttactagttattacagctgtaaggataaaacacgtcatgtggattcattttgaattggtgctattggtatttcctctgttattgctaataaatgaaaatggtggtatg

SEQ ID NO: 24850 - DNA, 5260 bp, Homo sapiens
  source 1..5260: mol_type = unassigned DNA
atgctgtcttcctggcaaggaggcccaagaccgcggcaactactgctctggcttctgatcctcgcagcctgggagacgggtagtggccagctccactactccgtccccgaggaagcaaaacacggcaccttcgtgggccgcatcgctcaggacctggggctggagctggcggagctggtgccgcgcctgttccgggtggcgtccaaaagacacggggaccttctggaggtaaatctgcagaatggcattttgtttgtgaattctcggatcgaccgcgaggagctgtgtgggcggagcgcggagtgcagcatccacctggaggtgatcgtggacaggcctctgcaggttttccatgtggaggtgaaggtgagggacattaacgacaacccgcccatattccctgaaagcaagaaacgaataatcattgcagaatctagacctccggaaactcgatttccactagatggcgcatccgatgcagatattggagtaaactcggcattgacctaccgactggatcccaacgattatttcactttggacgcacaaaacagtcttgagcaaatgtcttcattatcacttgtactgaggaaaacactggacagagaggaaattcaggaacatagtttattactgacagccagtgatggaggtaaacccgagctgactggcacagttcagctgctcatcacgattctggacgtgaatgacaacgccccggaattttaccaatccgtttataaagtgacggtgttagagaacgccttcaatggaacattagtgatcaagctaaatgccacagatcctgatgatggtacaaatggagatatagtttactcatttagaaggcctgtatggcctgcagtggtatatgcatttaccataaatccgaacaatggagaaattaggacaaaaggcaaactagatttcgaagaaaagaaattatatgaaatatccgtggaggcagttgacaaaggaaatattccaatggcgggtcattgtacccttttggtggaagtactagatgtaaatgataacgccccagaggttaccatcacttctttgtcactccccatcagagaagacactcagcctagcgccattattgccctaatcagtgtgtccgatcgtgactctggctcaaatggacaggtcacctgcaccttgacgccgcatgtccccttcaagctggtgtccacctacaagaactactactcattagtgctggacagcgccctggaccgcgagagcgtatcagcctatgaactggtggtgaccgcgcgggacgggggctcgccttcgctgtgggccacggccagcgtgtcggtgggggtggccgacgtgaacgacaacgcgccggcgttcgcgcagcccgagtacacggtgttcgtgaaggaaaacaatccgccgggctgccacatcttcacggtgtctgctcaggacgcggacgcacaggagaacgcgctggtctcctactcgctggtggagcggcgggtgggcgagcgtgcgctgtcgagctacgtgtcggtgcacgcggagagcggcaaggtgtacgcgctgcagccgttggaccacgaggagctggagctgttgcagttccaggtgagcgcgcgcgactctggcgtgccgcctctgggcagcaacgtgacgctgcaggtgttcgtgctggacgagaacgacaacgctccggcgctgctgacgcccggggctggcagcgcgggaggcacagtgagcgagctgatgccgcggtcggtgggtgcaggccacgtggtggcgaaggtgcgcgcggtggacgccgattcgggctacaatgcgtggctttcgtatgaattgcagctggcggcggtcggcgcgcgcatcccgttccgcgtggggctgtacactggcgagatcagcacgacgcgccctctggacgaggtggacgcgccgcaccaccgccttctggtgctggtgaaggaccacggtgagcccgcgctgacggccacggcaacggtgctgttgtcgctggtggagagcggccaagcgccacaggcttcgtcgagggcgtcggcaggcgctgtgggtccagaagcggcgctggtggatgtcaatgtttacttgatcattgccatctgcgcggtgtccagcctgttggtgctcacgttgctgctgtatactgcgctgcggtgctcggcaccgcccaccgagggcgcgtgcgcgccgggcaagcccactctagtgtgctccagcgcggcagggagttggtcgtactcgcagcagaggcggccgagggtgtgctctggggagggcccgcataagacggacctcatggccttcagtcccagccttcctccttgtctgggttctgcagagggaacaggccagagggaggaggactcagaatgcttgaaagagccacgacagcccaaccctgactggcgttactctgcctccctgagagcaggcatgcacagctctgtgcacctagaggaggctggcattctacgggctggtccaggagggcctgatcagcagtggccaacagtatccagtgcaacaccagaaccagaggcaggagaagtgtcccctccagtcggtgcgggtgtcaacagcaacagctggacctttaaatacggaccaggcaaccccaaacaatccggtcccggtgagttgcccgacaaattcattatcccaggatctcctgcaatcatctccatccggcaggagcctactaacagccaaattgacaaaagtgacttcataaccttcggcaaaaaggaggagaccaagaaaaagaagaaaaagaagaagggtaacaagacccaggagaaaaaagagaaagggaacagcacgactgacaacagtgaccagtgaggtcctcaaatggaaacaagccacttagccagtttttgtaataatggcaaatctctcccatgtagcaattccctgctcctttttcctatctacatgagccctcttagagacctcagaaatctgcagaaagttccctgtgtctgtctagaacgcatttaacaggttttgtcgtaaaagctttactaagtctggtgttaactctttctctccactctggcttgttttcagaacctaaaaagcagacccaagtttcctttctcctccgccgcaaaggagaggcttcccagccccgccagtgagaggttggactctctgccctgtgctccggggatcctgtcttgatgacacttgcagggcaggctgaaaagttttgagattgagcagcttgggagtttgtggccactgggtatgtgtggctaccgcgggtatgcgagtgccagatattggctgagacgagccagcttagactaattggtacaaggaaggcaagaaaacaaagacaaataaacagcggaagttatcagtatggaggggaagtgtaaacttaaagggaccagactttctaaatcttacaactcaagaggtggcagccaccctctaggagacaaaactacccccactgacaaggctttaggagaccctaaagtctgttggctgtgacgtcattatacctaaaatctgcatcatacctgcaagccaacagttcagtgttttaacagagaaccaccctgggaaacagaagcagatctgatgtgtttcctatacatgtcctgtgctcactttattaaaaattcttttgcacacaatgtttatgaaaaggccagatccttttccaatacttatgcaaaagcaaaagaaaaccccgacacctcacctttcgctgtttgttgtttcatagatttatttaaaaaaagagaaagtctatagctataaatctttaaagagaaatatgaatacaattcccctaaactctcctcaaaagagaattcagtctacagccatttaaatgatcattgctgctacagaagtgctttaagagaattgcctgaaacatctgtattatatcggccacctgccaatcacagctttactctttcaggtcactctggggctgcctcttgcatgtattactaaataaaatgatctctctttctctctctctctctcttttctaagaaacaattatgtgcactttgatacacaaccttctctaaccaactatatatcaagacccaaaaattgaagaaaaatattgttttctcatacagtgagcagatttttcaatctactaattctgtgacttgtcttggtgtgctagcctacaccttctctttggtttagttttccttttctataacactctgaattgctaatcttactaacacctatgatgttacctgaaatcaatctcccatatgtatgctgtatgctatgctaagactcctgaaatatacttactctgtgcttgtgtatgtgaatgttaatgcaactattacctagagtgaactttaagctttattgttgaatgtaattccattatatttccttttgtacacctgtgaaaaagtggagtagtgtttttttaaccattgttaatcagcttttgtgtatgaaagacacagtaaaatttctttcttaaatcaagatactggtgattcaaggaattttatttatggtccagccaagagccatctcgtgccaagacttctgctggcaagggaatggataaagctgttttgttctagtaacaattttggaatgaatactgacaatattccatgagggtgtgcaagcacaaattttaccaatctgacctctttgaagttgcagaatgctttgaaattctaatggtatctgaaatatcagctcatagaaagtaacaaaatttgctgtcaccttaaataagacattttaattttgttataatgtacaatttagaagtttgattaattatattatctatttaggcattaatataaaagaggtaggagtctgttatttaaaaaaagcattaaatttaaaaaaaaactgtcttgtctacttttagcttcattctcccatattttgaagggtgtgtaacttcagctctgcaggattgcatggggtaaaacttgttaccaacacatgtgaaccattgctacattgtaggttgtgatcattttgccccactgaagcccatgtatctgaccttacgtgccttttgaactaggagaatcgggctaatttattaatgatgataattataatgtatctgtacagcactttttacatttgcgaagtgctttccaatccatgttagttactagttattacagctgtaaggataaaacacgtcatgtggattcattttgaattggtgctattggtatttcctctgttattgctaataaatgaaaatggtggtatg

SEQ ID NO: 24851 - DNA, 4884 bp, Homo sapiens
  source 1..4884: mol_type = unassigned DNA
gacagtttgaggtaaggcgttgtatatattgcagatagctctgaggtttttggagtgtaccatgctgtcttcctggcaaggaggcccaagaccgcggcaactactgctctggcttctgatcctcgcagcctgggagacgggtagtggccagctccactactccgtccccgaggaagcaaaacacggcaccttcgtgggccgcatcgctcaggacctggggctggagctggcggagctggtgccgcgcctgttccgggtggcgtccaaaagacacggggaccttctggaggtaaatctgcagaatggcattttgtttgtgaattctcggatcgaccgcgaggagctgtgtgggcggagcgcggagtgcagcatccacctggaggtgatcgtggacaggcctctgcaggttttccatgtggaggtgaaggtgagggacattaacgacaacccgcccatattccctgaaagcaagaaacgaataatcattgcagaatctagacctccggaaactcgatttccactagatggcgcatccgatgcagatattggagtaaactcggcattgacctaccgactggatcccaacgattatttcactttggacgcacaaaacagtcttgagcaaatgtcttcattatcacttgtactgaggaaaacactggacagagaggaaattcaggaacatagtttattactgacagccagtgatggaggtaaacccgagctgactggcacagttcagctgctcatcacgattctggacgtgaatgacaacgccccggaattttaccaatccgtttataaagtgacggtgttagagaacgccttcaatggaacattagtgatcaagctaaatgccacagatcctgatgatggtacaaatggagatatagtttactcatttagaaggcctgtatggcctgcagtggtatatgcatttaccataaatccgaacaatggagaaattaggacaaaaggcaaactagatttcgaagaaaagaaattatatgaaatatccgtggaggcagttgacaaaggaaatattccaatggcgggtcattgtacccttttggtggaagtactagatgtaaatgataacgccccagaggttaccatcacttctttgtcactccccatcagagaagacactcagcctagcgccattattgccctaatcagtgtgtccgatcgtgactctggctcaaatggacaggtcacctgcaccttgacgccgcatgtccccttcaagctggtgtccacctacaagaactactactcattagtgctggacagcgccctggaccgcgagagcgtatcagcctatgaactggtggtgaccgcgcgggacgggggctcgccttcgctgtgggccacggccagcgtgtcggtgggggtggccgacgtgaacgacaacgcgccggcgttcgcgcagcccgagtacacggtgttcgtgaaggaaaacaatccgccgggctgccacatcttcacggtgtctgctcaggacgcggacgcacaggagaacgcgctggtctcctactcgctggtggagcggcgggtgggcgagcgtgcgctgtcgagctacgtgtcggtgcacgcggagagcggcaaggtgtacgcgctgcagccgttggaccacgaggagctggagctgttgcagttccaggtgagcgcgcgcgactctggcgtgccgcctctgggcagcaacgtgacgctgcaggtgttcgtgctggacgagaacgacaacgctccggcgctgctgacgcccggggctggcagcgcgggaggcacagtgagcgagctgatgccgcggtcggtgggtgcaggccacgtggtggcgaaggtgcgcgcggtggacgccgattcgggctacaatgcgtggctttcgtatgaattgcagctggcggcggtcggcgcgcgcatcccgttccgcgtggggctgtacactggcgagatcagcacgacgcgccctctggacgaggtggacgcgccgcaccaccgccttctggtgctggtgaaggaccacggtgagcccgcgctgacggccacggcaacggtgctgttgtcgctggtggagagcggccaagcgccacaggcttcgtcgagggcgtcggcaggcgctgtgggtccagaagcggcgctggtggatgtcaatgtttacttgatcattgccatctgcgcggtgtccagcctgttggtgctcacgttgctgctgtatactgcgctgcggtgctcggcaccgcccaccgagggcgcgtgcgcgccgggcaagcccactctagtgtgctccagcgcggcagggagttggtcgtactcgcagcagaggcggccgagggtgtgctctggggagggcccgcataagacggacctcatggccttcagtcccagccttcctccttgtctgggttctgcagagggaacaggccagagggaggaggactcagaatgcttgaaagagccacgacagcccaaccctgactggcgttactctgcctccctgagagcaggcatgcacagctctgtgcacctagaggaggctggcattctacgggctggtccaggagggcctgatcagcagtggccaacagtatccagtgcaacaccagaaccagaggcaggagaagtgtcccctccagtcggtgcgggtgtcaacagcaacagctggacctttaaatacggaccaggcaaccccaaacaatccggtcccgaacctaaaaagcagacccaagtttcctttctcctccgccgcaaaggagaggcttcccagccccgccagtgagaggttggactctctgccctgtgctccggggatcctgtcttgatgacacttgcagggcaggctgaaaagttttgagattgagcagcttgggagtttgtggccactgggtatgtgtggctaccgcgggtatgcgagtgccagatattggctgagacgagccagcttagactaattggtacaaggaaggcaagaaaacaaagacaaataaacagcggaagttatcagtatggaggggaagtgtaaacttaaagggaccagactttctaaatcttacaactcaagaggtggcagccaccctctaggagacaaaactacccccactgacaaggctttaggagaccctaaagtctgttggctgtgacgtcattatacctaaaatctgcatcatacctgcaagccaacagttcagtgttttaacagagaaccaccctgggaaacagaagcagatctgatgtgtttcctatacatgtcctgtgctcactttattaaaaattcttttgcacacaatgtttatgaaaaggccagatccttttccaatacttatgcaaaagcaaaagaaaaccccgacacctcacctttcgctgtttgttgtttcatagatttatttaaaaaaagagaaagtctatagctataaatctttaaagagaaatatgaatacaattcccctaaactctcctcaaaagagaattcagtctacagccatttaaatgatcattgctgctacagaagtgctttaagagaattgcctgaaacatctgtattatatcggccacctgccaatcacagctttactctttcaggtcactctggggctgcctcttgcatgtattactaaataaaatgatctctctttctctctctctctctcttttctaagaaacaattatgtgcactttgatacacaaccttctctaaccaactatatatcaagacccaaaaattgaagaaaaatattgttttctcatacagtgagcagatttttcaatctactaattctgtgacttgtcttggtgtgctagcctacaccttctctttggtttagttttccttttctataacactctgaattgctaatcttactaacacctatgatgttacctgaaatcaatctcccatatgtatgctgtatgctatgctaagactcctgaaatatacttactctgtgcttgtgtatgtgaatgttaatgcaactattacctagagtgaactttaagctttattgttgaatgtaattccattatatttccttttgtacacctgtgaaaaagtggagtagtgtttttttaaccattgttaatcagcttttgtgtatgaaagacacagtaaaatttctttcttaaatcaagatactggtgattcaaggaattttatttatggtccagccaagagccatctcgtgccaagacttctgctggcaagggaatggataaagctgttttgttctagtaacaattttggaatgaatactgacaatattccatgagggtgtgcaagcacaaattttaccaatctgacctctttgaagttgcagaatgctttgaaattctaatggtatctgaaatatcagctcatagaaagtaacaaaatttgctgtcaccttaaataagacattttaattttgttataatgtacaatttagaagtttgattaattatattatctatttaggcattaatataaaagaggtaggagtctgttatttaaaaaaagcattaaatttaaaaaaaaactgtcttgtctacttttagcttcattctcccatattttgaagggtgtgtaacttcagctctgcaggattgcatggggtaaaacttgttaccaacacatgtgaaccattgctacattgtaggttgtgatcattttgccccactgaagcccatgtatctgaccttacgtgccttttgaactaggagaatcgggctaatttattaatgatgataattataatgtatctgtacagcactttttacatttgcgaagtgctttccaatccatgttagttactagttattacagctgtaaggataaaacacgtcatgtggattcattttgaattggtgctattggtatttcctctgttattgctaataaatgaaaatggtggtatg

SEQ ID NO: 24852 - DNA, 2619 bp, Homo sapiens
  source 1..2619: mol_type = unassigned DNA
agaagcggaggaataagagaagcagcaggactttaacagagactagaatatttaaatttttgcaaaacatgctcttctaatttgatcaaaacattgaggattggtaatggcgtcttctatcagaaggggccgaggggcctggacacggctgctctcgcttctgctcctcgcagcctgggaggtggggagcggccagctccgctactccgtccccgaggaggccaaacacggcaccttcgtgggccgcatcgcgcaggacctggggctggagctggaggagctggtgccgcgcctgttccgggtggcgtccaaaagacacggggaccttctggaggtaaatctgcagaatggcattttgtttgtgaattctcggatcgaccgggaggagctgtgcgggcggagcgcggaatgtagcatccacgtggaggtgatcgtggacaggccgctgcaggttttccatgtggaagtggaggtgaaggacattaacgacaacccgccaatatttccaatgacagtaaagactatccggtttcccgaatcaaggctgcttgattctcggtttcctctagagggagcatctgatgcagatataggagtaaatgctcttctctcctacaagctcagctccagtgagtttttcttcctagatatacaggcaaatgatgaactaagcgaatctttgtctctcgtgctggggaaatcgctggacagagaggaaactgctgaggttaatttgttactggtggctactgatgggggcaaacctgagctcacgggcaccgttcaaatacttattaaggtattagatgtaaatgacaatgaaccaacttttgcccaatcagtttacaaagtaaaattgttagagaatacggcaaatgggaccttagtggttaagttaaacgcttctgatgcagatgaaggaccgaacagcgagattgtgtattcactcggtagtgatgtgtcctccactatacagactaagtttaccatagatcccatctcaggggaaatcagaactaagggaaaattagattatgaagaagcaaagtcctacgagattcaggtcactgcaactgacaaaggaaccccttcaatgtcaggacattgtaaaatttcattaaaacttgtggacatcaatgataacacaccagaagtctcaataacgtctctctcacttcccatctcagagaacgcttccctgggcactgtcattgctctcatcacggtgtcggatcgcgactctggtacgaatggacatgtcacctgctccctgacgccccacgtccctttcaagctggtgtccaccttcaagaattactactcgttggtgctggacagcgccctggaccgcgagagcgtgtcagcctatgagctggtggtgaccgcacgggacgggggctcgccttcactgtgggccaccaccagcgtgtccatcgaggtggccgacgtgaacgacaacgcgccggcgttcgcacagcctgagtacacagtattcgtgaaggagaacaacccgccgggctgccacatcttcacggtgtcagcgtgggatgcggacgcgcaggagaacgcgctggtgtcctactcgctggtggagcggcgggtgggcgagcgcgcgttgtcgagctacgtttcggtgcacgcggagagcggcaaggtgtacgcgctgcagccgctggaccacgaggaagtggagctgctgcagttccaggtgagcgcgcgggatgcgggcgtgccgcctctgggcagcaacgtgacgctgcaggtgttcgtgctggacgagaacgacaacgcgccggcactgttggcgcctagggctggcaccgctgctggcgcagtgagtgagctggtgccgtggtcggtgggtgcagggcacgtggtggcgaaggtgcgcgcagtggacgctgactcaggctacaacgcgtggctttcgtacgagcttcagctgggtactggcagcgctcgcatcccgttccgcgtggggctatacacgggtgagatcagcacgacacgtgccctagacgaggctgactcccctcgacaccgcctactcgtgctggtgaaggaccacggcgaaccagcgttgacagccacggccaccgtgttagtgtcgttggtggaaagtggccaggcacccaaggcctcgtcgcgggcgtgggtgggcgccgcgggctcagaggctacgctggtggatgtcaacgtgtacctgatcatcgccatctgcgcggtatccagcctgttggtgctcacggtgctgctgtacactgcgctgcggtgctcggtgccacccaccgagggtgcgcgcgcgccaggaaagcccacgctggtgtgctccagcgccgtggggagctggtcttactcgcagcagaggcggcagagggtgtgctctggggaggacccccccaagacggacctcatggccttcagccctagcttatctcaaggtccagactccgcagaagagaaacagctctcagaatcagaatacgtaggaaaggtgagtcttttactttttcttgccaattctaaaattgttctttttaaaaaattctatatgatttctactagttatttagattcatagttcttcatttattttatatcatcctaccgtgcgatttt

SEQ ID NO: 24853 - DNA, 5254 bp, Homo sapiens
  source 1..5254: mol_type = unassigned DNA
atggcgtcttctatcagaaggggccgaggggcctggacacggctgctctcgcttctgctcctcgcagcctgggaggtggggagcggccagctccgctactccgtccccgaggaggccaaacacggcaccttcgtgggccgcatcgcgcaggacctggggctggagctggaggagctggtgccgcgcctgttccgggtggcgtccaaaagacacggggaccttctggaggtaaatctgcagaatggcattttgtttgtgaattctcggatcgaccgggaggagctgtgcgggcggagcgcggaatgtagcatccacgtggaggtgatcgtggacaggccgctgcaggttttccatgtggaagtggaggtgaaggacattaacgacaacccgccaatatttccaatgacagtaaagactatccggtttcccgaatcaaggctgcttgattctcggtttcctctagagggagcatctgatgcagatataggagtaaatgctcttctctcctacaagctcagctccagtgagtttttcttcctagatatacaggcaaatgatgaactaagcgaatctttgtctctcgtgctggggaaatcgctggacagagaggaaactgctgaggttaatttgttactggtggctactgatgggggcaaacctgagctcacgggcaccgttcaaatacttattaaggtattagatgtaaatgacaatgaaccaacttttgcccaatcagtttacaaagtaaaattgttagagaatacggcaaatgggaccttagtggttaagttaaacgcttctgatgcagatgaaggaccgaacagcgagattgtgtattcactcggtagtgatgtgtcctccactatacagactaagtttaccatagatcccatctcaggggaaatcagaactaagggaaaattagattatgaagaagcaaagtcctacgagattcaggtcactgcaactgacaaaggaaccccttcaatgtcaggacattgtaaaatttcattaaaacttgtggacatcaatgataacacaccagaagtctcaataacgtctctctcacttcccatctcagagaacgcttccctgggcactgtcattgctctcatcacggtgtcggatcgcgactctggtacgaatggacatgtcacctgctccctgacgccccacgtccctttcaagctggtgtccaccttcaagaattactactcgttggtgctggacagcgccctggaccgcgagagcgtgtcagcctatgagctggtggtgaccgcacgggacgggggctcgccttcactgtgggccaccaccagcgtgtccatcgaggtggccgacgtgaacgacaacgcgccggcgttcgcacagcctgagtacacagtattcgtgaaggagaacaacccgccgggctgccacatcttcacggtgtcagcgtgggatgcggacgcgcaggagaacgcgctggtgtcctactcgctggtggagcggcgggtgggcgagcgcgcgttgtcgagctacgtttcggtgcacgcggagagcggcaaggtgtacgcgctgcagccgctggaccacgaggaagtggagctgctgcagttccaggtgagcgcgcgggatgcgggcgtgccgcctctgggcagcaacgtgacgctgcaggtgttcgtgctggacgagaacgacaacgcgccggcactgttggcgcctagggctggcaccgctgctggcgcagtgagtgagctggtgccgtggtcggtgggtgcagggcacgtggtggcgaaggtgcgcgcagtggacgctgactcaggctacaacgcgtggctttcgtacgagcttcagctgggtactggcagcgctcgcatcccgttccgcgtggggctatacacgggtgagatcagcacgacacgtgccctagacgaggctgactcccctcgacaccgcctactcgtgctggtgaaggaccacggcgaaccagcgttgacagccacggccaccgtgttagtgtcgttggtggaaagtggccaggcacccaaggcctcgtcgcgggcgtgggtgggcgccgcgggctcagaggctacgctggtggatgtcaacgtgtacctgatcatcgccatctgcgcggtatccagcctgttggtgctcacggtgctgctgtacactgcgctgcggtgctcggtgccacccaccgagggtgcgcgcgcgccaggaaagcccacgctggtgtgctccagcgccgtggggagctggtcttactcgcagcagaggcggcagagggtgtgctctggggaggacccccccaagacggacctcatggccttcagccctagcttatctcaaggtccagactccgcagaagagaaacagctctcagaatcagaatacgtaggaaagccacgacagcccaaccctgactggcgttactctgcctccctgagagcaggcatgcacagctctgtgcacctagaggaggctggcattctacgggctggtccaggagggcctgatcagcagtggccaacagtatccagtgcaacaccagaaccagaggcaggagaagtgtcccctccagtcggtgcgggtgtcaacagcaacagctggacctttaaatacggaccaggcaaccccaaacaatccggtcccggtgagttgcccgacaaattcattatcccaggatctcctgcaatcatctccatccggcaggagcctactaacagccaaattgacaaaagtgacttcataaccttcggcaaaaaggaggagaccaagaaaaagaagaaaaagaagaagggtaacaagacccaggagaaaaaagagaaagggaacagcacgactgacaacagtgaccagtgaggtcctcaaatggaaacaagccacttagccagtttttgtaataatggcaaatctctcccatgtagcaattccctgctcctttttcctatctacatgagccctcttagagacctcagaaatctgcagaaagttccctgtgtctgtctagaacgcatttaacaggttttgtcgtaaaagctttactaagtctggtgttaactctttctctccactctggcttgttttcagaacctaaaaagcagacccaagtttcctttctcctccgccgcaaaggagaggcttcccagccccgccagtgagaggttggactctctgccctgtgctccggggatcctgtcttgatgacacttgcagggcaggctgaaaagttttgagattgagcagcttgggagtttgtggccactgggtatgtgtggctaccgcgggtatgcgagtgccagatattggctgagacgagccagcttagactaattggtacaaggaaggcaagaaaacaaagacaaataaacagcggaagttatcagtatggaggggaagtgtaaacttaaagggaccagactttctaaatcttacaactcaagaggtggcagccaccctctaggagacaaaactacccccactgacaaggctttaggagaccctaaagtctgttggctgtgacgtcattatacctaaaatctgcatcatacctgcaagccaacagttcagtgttttaacagagaaccaccctgggaaacagaagcagatctgatgtgtttcctatacatgtcctgtgctcactttattaaaaattcttttgcacacaatgtttatgaaaaggccagatccttttccaatacttatgcaaaagcaaaagaaaaccccgacacctcacctttcgctgtttgttgtttcatagatttatttaaaaaaagagaaagtctatagctataaatctttaaagagaaatatgaatacaattcccctaaactctcctcaaaagagaattcagtctacagccatttaaatgatcattgctgctacagaagtgctttaagagaattgcctgaaacatctgtattatatcggccacctgccaatcacagctttactctttcaggtcactctggggctgcctcttgcatgtattactaaataaaatgatctctctttctctctctctctctcttttctaagaaacaattatgtgcactttgatacacaaccttctctaaccaactatatatcaagacccaaaaattgaagaaaaatattgttttctcatacagtgagcagatttttcaatctactaattctgtgacttgtcttggtgtgctagcctacaccttctctttggtttagttttccttttctataacactctgaattgctaatcttactaacacctatgatgttacctgaaatcaatctcccatatgtatgctgtatgctatgctaagactcctgaaatatacttactctgtgcttgtgtatgtgaatgttaatgcaactattacctagagtgaactttaagctttattgttgaatgtaattccattatatttccttttgtacacctgtgaaaaagtggagtagtgtttttttaaccattgttaatcagcttttgtgtatgaaagacacagtaaaatttctttcttaaatcaagatactggtgattcaaggaattttatttatggtccagccaagagccatctcgtgccaagacttctgctggcaagggaatggataaagctgttttgttctagtaacaattttggaatgaatactgacaatattccatgagggtgtgcaagcacaaattttaccaatctgacctctttgaagttgcagaatgctttgaaattctaatggtatctgaaatatcagctcatagaaagtaacaaaatttgctgtcaccttaaataagacattttaattttgttataatgtacaatttagaagtttgattaattatattatctatttaggcattaatataaaagaggtaggagtctgttatttaaaaaaagcattaaatttaaaaaaaaactgtcttgtctacttttagcttcattctcccatattttgaagggtgtgtaacttcagctctgcaggattgcatggggtaaaacttgttaccaacacatgtgaaccattgctacattgtaggttgtgatcattttgccccactgaagcccatgtatctgaccttacgtgccttttgaactaggagaatcgggctaatttattaatgatgataattataatgtatctgtacagcactttttacatttgcgaagtgctttccaatccatgttagttactagttattacagctgtaaggataaaacacgtcatgtggattcattttgaattggtgctattggtatttcctctgttattgctaataaatgaaaatggtggtatg

SEQ ID NO: 24854 - DNA, 5260 bp, Homo sapiens
  source 1..5260: mol_type = unassigned DNA
atgttgttctcctggcgagaagatcctggagcccagtgcctgctgctttctcttctgctcctcgcagcctcggaggtggggagcggccagctccactactccgtctctgaggaggccaagcatggcaccttcgtgggccgcatcgcgcaggacctggggctggagctggcggagctggtgccgcgcctgttccgggtggcgtccaaaagacacggggaccttctggaggtaaatctgcagaatggcattttgtttgtgaattctcggatagaccgcgaggaactgtgcgggcggagcgcggagtgcagcatccacctggaggtgatcgtggacaggccgctgcaggttttccatgtggaggtggaagtgaaggacattaatgacaacgcgccagtttttccaatggctgtaaagaatctgtttatttccgaatcccgacagcctggctctcggttttcgctagagggcgcatcagatgcagatatcggaacaaattcgttgttgacttacagtcttgattccactgaatattttaccttggacgttaaaagaaatgatgaggaaattaaatcccttggactcgtgttgaaaaaaaatttaaatcgagaggacactcctaagcattatttactaataacagcaattgatggtgggaaaccagagctcactggcacgactcaactaaagatcactgttttagatgtaaacgacaacgccccagcgtttgagaggacgatctataaagtcagattactcgaaaatgcaccaaatggtaccctagtggtgaccgttaacgccaccgatttggatgaaggagtaaataaggatatcgcgtattctttcaatacggacatgtcagcagatattctgtcaaaattccatttagatccagtcaatggacaaatcagtgtaaagggtaacatagatttcgaggaaagtaagtcatatgaaatccaggtagaagccacggataaaggaaatcccccaatgtcagatcactgcacagttctactcgaaattgtggacatcaatgataatgtacctgagttagttattcaatcactatctttacctgtattagaagactctccacttagcacagtcatcgctctgatcagcgtgtccgaccgcgactcaggagtcaatggacaggtcacctgctcgctgacgccccacgtccccttcaagctggtgtccaccttcaagaattactactcattggtgctggacagccctctggaccgcgagagcgtgtcggcctatgagctggtggtgactgctcgggacgggggctcgccttcactgtgggccacggccagcgtgtccgtggaggtggccgacgtgaacgacaatgcgccggcattctcgcagtccgagtacacggtgttcgtgaaggagaacaacccgccgggctgccacatcttcacggtgtctgcgcgggacgcggacgcgcaggagaacgccctggtgtcctactcgctggtggaacggcgggtgggggagcgcgcgctgtcgagctacgtgtcggtacacgcggagagcggcaaggtgtacgcgctgcagccgctggaccacgaggagctagagctgctgcagttccaggtgagtgcgcgcgatgcgggcgtgccgcctctgggcagcaacgtgacgctgcaggtgttcgtgctggacgagaacgacaacgcgccggcactgctgatgcctcgggtgggtggcatcggtggcgcagtgagcgagctggtgccgcggtcagtgggtgcgggccacgtggtagcgaaggtgcgcgcagtggatgcagactcaggctacaacgcgtggctttcgtatgagctgcagcctgggaccggcggtgcgcgcatcccgtttcgcgtggggctgtacacgggagagatcagcacgacccgtgccctggacgaggtggacgccccgcgccatcgcctactggtgctggtgaaggaccacggtgaaccctcattgaccgccacggccactgtgctggtgtcgctggtggagagtggccaggcacccaaggcctcgtcccaggcgtccgctggcgccacgggcccggaagctgcactggtggatgtcaacgtgtacttgatcgtcgccatctgcgcggtgtccagtctgttggtgctcacactgctgctatatactgctctgcggtgctccgcgccgccaaccgaaggcgactgtgggccgggcaagcccacgctggtgtgctccagcgcggtggggagctggtcatactcgcagcagaggcagcagagggtgtgctctggagaggggttgcccaagaccgacctcatggcttttagccctagccttcctccttgtccaattagccgggatagagaggagaaacaggatgtggacgttgatctctcagccaaaccacgacagcccaaccctgactggcgttactctgcctccctgagagcaggcatgcacagctctgtgcacctagaggaggctggcattctacgggctggtccaggagggcctgatcagcagtggccaacagtatccagtgcaacaccagaaccagaggcaggagaagtgtcccctccagtcggtgcgggtgtcaacagcaacagctggacctttaaatacggaccaggcaaccccaaacaatccggtcccggtgagttgcccgacaaattcattatcccaggatctcctgcaatcatctccatccggcaggagcctactaacagccaaattgacaaaagtgacttcataaccttcggcaaaaaggaggagaccaagaaaaagaagaaaaagaagaagggtaacaagacccaggagaaaaaagagaaagggaacagcacgactgacaacagtgaccagtgaggtcctcaaatggaaacaagccacttagccagtttttgtaataatggcaaatctctcccatgtagcaattccctgctcctttttcctatctacatgagccctcttagagacctcagaaatctgcagaaagttccctgtgtctgtctagaacgcatttaacaggttttgtcgtaaaagctttactaagtctggtgttaactctttctctccactctggcttgttttcagaacctaaaaagcagacccaagtttcctttctcctccgccgcaaaggagaggcttcccagccccgccagtgagaggttggactctctgccctgtgctccggggatcctgtcttgatgacacttgcagggcaggctgaaaagttttgagattgagcagcttgggagtttgtggccactgggtatgtgtggctaccgcgggtatgcgagtgccagatattggctgagacgagccagcttagactaattggtacaaggaaggcaagaaaacaaagacaaataaacagcggaagttatcagtatggaggggaagtgtaaacttaaagggaccagactttctaaatcttacaactcaagaggtggcagccaccctctaggagacaaaactacccccactgacaaggctttaggagaccctaaagtctgttggctgtgacgtcattatacctaaaatctgcatcatacctgcaagccaacagttcagtgttttaacagagaaccaccctgggaaacagaagcagatctgatgtgtttcctatacatgtcctgtgctcactttattaaaaattcttttgcacacaatgtttatgaaaaggccagatccttttccaatacttatgcaaaagcaaaagaaaaccccgacacctcacctttcgctgtttgttgtttcatagatttatttaaaaaaagagaaagtctatagctataaatctttaaagagaaatatgaatacaattcccctaaactctcctcaaaagagaattcagtctacagccatttaaatgatcattgctgctacagaagtgctttaagagaattgcctgaaacatctgtattatatcggccacctgccaatcacagctttactctttcaggtcactctggggctgcctcttgcatgtattactaaataaaatgatctctctttctctctctctctctcttttctaagaaacaattatgtgcactttgatacacaaccttctctaaccaactatatatcaagacccaaaaattgaagaaaaatattgttttctcatacagtgagcagatttttcaatctactaattctgtgacttgtcttggtgtgctagcctacaccttctctttggtttagttttccttttctataacactctgaattgctaatcttactaacacctatgatgttacctgaaatcaatctcccatatgtatgctgtatgctatgctaagactcctgaaatatacttactctgtgcttgtgtatgtgaatgttaatgcaactattacctagagtgaactttaagctttattgttgaatgtaattccattatatttccttttgtacacctgtgaaaaagtggagtagtgtttttttaaccattgttaatcagcttttgtgtatgaaagacacagtaaaatttctttcttaaatcaagatactggtgattcaaggaattttatttatggtccagccaagagccatctcgtgccaagacttctgctggcaagggaatggataaagctgttttgttctagtaacaattttggaatgaatactgacaatattccatgagggtgtgcaagcacaaattttaccaatctgacctctttgaagttgcagaatgctttgaaattctaatggtatctgaaatatcagctcatagaaagtaacaaaatttgctgtcaccttaaataagacattttaattttgttataatgtacaatttagaagtttgattaattatattatctatttaggcattaatataaaagaggtaggagtctgttatttaaaaaaagcattaaatttaaaaaaaaactgtcttgtctacttttagcttcattctcccatattttgaagggtgtgtaacttcagctctgcaggattgcatggggtaaaacttgttaccaacacatgtgaaccattgctacattgtaggttgtgatcattttgccccactgaagcccatgtatctgaccttacgtgccttttgaactaggagaatcgggctaatttattaatgatgataattataatgtatctgtacagcactttttacatttgcgaagtgctttccaatccatgttagttactagttattacagctgtaaggataaaacacgtcatgtggattcattttgaattggtgctattggtatttcctctgttattgctaataaatgaaaatggtggtatg

SEQ ID NO: 24855 - DNA, 2475 bp, Homo sapiens
  source 1..2475: mol_type = unassigned DNA
atgttgttctcctggcgagaagatcctggagcccagtgcctgctgctttctcttctgctcctcgcagcctcggaggtggggagcggccagctccactactccgtctctgaggaggccaagcatggcaccttcgtgggccgcatcgcgcaggacctggggctggagctggcggagctggtgccgcgcctgttccgggtggcgtccaaaagacacggggaccttctggaggtaaatctgcagaatggcattttgtttgtgaattctcggatagaccgcgaggaactgtgcgggcggagcgcggagtgcagcatccacctggaggtgatcgtggacaggccgctgcaggttttccatgtggaggtggaagtgaaggacattaatgacaacgcgccagtttttccaatggctgtaaagaatctgtttatttccgaatcccgacagcctggctctcggttttcgctagagggcgcatcagatgcagatatcggaacaaattcgttgttgacttacagtcttgattccactgaatattttaccttggacgttaaaagaaatgatgaggaaattaaatcccttggactcgtgttgaaaaaaaatttaaatcgagaggacactcctaagcattatttactaataacagcaattgatggtgggaaaccagagctcactggcacgactcaactaaagatcactgttttagatgtaaacgacaacgccccagcgtttgagaggacgatctataaagtcagattactcgaaaatgcaccaaatggtaccctagtggtgaccgttaacgccaccgatttggatgaaggagtaaataaggatatcgcgtattctttcaatacggacatgtcagcagatattctgtcaaaattccatttagatccagtcaatggacaaatcagtgtaaagggtaacatagatttcgaggaaagtaagtcatatgaaatccaggtagaagccacggataaaggaaatcccccaatgtcagatcactgcacagttctactcgaaattgtggacatcaatgataatgtacctgagttagttattcaatcactatctttacctgtattagaagactctccacttagcacagtcatcgctctgatcagcgtgtccgaccgcgactcaggagtcaatggacaggtcacctgctcgctgacgccccacgtccccttcaagctggtgtccaccttcaagaattactactcattggtgctggacagccctctggaccgcgagagcgtgtcggcctatgagctggtggtgactgctcgggacgggggctcgccttcactgtgggccacggccagcgtgtccgtggaggtggccgacgtgaacgacaatgcgccggcattctcgcagtccgagtacacggtgttcgtgaaggagaacaacccgccgggctgccacatcttcacggtgtctgcgcgggacgcggacgcgcaggagaacgccctggtgtcctactcgctggtggaacggcgggtgggggagcgcgcgctgtcgagctacgtgtcggtacacgcggagagcggcaaggtgtacgcgctgcagccgctggaccacgaggagctagagctgctgcagttccaggtgagtgcgcgcgatgcgggcgtgccgcctctgggcagcaacgtgacgctgcaggtgttcgtgctggacgagaacgacaacgcgccggcactgctgatgcctcgggtgggtggcatcggtggcgcagtgagcgagctggtgccgcggtcagtgggtgcgggccacgtggtagcgaaggtgcgcgcagtggatgcagactcaggctacaacgcgtggctttcgtatgagctgcagcctgggaccggcggtgcgcgcatcccgtttcgcgtggggctgtacacgggagagatcagcacgacccgtgccctggacgaggtggacgccccgcgccatcgcctactggtgctggtgaaggaccacggtgaaccctcattgaccgccacggccactgtgctggtgtcgctggtggagagtggccaggcacccaaggcctcgtcccaggcgtccgctggcgccacgggcccggaagctgcactggtggatgtcaacgtgtacttgatcgtcgccatctgcgcggtgtccagtctgttggtgctcacactgctgctatatactgctctgcggtgctccgcgccgccaaccgaaggcgactgtgggccgggcaagcccacgctggtgtgctccagcgcggtggggagctggtcatactcgcagcagaggcagcagagggtgtgctctggagaggggttgcccaagaccgacctcatggcttttagccctagccttcctccttgtccaattagccgggatagagaggagaaacaggatgtggacgttgatctctcagccaaagtgagtaatttttatttattctttccaaaatgtctttgtttttcattcctcaatgtttccactcctctggaaatacattaa

SEQ ID NO: 24856 - DNA, 2451 bp, Homo sapiens
  source 1..2451: mol_type = unassigned DNA
atggtatattcccggagaggaagtctgggatcccggctcctgctgctctggcttctccttgcctactggaaggcagggagcggccagctccactactcgatcccggaggaagccaaacacggaaccttcgttggccgcatcgcgcaggacctagggctggagctggcggagctggtgccgcgcctgttccgggtggcgtccaagggccgcggggaccttctggaggtaaatctgcagaatggcattttgtttgtgaattctcggatcgaccgggaggagctgtgccggcggagggcggagtgcagcatccacctggaggtgatcgtggacaggccgctgcaggttttccatgtggaggtggcagtgaaggacatcaatgacaatccgcccaggttctccagacaagaacaaagattattcattttagagtcaagaatgccagattcgcggtttccgctagagggcgcgtcggatttggatattggagcaaatgcacaattgagatacaggttaaatccaaacgaatattttgacttagatgttaaaacaaatgaagaagaaacgaactttttagagctggttttgaggaaatccttagatagagaagaaacacaagaacaccgtttattagtgattgcaactgatggaggaaaacccgaactaacaggtacagttcagttgttgatcaatgtattggatgctaatgataacgccccagaatttgataaatccatttataatgtcagattgttggaaaatgcaccaagtgggacattagttattaaactgaacgcctcagatgcagatgagggcatcaataaggaaatagtgtatttctttagtaatcttgttcttgacgatgtaaagtccaaatttataattaattctaatactggtgaaataaaagttaacggggaactggattatgaagactataactcatatgaaattaatattgatgccatggataaaagtacattcccattatcaggacactgtaaagtagtagtgaaactcctggatgtgaatgataataccccagagatggccataaccacccttttcctgcctgtcaaagaggacgctccactcagcacggtcattgctctgatcagcgtgtctgaccgtgactcaggtgccaacgggcaggtgacctgctccctaatgccccacgttcccttcaagctggtgtccaccttcaagaattactactcgttggtgctggacagcgccctggaccgcgagagcgtgtcggtctatgagctggtggtgaccgcgcgggacgggggctcgccttcgctgtgggccaccgccagcgtgtctgtggaagtggccgacgtgaacgacaacgctccggcgttcgcgcagccccagtataccgtgttcgtgaaggagaacaacccgccaggctgccacatcttcacggtgtctgcacgggacgcggacgcgcaggagaacgccctggtgtcctactcgctggtggagcggcgggtgggcgagcgcccgctgtcgagttacgtttcggtgcacgcggagagcggcaaggtgtacgcgctgcagccgctggaccacgaggaagtggagctgctgcagttccaggtgagcgcgcgcgacgcgggcgtgccgcctctgggcagcaacgtgacgctgcaggtgttcgtgctggacgagaacgacaacgcgccggcgctgctggtgcctcgagtgggtggcaccggcggcgcagtgagcgagctggtgccgaggtcagtgggtgcgggccacgtggtggcgaaggtgcgcgcagtggaccctgattcgggctacaacgcttggctttcgtatgagctgcagccagcgcctggcagtgcgcgcatcccgttccgcgtggggctgtacacaggcgagatcagcacaacacgctctctggatgagaccgaagcaccgcgccaccgccttctggtgctggtgaaggaccatggagagcccccgctgacagccacagccacagtgctggtgtcgctggtggaaagtggccaggcgccgaaggcctcatcgcgggcgtcggcgggcgctgtgggtcccgaggctgccctggtggatgtcaacgtgtacctgatcatcgccatctgtgcggtgtccagcctgctggtgctcacgctgctgctgtacaccgcgctgcggtgctcggcgcagcccaccgaggccgtgtgcacacggggcaagcccactctgttgtgctccagcgcggtggggagctggtcgtactcgcagcagaggagacagagggtgtgctctggggaagctccacccaaaacagacctcatggccttcagtccaagccttcctcagggtcccacctctacagacaacgtgagttttctaatattaacatccatctttccctcccaattttcaaatattaaatgtcacattcacccactttttttgtatttaaaaattatgtcttag

SEQ ID NO: 24857 - DNA, 4161 bp, Homo sapiens
  source 1..4161: mol_type = unassigned DNA
aagaaccttccatttttggctgtgccaagaagctcagaaaggcgataatataaaaaatatatagttaattgggaattgaatttacaaaatacattgtgtggtgatgcaatagaaagctcataattggaacgagattgagatggtatattcccggagaggaagtctgggatcccggctcctgctgctctggcttctccttgcctactggaaggcagggagcggccagctccactactcgatcccggaggaagccaaacacggaaccttcgttggccgcatcgcgcaggacctagggctggagctggcggagctggtgccgcgcctgttccgggtggcgtccaagggccgcggggaccttctggaggtaaatctgcagaatggcattttgtttgtgaattctcggatcgaccgggaggagctgtgccggcggagggcggagtgcagcatccacctggaggtgatcgtggacaggccgctgcaggttttccatgtggaggtggcagtgaaggacatcaatgacaatccgcccaggttctccagacaagaacaaagattattcattttagagtcaagaatgccagattcgcggtttccgctagagggcgcgtcggatttggatattggagcaaatgcacaattgagatacaggttaaatccaaacgaatattttgacttagatgttaaaacaaatgaagaagaaacgaactttttagagctggttttgaggaaatccttagatagagaagaaacacaagaacaccgtttattagtgattgcaactgatggaggaaaacccgaactaacaggtacagttcagttgttgatcaatgtattggatgctaatgataacgccccagaatttgataaatccatttataatgtcagattgttggaaaatgcaccaagtgggacattagttattaaactgaacgcctcagatgcagatgagggcatcaataaggaaatagtgtatttctttagtaatcttgttcttgacgatgtaaagtccaaatttataattaattctaatactggtgaaataaaagttaacggggaactggattatgaagactataactcatatgaaattaatattgatgccatggataaaagtacattcccattatcaggacactgtaaagtagtagtgaaactcctggatgtgaatgataataccccagagatggccataaccacccttttcctgcctgtcaaagaggacgctccactcagcacggtcattgctctgatcagcgtgtctgaccgtgactcaggtgccaacgggcaggtgacctgctccctaatgccccacgttcccttcaagctggtgtccaccttcaagaattactactcgttggtgctggacagcgccctggaccgcgagagcgtgtcggtctatgagctggtggtgaccgcgcgggacgggggctcgccttcgctgtgggccaccgccagcgtgtctgtggaagtggccgacgtgaacgacaacgctccggcgttcgcgcagccccagtataccgtgttcgtgaaggagaacaacccgccaggctgccacatcttcacggtgtctgcacgggacgcggacgcgcaggagaacgccctggtgtcctactcgctggtggagcggcgggtgggcgagcgcccgctgtcgagttacgtttcggtgcacgcggagagcggcaaggtgtacgcgctgcagccgctggaccacgaggaagtggagctgctgcagttccaggtgagcgcgcgcgacgcgggcgtgccgcctctgggcagcaacgtgacgctgcaggtgttcgtgctggacgagaacgacaacgcgccggcgctgctggtgcctcgagtgggtggcaccggcggcgcagtgagcgagctggtgccgaggtcagtgggtgcgggccacgtggtggcgaaggtgcgcgcagtggaccctgattcgggctacaacgcttggctttcgtatgagctgcagccagcgcctggcagtgcgcgcatcccgttccgcgtggggctgtacacaggcgagatcagcacaacacgctctctggatgagaccgaagcaccgcgccaccgccttctggtgctggtgaaggaccatggagagcccccgctgacagccacagccacagtgctggtgtcgctggtggaaagtggccaggcgccgaaggcctcatcgcgggcgtcggcgggcgctgtgggtcccgaggctgccctggtggatgtcaacgtgtacctgatcatcgccatctgtgcggtgtccagcctgctggtgctcacgctgctgctgtacaccgcgctgcggtgctcggcgcagcccaccgaggccgtgtgcacacggggcaagcccactctgttgtgctccagcgcggtggggagctggtcgtactcgcagcagaggagacagagggtgtgctctggggaagctccacccaaaacagacctcatggccttcagtccaagccttcctcagggtcccacctctacagacaacccacgacagcccaaccctgactggcgttactctgcctccctgagagcaggcatgcacagctctgtgcacctagaggaggctggcattctacgggctggtccaggagggcctgatcagcagtggccaacagtatccagtgcaacaccagaaccagaggcaggagaagtgtcccctccagtcggtgcgggtgtcaacagcaacagctggacctttaaatacggaccaggcaaccccaaacaatccggtcccgaacctaaaaagcagacccaagtttcctttctcctccgccgcaaaggagaggcttcccagccccgccagtgagaggttggactctctgccctgtgctccggggatcctgtcttgatgacacttgcagggcaggctgaaaagttttgagattgagcagcttgggagtttgtggccactgggtatgtgtggctaccgcgggtatgcgagtgccagatattggctgagacgagccagcttagactaattggtacaaggaaggcaagaaaacaaagacaaataaacagcggaagttatcagtatggaggggaagtgtaaacttaaagggaccagactttctaaatcttacaactcaagaggtggcagccaccctctaggagacaaaactacccccactgacaaggctttaggagaccctaaagtctgttggctgtgacgtcattatacctaaaatctgcatcatacctgcaagccaacagttcagtgttttaacagagaaccaccctgggaaacagaagcagatctgatgtgtttcctatacatgtcctgtgctcactttattaaaaattcttttgcacacaatgtttatgaaaaggccagatccttttccaatacttatgcaaaagcaaaagaaaaccccgacacctcacctttcgctgtttgttgtttcatagatttatttaaaaaaagagaaagtctatagctataaatctttaaagagaaatatgaatacaattcccctaaactctcctcaaaagagaattcagtctacagccatttaaatgatcattgctgctacagaagtgctttaagagaattgcctgaaacatctgtattatatcggccacctgccaatcacagctttactctttcaggtcactctggggctgcctcttgcatgtattactaaataaaatgatctctctttctctctctctctctcttttctaagaaacaattatgtgcactttgatacacaaccttctctaaccaactatatatcaagacccaaaaattgaagaaaaatattgttttctcatacagtgagcagatttttcaatctactaattctgtgacttgtcttggtgtgctagcctacaccttctctttggtttagttttccttttctataacactctgaattgctaatcttactaacacctatgatgttacctgaaatcaatctcccatatgtatgctgtatgctatgctaagactcctgaaatatacttactctgtgcttgtgtatgtgaatgttaatgcaactattacctagagtgaactttaagctttattgttgaatgtaattccattatatttccttttgtacacctgtgaaaaagtggagtagtgtttttttaaccattgttaatcagcttttgtgtatgaaagacacagtaaaatttctttcttaaatcaagata

SEQ ID NO: 24858 - DNA, 5218 bp, Homo sapiens
  source 1..5218: mol_type = unassigned DNA
atggtatattcccggagaggaagtctgggatcccggctcctgctgctctggcttctccttgcctactggaaggcagggagcggccagctccactactcgatcccggaggaagccaaacacggaaccttcgttggccgcatcgcgcaggacctagggctggagctggcggagctggtgccgcgcctgttccgggtggcgtccaagggccgcggggaccttctggaggtaaatctgcagaatggcattttgtttgtgaattctcggatcgaccgggaggagctgtgccggcggagggcggagtgcagcatccacctggaggtgatcgtggacaggccgctgcaggttttccatgtggaggtggcagtgaaggacatcaatgacaatccgcccaggttctccagacaagaacaaagattattcattttagagtcaagaatgccagattcgcggtttccgctagagggcgcgtcggatttggatattggagcaaatgcacaattgagatacaggttaaatccaaacgaatattttgacttagatgttaaaacaaatgaagaagaaacgaactttttagagctggttttgaggaaatccttagatagagaagaaacacaagaacaccgtttattagtgattgcaactgatggaggaaaacccgaactaacaggtacagttcagttgttgatcaatgtattggatgctaatgataacgccccagaatttgataaatccatttataatgtcagattgttggaaaatgcaccaagtgggacattagttattaaactgaacgcctcagatgcagatgagggcatcaataaggaaatagtgtatttctttagtaatcttgttcttgacgatgtaaagtccaaatttataattaattctaatactggtgaaataaaagttaacggggaactggattatgaagactataactcatatgaaattaatattgatgccatggataaaagtacattcccattatcaggacactgtaaagtagtagtgaaactcctggatgtgaatgataataccccagagatggccataaccacccttttcctgcctgtcaaagaggacgctccactcagcacggtcattgctctgatcagcgtgtctgaccgtgactcaggtgccaacgggcaggtgacctgctccctaatgccccacgttcccttcaagctggtgtccaccttcaagaattactactcgttggtgctggacagcgccctggaccgcgagagcgtgtcggtctatgagctggtggtgaccgcgcgggacgggggctcgccttcgctgtgggccaccgccagcgtgtctgtggaagtggccgacgtgaacgacaacgctccggcgttcgcgcagccccagtataccgtgttcgtgaaggagaacaacccgccaggctgccacatcttcacggtgtctgcacgggacgcggacgcgcaggagaacgccctggtgtcctactcgctggtggagcggcgggtgggcgagcgcccgctgtcgagttacgtttcggtgcacgcggagagcggcaaggtgtacgcgctgcagccgctggaccacgaggaagtggagctgctgcagttccaggtgagcgcgcgcgacgcgggcgtgccgcctctgggcagcaacgtgacgctgcaggtgttcgtgctggacgagaacgacaacgcgccggcgctgctggtgcctcgagtgggtggcaccggcggcgcagtgagcgagctggtgccgaggtcagtgggtgcgggccacgtggtggcgaaggtgcgcgcagtggaccctgattcgggctacaacgcttggctttcgtatgagctgcagccagcgcctggcagtgcgcgcatcccgttccgcgtggggctgtacacaggcgagatcagcacaacacgctctctggatgagaccgaagcaccgcgccaccgccttctggtgctggtgaaggaccatggagagcccccgctgacagccacagccacagtgctggtgtcgctggtggaaagtggccaggcgccgaaggcctcatcgcgggcgtcggcgggcgctgtgggtcccgaggctgccctggtggatgtcaacgtgtacctgatcatcgccatctgtgcggtgtccagcctgctggtgctcacgctgctgctgtacaccgcgctgcggtgctcggcgcagcccaccgaggccgtgtgcacacggggcaagcccactctgttgtgctccagcgcggtggggagctggtcgtactcgcagcagaggagacagagggtgtgctctggggaagctccacccaaaacagacctcatggccttcagtccaagccttcctcagggtcccacctctacagacaacccacgacagcccaaccctgactggcgttactctgcctccctgagagcaggcatgcacagctctgtgcacctagaggaggctggcattctacgggctggtccaggagggcctgatcagcagtggccaacagtatccagtgcaacaccagaaccagaggcaggagaagtgtcccctccagtcggtgcgggtgtcaacagcaacagctggacctttaaatacggaccaggcaaccccaaacaatccggtcccggtgagttgcccgacaaattcattatcccaggatctcctgcaatcatctccatccggcaggagcctactaacagccaaattgacaaaagtgacttcataaccttcggcaaaaaggaggagaccaagaaaaagaagaaaaagaagaagggtaacaagacccaggagaaaaaagagaaagggaacagcacgactgacaacagtgaccagtgaggtcctcaaatggaaacaagccacttagccagtttttgtaataatggcaaatctctcccatgtagcaattccctgctcctttttcctatctacatgagccctcttagagacctcagaaatctgcagaaagttccctgtgtctgtctagaacgcatttaacaggttttgtcgtaaaagctttactaagtctggtgttaactctttctctccactctggcttgttttcagaacctaaaaagcagacccaagtttcctttctcctccgccgcaaaggagaggcttcccagccccgccagtgagaggttggactctctgccctgtgctccggggatcctgtcttgatgacacttgcagggcaggctgaaaagttttgagattgagcagcttgggagtttgtggccactgggtatgtgtggctaccgcgggtatgcgagtgccagatattggctgagacgagccagcttagactaattggtacaaggaaggcaagaaaacaaagacaaataaacagcggaagttatcagtatggaggggaagtgtaaacttaaagggaccagactttctaaatcttacaactcaagaggtggcagccaccctctaggagacaaaactacccccactgacaaggctttaggagaccctaaagtctgttggctgtgacgtcattatacctaaaatctgcatcatacctgcaagccaacagttcagtgttttaacagagaaccaccctgggaaacagaagcagatctgatgtgtttcctatacatgtcctgtgctcactttattaaaaattcttttgcacacaatgtttatgaaaaggccagatccttttccaatacttatgcaaaagcaaaagaaaaccccgacacctcacctttcgctgtttgttgtttcatagatttatttaaaaaaagagaaagtctatagctataaatctttaaagagaaatatgaatacaattcccctaaactctcctcaaaagagaattcagtctacagccatttaaatgatcattgctgctacagaagtgctttaagagaattgcctgaaacatctgtattatatcggccacctgccaatcacagctttactctttcaggtcactctggggctgcctcttgcatgtattactaaataaaatgatctctctttctctctctctctctcttttctaagaaacaattatgtgcactttgatacacaaccttctctaaccaactatatatcaagacccaaaaattgaagaaaaatattgttttctcatacagtgagcagatttttcaatctactaattctgtgacttgtcttggtgtgctagcctacaccttctctttggtttagttttccttttctataacactctgaattgctaatcttactaacacctatgatgttacctgaaatcaatctcccatatgtatgctgtatgctatgctaagactcctgaaatatacttactctgtgcttgtgtatgtgaatgttaatgcaactattacctagagtgaactttaagctttattgttgaatgtaattccattatatttccttttgtacacctgtgaaaaagtggagtagtgtttttttaaccattgttaatcagcttttgtgtatgaaagacacagtaaaatttctttcttaaatcaagatactggtgattcaaggaattttatttatggtccagccaagagccatctcgtgccaagacttctgctggcaagggaatggataaagctgttttgttctagtaacaattttggaatgaatactgacaatattccatgagggtgtgcaagcacaaattttaccaatctgacctctttgaagttgcagaatgctttgaaattctaatggtatctgaaatatcagctcatagaaagtaacaaaatttgctgtcaccttaaataagacattttaattttgttataatgtacaatttagaagtttgattaattatattatctatttaggcattaatataaaagaggtaggagtctgttatttaaaaaaagcattaaatttaaaaaaaaactgtcttgtctacttttagcttcattctcccatattttgaagggtgtgtaacttcagctctgcaggattgcatggggtaaaacttgttaccaacacatgtgaaccattgctacattgtaggttgtgatcattttgccccactgaagcccatgtatctgaccttacgtgccttttgaactaggagaatcgggctaatttattaatgatgataattataatgtatctgtacagcactttttacatttgcgaagtgctttccaatccatgttagttactagttattacagctgtaaggataaaacacgtcatgtggattcattttgaattggtgctattggtatttcctctgttattgctaataaatgaaaatggtggtatg

SEQ ID NO: 24859 - DNA, 2231 bp, Homo sapiens
  source 1..2231: mol_type = unassigned DNA
atggaaataaaaccagaggtatttgacatggtgtttaccccggaggatagattgggaaagcaatgtctgctcctcccgcttctgctcctcgcagcctggaaggtggggagcggccagctccactactccgtacccgaggaggccaaacacggcaccttcgtgggccggatcgcgcaggacctggggctggagctggcggagctggtgccgcgcctgttcaggatggcctccaaagaccgcgaggaccttctggaggtaaatctgcagaatggcattttgtttgtgaattctcggatcgaccgcgaggagctgtgcgggcggagcgcggagtgcagcatccacctggaggtgatcgtggacaggccgctgcaggttttccatgtggacgtggaggtgagggacattaacgacaacccgcccttgttcccggtagaggaacaaagagtgctgatttacgaatctaggctgccagattctgtgtttccactggagggcgcgtccgatgcagatgttggctcaaattccatcttaacctataaactcagttctagcgaatacttcgggctagatgtgaaaataaacagtgatgacaataaacaaattgggctcttattaaagaaatccttggacagagaggaagctcctgcacacaacttattcctgacagccacagatgggggcaaacctgagctcacaggcactgttcagctgctggtcacagtgctggatgtgaatgataatgctcccactttcgaacagtctgaatacgaagtaagaatattcgaaaatgcagacaacggaacaacagttatcagactgaatgcttctgatcgggatgaaggagcgaatggggcaatttcatattcttttaatagccttgttgcagccatggttattgaccactttagcatagatcgaaatacgggagaaatagtgattcggggtaatttggattttgaacaagaaaacttatacaaaatcctcattgacgccacggacaaaggccatcctcccatggcgggtcattgcaccgttttagtgagaattttggataaaaatgataacgtccctgagatagcactgacttccttatccttgcctgtacgtgaagacgctcaatttggtactgtcatcgccctaattagcgtgaacgacctcgattcaggtgccaacgggcaggtgaactgctcgctgacgcctcacgtccctttcaagctggtgtccaccttcaagaattactactcgttggtgctggacagtgccctggaccgcgagagcgtgtcggcctatgagttggtggtaaccgcgcgggacgggggctcgccttcgctgtgggccaccgccagcttgtctgtggaggtggccgacatgaatgacaatgctccggcgttcgcgcagcccgagtacacagtgttcgtgaaggagaacaacccgccgggctgccacatcttcacggtgtctgcgcgagacgcggacgcgcaggagaacgcgctggtgtcctactcgctggtggagcggcgggtgggcgagcgcgcgttgtcgagctacatttcggtgcacgcggagagcggcaaggtgtacgcgctgcagccgctggaccacgaggagctagagctgctgcagtttcagccacgacagcccaaccctgactggcgttactctgcctccctgagagcaggcatgcacagctctgtgcacctagaggaggctggcattctacgggctggtccaggagggcctgatcagcagtggccaacagtatccagtgcaacaccagaaccagaggcaggagaagtgtcccctccagtcggtgcgggtgtcaacagcaacagctggacctttaaatacggaccaggcaaccccaaacaatccggtcccggtgagttgcccgacaaattcattatcccaggatctcctgcaatcatctccatccggcaggagcctactaacagccaaattgacaaaagtgacttcataaccttcggcaaaaaggaggagaccaagaaaaagaagaaaaagaagaagggtaacaagacccaggagaaaaaagagaaagggaacagcacgactgacaacagtgaccagtgaggtcctcaaatggaaacaagccacttagccagtttttgtaataatggcaaatctctcccatgtagcaattccctgctcctttttcctatctacatgagccctcttagagacctcagaaatctgcagaaagttccctgtgtctg

SEQ ID NO: 24860 - DNA, 5374 bp, Homo sapiens
  source 1..5374: mol_type = unassigned DNA
gactgttgaatgatggcggacgcagaagaaatggattaataaattccggaacatacagtattttatctttatgcggaagatcttctaatggaaataaaaccagaggtatttgacatggtgtttaccccggaggatagattgggaaagcaatgtctgctcctcccgcttctgctcctcgcagcctggaaggtggggagcggccagctccactactccgtacccgaggaggccaaacacggcaccttcgtgggccggatcgcgcaggacctggggctggagctggcggagctggtgccgcgcctgttcaggatggcctccaaagaccgcgaggaccttctggaggtaaatctgcagaatggcattttgtttgtgaattctcggatcgaccgcgaggagctgtgcgggcggagcgcggagtgcagcatccacctggaggtgatcgtggacaggccgctgcaggttttccatgtggacgtggaggtgagggacattaacgacaacccgcccttgttcccggtagaggaacaaagagtgctgatttacgaatctaggctgccagattctgtgtttccactggagggcgcgtccgatgcagatgttggctcaaattccatcttaacctataaactcagttctagcgaatacttcgggctagatgtgaaaataaacagtgatgacaataaacaaattgggctcttattaaagaaatccttggacagagaggaagctcctgcacacaacttattcctgacagccacagatgggggcaaacctgagctcacaggcactgttcagctgctggtcacagtgctggatgtgaatgataatgctcccactttcgaacagtctgaatacgaagtaagaatattcgaaaatgcagacaacggaacaacagttatcagactgaatgcttctgatcgggatgaaggagcgaatggggcaatttcatattcttttaatagccttgttgcagccatggttattgaccactttagcatagatcgaaatacgggagaaatagtgattcggggtaatttggattttgaacaagaaaacttatacaaaatcctcattgacgccacggacaaaggccatcctcccatggcgggtcattgcaccgttttagtgagaattttggataaaaatgataacgtccctgagatagcactgacttccttatccttgcctgtacgtgaagacgctcaatttggtactgtcatcgccctaattagcgtgaacgacctcgattcaggtgccaacgggcaggtgaactgctcgctgacgcctcacgtccctttcaagctggtgtccaccttcaagaattactactcgttggtgctggacagtgccctggaccgcgagagcgtgtcggcctatgagttggtggtaaccgcgcgggacgggggctcgccttcgctgtgggccaccgccagcttgtctgtggaggtggccgacatgaatgacaatgctccggcgttcgcgcagcccgagtacacagtgttcgtgaaggagaacaacccgccgggctgccacatcttcacggtgtctgcgcgagacgcggacgcgcaggagaacgcgctggtgtcctactcgctggtggagcggcgggtgggcgagcgcgcgttgtcgagctacatttcggtgcacgcggagagcggcaaggtgtacgcgctgcagccgctggaccacgaggagctagagctgctgcagtttcaggtgagcgcgcgcgacgcgggcgtgccgcctctgggcagcaacgtgacgctgcaggtgttcgtgctggacgagaacgacaacgcgccggcgctgctggcgcctcgggtgggtggtactggtggtgcagtgagcgagctggtgccgcggtcactgggtgcaggccaagtggtggcgaaggtgcgcgcagttgacgccgactcaggctacaacgcgtggctttcgtatgagctgcagcccccggcaagcagcgctcgcttcccgtttcgcgtggggctgtacacgggcgagatcagcaccactcgtgtcctggacgaagcggactctccgcgccaccggctgctggtgctggtgaaagaccacggtgagccggcgctgacagcgacggccacggttctggtgtcgctggtggagagtggccaggctccaaaggcgtcatcacgggcgtcggtgggcgccgcgggcccagaggcggcgctggtggatgtcaacgtgtacctgatcatcgccatctgcgcggtatccagcctgctggtcctcacgctactgctgtacacagcgctgcggtgctcggcgccacccaccgagggcgcgtgcacggcggacaagcccacgctggtgtgctccagcgcagtggggagctggtcgtactcgcagcagaggcggcagagggtgtgctccggggagggcccacccaagatggatctcatggcctttagccccagcctttcaccttgtcctattatgatgggtaaggcggagaatcaggatttaaatgaagatcatgatgccaaaccacgacagcccaaccctgactggcgttactctgcctccctgagagcaggcatgcacagctctgtgcacctagaggaggctggcattctacgggctggtccaggagggcctgatcagcagtggccaacagtatccagtgcaacaccagaaccagaggcaggagaagtgtcccctccagtcggtgcgggtgtcaacagcaacagctggacctttaaatacggaccaggcaaccccaaacaatccggtcccggtgagttgcccgacaaattcattatcccaggatctcctgcaatcatctccatccggcaggagcctactaacagccaaattgacaaaagtgacttcataaccttcggcaaaaaggaggagaccaagaaaaagaagaaaaagaagaagggtaacaagacccaggagaaaaaagagaaagggaacagcacgactgacaacagtgaccagtgaggtcctcaaatggaaacaagccacttagccagtttttgtaataatggcaaatctctcccatgtagcaattccctgctcctttttcctatctacatgagccctcttagagacctcagaaatctgcagaaagttccctgtgtctgtctagaacgcatttaacaggttttgtcgtaaaagctttactaagtctggtgttaactctttctctccactctggcttgttttcagaacctaaaaagcagacccaagtttcctttctcctccgccgcaaaggagaggcttcccagccccgccagtgagaggttggactctctgccctgtgctccggggatcctgtcttgatgacacttgcagggcaggctgaaaagttttgagattgagcagcttgggagtttgtggccactgggtatgtgtggctaccgcgggtatgcgagtgccagatattggctgagacgagccagcttagactaattggtacaaggaaggcaagaaaacaaagacaaataaacagcggaagttatcagtatggaggggaagtgtaaacttaaagggaccagactttctaaatcttacaactcaagaggtggcagccaccctctaggagacaaaactacccccactgacaaggctttaggagaccctaaagtctgttggctgtgacgtcattatacctaaaatctgcatcatacctgcaagccaacagttcagtgttttaacagagaaccaccctgggaaacagaagcagatctgatgtgtttcctatacatgtcctgtgctcactttattaaaaattcttttgcacacaatgtttatgaaaaggccagatccttttccaatacttatgcaaaagcaaaagaaaaccccgacacctcacctttcgctgtttgttgtttcatagatttatttaaaaaaagagaaagtctatagctataaatctttaaagagaaatatgaatacaattcccctaaactctcctcaaaagagaattcagtctacagccatttaaatgatcattgctgctacagaagtgctttaagagaattgcctgaaacatctgtattatatcggccacctgccaatcacagctttactctttcaggtcactctggggctgcctcttgcatgtattactaaataaaatgatctctctttctctctctctctctcttttctaagaaacaattatgtgcactttgatacacaaccttctctaaccaactatatatcaagacccaaaaattgaagaaaaatattgttttctcatacagtgagcagatttttcaatctactaattctgtgacttgtcttggtgtgctagcctacaccttctctttggtttagttttccttttctataacactctgaattgctaatcttactaacacctatgatgttacctgaaatcaatctcccatatgtatgctgtatgctatgctaagactcctgaaatatacttactctgtgcttgtgtatgtgaatgttaatgcaactattacctagagtgaactttaagctttattgttgaatgtaattccattatatttccttttgtacacctgtgaaaaagtggagtagtgtttttttaaccattgttaatcagcttttgtgtatgaaagacacagtaaaatttctttcttaaatcaagatactggtgattcaaggaattttatttatggtccagccaagagccatctcgtgccaagacttctgctggcaagggaatggataaagctgttttgttctagtaacaattttggaatgaatactgacaatattccatgagggtgtgcaagcacaaattttaccaatctgacctctttgaagttgcagaatgctttgaaattctaatggtatctgaaatatcagctcatagaaagtaacaaaatttgctgtcaccttaaataagacattttaattttgttataatgtacaatttagaagtttgattaattatattatctatttaggcattaatataaaagaggtaggagtctgttatttaaaaaaagcattaaatttaaaaaaaaactgtcttgtctacttttagcttcattctcccatattttgaagggtgtgtaacttcagctctgcaggattgcatggggtaaaacttgttaccaacacatgtgaaccattgctacattgtaggttgtgatcattttgccccactgaagcccatgtatctgaccttacgtgccttttgaactaggagaatcgggctaatttattaatgatgataattataatgtatctgtacagcactttttacatttgcgaagtgctttccaatccatgttagttactagttattacagctgtaaggataaaacacgtcatgtggattcattttgaattggtgctattggtatttcctctgttattgctaataaatgaaaatggtggtatg

SEQ ID NO: 24861 - DNA, 2370 bp, Homo sapiens
  source 1..2370: mol_type = unassigned DNA
atggtgtgcccgaatggatacgacccagggggccgacatctactgctgtttattataattctagcagcttgggaggcagggagaggccagctccactactcggtccccgaggaggctaaacatggcaacttcgtgggccgcatcgcgcaggacctggggctggagctggcggagctggtgccgcgcctgttccgggcggtgtgcaaattccgtggggatcttctggaggtaaatctgcagaatggcattttgtttgtgaattctcggatcgaccgcgaggagctgtgcgggcggagcgcggagtgcagcatccacctggaggtgatcgtggaaaggccgctgcaggttttccatgtggacgtggaggtgaaggacattaacgacaaccctccggtgttcccagcgacacaaaggaatctgttcatcgcggaatccaggccgcttgactctcggtttccactagagggcgcgtccgatgcagatatcggggagaacgccctgctcacttacagactgagccccaatgagtatttcttcctggacgtgccaaccagcaaccagcaggtaaaacctcttggacttgtattacggaaacttttagacagagaagaaactccggagcttcatttattgctcacggccaccgatggaggcaaacccgagctgactggcaccgttcaattactcatcacggtactggacaacaatgacaatgccccagtgttcgacagaaccctgtatacggtgaaattaccagaaaacgtttctatcggaacgctggtgattcaccccaatgcctcagatttagacgaaggcttgaatggggatattatttactccttctccagtgatgtttctccagatataaaatccaagttccacatggaccccttaagtggggcaatcacagtgataggacatatggattttgaagaaagtagagcacacaagatcccagtcgaggctgtcgataaaggcttcccacccctggctggtcattgtacagttcttgtggaagttgtggatgtaaatgacaatgctccacagttgactctcacttccctgtctctccctattccagaggacgcccaaccaggtaccgtcatcacattgattagcgtgtttgaccgagattttggagtcaacggacaggttacctgctccctgacgccccgcgttcccttcaagttggtgtccaccttcaagaattactattcattggtgctggacagcgctctggaccgcgagagtgtgtccgcctatgagctggtggttaccgcgcgggacgggggctcgccttctctgtgggccactgctagcgtgtccgtggaggtggccgacgtgaacgacaacgccccggcgttcgcgcagcccgagtatacggtgttcgtgaaggagaacaacccgccgggctgccacatcttcactgtgtcggcgggggacgcggacgcgcagaagaacgcgctggtgtcctactcgctggtggagctgcgggtgggcgagcgcgcgctgtcgagctacgtgtcagtgcacgcggagagcggcaaggtgtacgcgctgcagccgttggaccacgaggagctggagctgttgcagttccaggtgagcgcgcgcgatgcgggcgtgccgcctctgggcagcaacgtgacgctgcaggtgttcgtgctggacgagaacgacaacgcgccggcactgctggcgcctcgggtgggtggcactggtggcgcagtgagagagcttgtgccgcggtctgtgggcgcgggccatgtggtggcgaaggtacgtgcagttgacgctgactcaggctacaacgcgtggctttcgtatgagttgcaaccggtggcggccggtgcgagcatcccgttccgcgtggggctgtacactggtgagatcagcacgacacgagccctagatgagacggacgcaccgcgccaccgccttctggtgcttgtgaaggaccacggggagccctcgctgacagccacagccaccgtgctggtgtcgctggtggaaagcggccaggcaccaaaggcgtcgtcgcgggcatcgttgggcattgcaggcccagagaccgagctggtggatgtcaacgtgtacctgatcatcgccatctgcgcggtgtccagtctgttggtgcttaccctgctgctgtacacggcgttgcggtgctcagcgccgtcctctgagggcgcatgtagtttggtaaagcccactctggtgtgctccagcgcggtggggagctggtcattctcccagcagaggcggcagagggtgtgctctggggagggcccacccaagacagacctcatggccttcagtcccagccttcctcagggtccatcctctacagacaatgtgagtcataaataa

SEQ ID NO: 24862 - DNA, 5221 bp, Homo sapiens
  source 1..5221: mol_type = unassigned DNA
atggtgtgcccgaatggatacgacccagggggccgacatctactgctgtttattataattctagcagcttgggaggcagggagaggccagctccactactcggtccccgaggaggctaaacatggcaacttcgtgggccgcatcgcgcaggacctggggctggagctggcggagctggtgccgcgcctgttccgggcggtgtgcaaattccgtggggatcttctggaggtaaatctgcagaatggcattttgtttgtgaattctcggatcgaccgcgaggagctgtgcgggcggagcgcggagtgcagcatccacctggaggtgatcgtggaaaggccgctgcaggttttccatgtggacgtggaggtgaaggacattaacgacaaccctccggtgttcccagcgacacaaaggaatctgttcatcgcggaatccaggccgcttgactctcggtttccactagagggcgcgtccgatgcagatatcggggagaacgccctgctcacttacagactgagccccaatgagtatttcttcctggacgtgccaaccagcaaccagcaggtaaaacctcttggacttgtattacggaaacttttagacagagaagaaactccggagcttcatttattgctcacggccaccgatggaggcaaacccgagctgactggcaccgttcaattactcatcacggtactggacaacaatgacaatgccccagtgttcgacagaaccctgtatacggtgaaattaccagaaaacgtttctatcggaacgctggtgattcaccccaatgcctcagatttagacgaaggcttgaatggggatattatttactccttctccagtgatgtttctccagatataaaatccaagttccacatggaccccttaagtggggcaatcacagtgataggacatatggattttgaagaaagtagagcacacaagatcccagtcgaggctgtcgataaaggcttcccacccctggctggtcattgtacagttcttgtggaagttgtggatgtaaatgacaatgctccacagttgactctcacttccctgtctctccctattccagaggacgcccaaccaggtaccgtcatcacattgattagcgtgtttgaccgagattttggagtcaacggacaggttacctgctccctgacgccccgcgttcccttcaagttggtgtccaccttcaagaattactattcattggtgctggacagcgctctggaccgcgagagtgtgtccgcctatgagctggtggttaccgcgcgggacgggggctcgccttctctgtgggccactgctagcgtgtccgtggaggtggccgacgtgaacgacaacgccccggcgttcgcgcagcccgagtatacggtgttcgtgaaggagaacaacccgccgggctgccacatcttcactgtgtcggcgggggacgcggacgcgcagaagaacgcgctggtgtcctactcgctggtggagctgcgggtgggcgagcgcgcgctgtcgagctacgtgtcagtgcacgcggagagcggcaaggtgtacgcgctgcagccgttggaccacgaggagctggagctgttgcagttccaggtgagcgcgcgcgatgcgggcgtgccgcctctgggcagcaacgtgacgctgcaggtgttcgtgctggacgagaacgacaacgcgccggcactgctggcgcctcgggtgggtggcactggtggcgcagtgagagagcttgtgccgcggtctgtgggcgcgggccatgtggtggcgaaggtacgtgcagttgacgctgactcaggctacaacgcgtggctttcgtatgagttgcaaccggtggcggccggtgcgagcatcccgttccgcgtggggctgtacactggtgagatcagcacgacacgagccctagatgagacggacgcaccgcgccaccgccttctggtgcttgtgaaggaccacggggagccctcgctgacagccacagccaccgtgctggtgtcgctggtggaaagcggccaggcaccaaaggcgtcgtcgcgggcatcgttgggcattgcaggcccagagaccgagctggtggatgtcaacgtgtacctgatcatcgccatctgcgcggtgtccagtctgttggtgcttaccctgctgctgtacacggcgttgcggtgctcagcgccgtcctctgagggcgcatgtagtttggtaaagcccactctggtgtgctccagcgcggtggggagctggtcattctcccagcagaggcggcagagggtgtgctctggggagggcccacccaagacagacctcatggccttcagtcccagccttcctcagggtccatcctctacagacaatccacgacagcccaaccctgactggcgttactctgcctccctgagagcaggcatgcacagctctgtgcacctagaggaggctggcattctacgggctggtccaggagggcctgatcagcagtggccaacagtatccagtgcaacaccagaaccagaggcaggagaagtgtcccctccagtcggtgcgggtgtcaacagcaacagctggacctttaaatacggaccaggcaaccccaaacaatccggtcccggtgagttgcccgacaaattcattatcccaggatctcctgcaatcatctccatccggcaggagcctactaacagccaaattgacaaaagtgacttcataaccttcggcaaaaaggaggagaccaagaaaaagaagaaaaagaagaagggtaacaagacccaggagaaaaaagagaaagggaacagcacgactgacaacagtgaccagtgaggtcctcaaatggaaacaagccacttagccagtttttgtaataatggcaaatctctcccatgtagcaattccctgctcctttttcctatctacatgagccctcttagagacctcagaaatctgcagaaagttccctgtgtctgtctagaacgcatttaacaggttttgtcgtaaaagctttactaagtctggtgttaactctttctctccactctggcttgttttcagaacctaaaaagcagacccaagtttcctttctcctccgccgcaaaggagaggcttcccagccccgccagtgagaggttggactctctgccctgtgctccggggatcctgtcttgatgacacttgcagggcaggctgaaaagttttgagattgagcagcttgggagtttgtggccactgggtatgtgtggctaccgcgggtatgcgagtgccagatattggctgagacgagccagcttagactaattggtacaaggaaggcaagaaaacaaagacaaataaacagcggaagttatcagtatggaggggaagtgtaaacttaaagggaccagactttctaaatcttacaactcaagaggtggcagccaccctctaggagacaaaactacccccactgacaaggctttaggagaccctaaagtctgttggctgtgacgtcattatacctaaaatctgcatcatacctgcaagccaacagttcagtgttttaacagagaaccaccctgggaaacagaagcagatctgatgtgtttcctatacatgtcctgtgctcactttattaaaaattcttttgcacacaatgtttatgaaaaggccagatccttttccaatacttatgcaaaagcaaaagaaaaccccgacacctcacctttcgctgtttgttgtttcatagatttatttaaaaaaagagaaagtctatagctataaatctttaaagagaaatatgaatacaattcccctaaactctcctcaaaagagaattcagtctacagccatttaaatgatcattgctgctacagaagtgctttaagagaattgcctgaaacatctgtattatatcggccacctgccaatcacagctttactctttcaggtcactctggggctgcctcttgcatgtattactaaataaaatgatctctctttctctctctctctctcttttctaagaaacaattatgtgcactttgatacacaaccttctctaaccaactatatatcaagacccaaaaattgaagaaaaatattgttttctcatacagtgagcagatttttcaatctactaattctgtgacttgtcttggtgtgctagcctacaccttctctttggtttagttttccttttctataacactctgaattgctaatcttactaacacctatgatgttacctgaaatcaatctcccatatgtatgctgtatgctatgctaagactcctgaaatatacttactctgtgcttgtgtatgtgaatgttaatgcaactattacctagagtgaactttaagctttattgttgaatgtaattccattatatttccttttgtacacctgtgaaaaagtggagtagtgtttttttaaccattgttaatcagcttttgtgtatgaaagacacagtaaaatttctttcttaaatcaagatactggtgattcaaggaattttatttatggtccagccaagagccatctcgtgccaagacttctgctggcaagggaatggataaagctgttttgttctagtaacaattttggaatgaatactgacaatattccatgagggtgtgcaagcacaaattttaccaatctgacctctttgaagttgcagaatgctttgaaattctaatggtatctgaaatatcagctcatagaaagtaacaaaatttgctgtcaccttaaataagacattttaattttgttataatgtacaatttagaagtttgattaattatattatctatttaggcattaatataaaagaggtaggagtctgttatttaaaaaaagcattaaatttaaaaaaaaactgtcttgtctacttttagcttcattctcccatattttgaagggtgtgtaacttcagctctgcaggattgcatggggtaaaacttgttaccaacacatgtgaaccattgctacattgtaggttgtgatcattttgccccactgaagcccatgtatctgaccttacgtgccttttgaactaggagaatcgggctaatttattaatgatgataattataatgtatctgtacagcactttttacatttgcgaagtgctttccaatccatgttagttactagttattacagctgtaaggataaaacacgtcatgtggattcattttgaattggtgctattggtatttcctctgttattgctaataaatgaaaatggtggtatg

SEQ ID NO: 24863 - DNA, 2445 bp, Homo sapiens
  source 1..2445: mol_type = unassigned DNA
atggattatcactggcgaggagagctgggatcctggcgactactactcttgcttctgctcctcgcagcctggaaggtggggagcggccagctccactactccgtccccgaggaggccaaacacggcaccttcgtgggccggatcgcgcaggacctggggctggagctggcggagctggtgccgcgcctgttccgggtggcgtccaaaagacaccgggaccttctggaggtaagtctgcagaatggcattttgtttgtgaattctcggatcgaccgcgaggagctgtgcgggcggagcgcggagtgcagcatccacctggaggtgatcgtggacaggccgctgcaggttttccatgtggacgtggaggtgaaggatgttaatgacaacccgccagtgttccgggtaaaagaccaaaagctgtttgtttcagaatccagaatgccagactctcggtttccgctagagggcgcgtccgatgcagatgttggagctaactccgtgttaacctacaggcttagctctcatgattacttcatgctagatgtgaattcaaagaacgatgagaataaactggttgagctcgtattaagaaaatccttggacagagaggacgctcctgcgcaccacttattcctgacagccacagatgggggcaaacctgagctcacaggcactgttcagctgctggtcacagtgctggatgtgaatgataatgctcccactttcgaacagtctgaatacgaagtaagaatattcgaaaacgcagacaacggaacaacagttatcaaactgaatgcttctgatccggatgaaggagccaatggggcaatttcatattcttttaatagccttgttgaaactatggttattgaccactttagcatagatcgaaatacgggagaaatagtgattcggggtaatttggattttgaacaagaaaacttatacaaaatcctcattgacgccacggacaaaggccatcctcccatggcgggtcattgcaccgttttagtgagaattttggataaaaatgataacgtccctgagatagcactgacttccttatccttgcctgtacgtgaagacgctcaatttggtactgtcatcgccctaattagcgtgaacgacctcgattcaggtgccaacgggcaggtgacctgctccctgatgccccatgtccccttcaagctggtgtccaccttcaagaattactactcgttggtgctggacagcgccctggaccgcgagagagtgtcggcctatgagttggtggtaaccgcgcgggacgggggctcgccttcgctgtgggccaccgccagcttgtctgtggaggtggccgacgtgaacgacaatgctccggcgttcgcgcagcccgagtacacggtgttcgtgaaggagaacaacccgccgggctgccacatcttcacggtgtctgcgcgagacgcggacgcgcaggagaacgcgctggtgtcctactcgcttgtggagcggcgggtgggcgagcgctcgctgtcgagctacatttcggtgcacacggagagcggcaaggtgtacgcgctgcagccgctggaccacgaggagctagagctgctgcagttccaggtgagcgcgcgcgacgcgggcgtgccgcctctgggcagcaacgtgacgctgcaggtgttcgtgctggacgagaatgacaacgcgccggcactgctggagcctcgggtgggtggcactggtggcgcagcgagcaagctggtgccgcggtctgtgggcgcgggccacgtggtagcgaaggtgcgcgcagtggacgccgactcgggctacaacgcgtggctttcgtatgagctgcagccagctgcaagcagccctcgcatcccgttccgcgtggggctgtacacgggcgagatcagcaccactcgtgtcctggacgaagcggactctccgcgccaccgtctgctggtcctggtgaaggatcatggtgaacctgcgctgaccgccacggccacggttctggtgtcgctggtggagagcggccaggctccaaaagcgtcatcgaggcagtcggctggcgttttgggtccggaagcggcgctggtggatgtcaacgtgtacctgatcatcgccatctgcgcggtatccagcctgctggtgctcacgctgctgctgtacactgcgctgcggtgctcagcactgcccactgagggcgggtgccgggcgggcaagcccactctggtgtgctccagtgcggtggggagctggtcatactcgcaacaacagccgcagagggtgtgctctggtgaggggccaccgaagacggacctcatggccttcagcccctgccttcctcctgatctgggatcagttgatgtaggcgaagagcaagatttaaatgttgatcatggcctcaaagtaagtccatttaaatttagaactcataaattctatttgtggaaattgtag

SEQ ID NO: 24864 - DNA, 5260 bp, Homo sapiens
  source 1..5260: mol_type = unassigned DNA
atggattatcactggcgaggagagctgggatcctggcgactactactcttgcttctgctcctcgcagcctggaaggtggggagcggccagctccactactccgtccccgaggaggccaaacacggcaccttcgtgggccggatcgcgcaggacctggggctggagctggcggagctggtgccgcgcctgttccgggtggcgtccaaaagacaccgggaccttctggaggtaagtctgcagaatggcattttgtttgtgaattctcggatcgaccgcgaggagctgtgcgggcggagcgcggagtgcagcatccacctggaggtgatcgtggacaggccgctgcaggttttccatgtggacgtggaggtgaaggatgttaatgacaacccgccagtgttccgggtaaaagaccaaaagctgtttgtttcagaatccagaatgccagactctcggtttccgctagagggcgcgtccgatgcagatgttggagctaactccgtgttaacctacaggcttagctctcatgattacttcatgctagatgtgaattcaaagaacgatgagaataaactggttgagctcgtattaagaaaatccttggacagagaggacgctcctgcgcaccacttattcctgacagccacagatgggggcaaacctgagctcacaggcactgttcagctgctggtcacagtgctggatgtgaatgataatgctcccactttcgaacagtctgaatacgaagtaagaatattcgaaaacgcagacaacggaacaacagttatcaaactgaatgcttctgatccggatgaaggagccaatggggcaatttcatattcttttaatagccttgttgaaactatggttattgaccactttagcatagatcgaaatacgggagaaatagtgattcggggtaatttggattttgaacaagaaaacttatacaaaatcctcattgacgccacggacaaaggccatcctcccatggcgggtcattgcaccgttttagtgagaattttggataaaaatgataacgtccctgagatagcactgacttccttatccttgcctgtacgtgaagacgctcaatttggtactgtcatcgccctaattagcgtgaacgacctcgattcaggtgccaacgggcaggtgacctgctccctgatgccccatgtccccttcaagctggtgtccaccttcaagaattactactcgttggtgctggacagcgccctggaccgcgagagagtgtcggcctatgagttggtggtaaccgcgcgggacgggggctcgccttcgctgtgggccaccgccagcttgtctgtggaggtggccgacgtgaacgacaatgctccggcgttcgcgcagcccgagtacacggtgttcgtgaaggagaacaacccgccgggctgccacatcttcacggtgtctgcgcgagacgcggacgcgcaggagaacgcgctggtgtcctactcgcttgtggagcggcgggtgggcgagcgctcgctgtcgagctacatttcggtgcacacggagagcggcaaggtgtacgcgctgcagccgctggaccacgaggagctagagctgctgcagttccaggtgagcgcgcgcgacgcgggcgtgccgcctctgggcagcaacgtgacgctgcaggtgttcgtgctggacgagaatgacaacgcgccggcactgctggagcctcgggtgggtggcactggtggcgcagcgagcaagctggtgccgcggtctgtgggcgcgggccacgtggtagcgaaggtgcgcgcagtggacgccgactcgggctacaacgcgtggctttcgtatgagctgcagccagctgcaagcagccctcgcatcccgttccgcgtggggctgtacacgggcgagatcagcaccactcgtgtcctggacgaagcggactctccgcgccaccgtctgctggtcctggtgaaggatcatggtgaacctgcgctgaccgccacggccacggttctggtgtcgctggtggagagcggccaggctccaaaagcgtcatcgaggcagtcggctggcgttttgggtccggaagcggcgctggtggatgtcaacgtgtacctgatcatcgccatctgcgcggtatccagcctgctggtgctcacgctgctgctgtacactgcgctgcggtgctcagcactgcccactgagggcgggtgccgggcgggcaagcccactctggtgtgctccagtgcggtggggagctggtcatactcgcaacaacagccgcagagggtgtgctctggtgaggggccaccgaagacggacctcatggccttcagcccctgccttcctcctgatctgggatcagttgatgtaggcgaagagcaagatttaaatgttgatcatggcctcaaaccacgacagcccaaccctgactggcgttactctgcctccctgagagcaggcatgcacagctctgtgcacctagaggaggctggcattctacgggctggtccaggagggcctgatcagcagtggccaacagtatccagtgcaacaccagaaccagaggcaggagaagtgtcccctccagtcggtgcgggtgtcaacagcaacagctggacctttaaatacggaccaggcaaccccaaacaatccggtcccggtgagttgcccgacaaattcattatcccaggatctcctgcaatcatctccatccggcaggagcctactaacagccaaattgacaaaagtgacttcataaccttcggcaaaaaggaggagaccaagaaaaagaagaaaaagaagaagggtaacaagacccaggagaaaaaagagaaagggaacagcacgactgacaacagtgaccagtgaggtcctcaaatggaaacaagccacttagccagtttttgtaataatggcaaatctctcccatgtagcaattccctgctcctttttcctatctacatgagccctcttagagacctcagaaatctgcagaaagttccctgtgtctgtctagaacgcatttaacaggttttgtcgtaaaagctttactaagtctggtgttaactctttctctccactctggcttgttttcagaacctaaaaagcagacccaagtttcctttctcctccgccgcaaaggagaggcttcccagccccgccagtgagaggttggactctctgccctgtgctccggggatcctgtcttgatgacacttgcagggcaggctgaaaagttttgagattgagcagcttgggagtttgtggccactgggtatgtgtggctaccgcgggtatgcgagtgccagatattggctgagacgagccagcttagactaattggtacaaggaaggcaagaaaacaaagacaaataaacagcggaagttatcagtatggaggggaagtgtaaacttaaagggaccagactttctaaatcttacaactcaagaggtggcagccaccctctaggagacaaaactacccccactgacaaggctttaggagaccctaaagtctgttggctgtgacgtcattatacctaaaatctgcatcatacctgcaagccaacagttcagtgttttaacagagaaccaccctgggaaacagaagcagatctgatgtgtttcctatacatgtcctgtgctcactttattaaaaattcttttgcacacaatgtttatgaaaaggccagatccttttccaatacttatgcaaaagcaaaagaaaaccccgacacctcacctttcgctgtttgttgtttcatagatttatttaaaaaaagagaaagtctatagctataaatctttaaagagaaatatgaatacaattcccctaaactctcctcaaaagagaattcagtctacagccatttaaatgatcattgctgctacagaagtgctttaagagaattgcctgaaacatctgtattatatcggccacctgccaatcacagctttactctttcaggtcactctggggctgcctcttgcatgtattactaaataaaatgatctctctttctctctctctctctcttttctaagaaacaattatgtgcactttgatacacaaccttctctaaccaactatatatcaagacccaaaaattgaagaaaaatattgttttctcatacagtgagcagatttttcaatctactaattctgtgacttgtcttggtgtgctagcctacaccttctctttggtttagttttccttttctataacactctgaattgctaatcttactaacacctatgatgttacctgaaatcaatctcccatatgtatgctgtatgctatgctaagactcctgaaatatacttactctgtgcttgtgtatgtgaatgttaatgcaactattacctagagtgaactttaagctttattgttgaatgtaattccattatatttccttttgtacacctgtgaaaaagtggagtagtgtttttttaaccattgttaatcagcttttgtgtatgaaagacacagtaaaatttctttcttaaatcaagatactggtgattcaaggaattttatttatggtccagccaagagccatctcgtgccaagacttctgctggcaagggaatggataaagctgttttgttctagtaacaattttggaatgaatactgacaatattccatgagggtgtgcaagcacaaattttaccaatctgacctctttgaagttgcagaatgctttgaaattctaatggtatctgaaatatcagctcatagaaagtaacaaaatttgctgtcaccttaaataagacattttaattttgttataatgtacaatttagaagtttgattaattatattatctatttaggcattaatataaaagaggtaggagtctgttatttaaaaaaagcattaaatttaaaaaaaaactgtcttgtctacttttagcttcattctcccatattttgaagggtgtgtaacttcagctctgcaggattgcatggggtaaaacttgttaccaacacatgtgaaccattgctacattgtaggttgtgatcattttgccccactgaagcccatgtatctgaccttacgtgccttttgaactaggagaatcgggctaatttattaatgatgataattataatgtatctgtacagcactttttacatttgcgaagtgctttccaatccatgttagttactagttattacagctgtaaggataaaacacgtcatgtggattcattttgaattggtgctattggtatttcctctgttattgctaataaatgaaaatggtggtatg

SEQ ID NO: 24865 - DNA, 6388 bp, Homo sapiens
  source 1..6388: mol_type = unassigned DNA
ctcgcttttcttgcaatattttataccttttcaattcatagaattactcaagaaaactacctcagttggttgctactttttgttgattccttttaccagacatgactaagtttctttttcatcagtagatttctgggctcctatattcactagagattgcaactcctggatttctcttacactagaatcctatttcgagccatatgggagattctgaattccagaacaaaagaattttgtaatttaaaattcgtgattgctcaatggaatcattttaattgttacttcatttctgtcgttatttaaaacttaagtggagagttttctcagggataagaaaaccacaatcaaggtcatacaaaacttttagaggcagtcagtctgctaagaaggctccagcaagagaaacgggatcttctgtttcaacaatcattacttaagaaaaaattaagaaaatgaaataagttttgcagaataactgtgaaatttttattcatgaaatatgtacttacactttgggccacgtgatgtcactctttgccgcgatgttctctctgaatccagacaaatacagcccttttcccatgggaaagaggctcaattctttttcactctctctgtgctgaacgatggcgaacacagcagaatgggactgacgaaatcagatgatttcttctaatttggaggcaattttcactaattagaagaagactgagtatttgaaatgttatactcaagtcgaggagatccagagggtcagcctctactgctctcgcttctgatcctcgcaatgtgggtggtggggagcggccagctccactactccgtcccggaggaagccgaacacggcaccttcgtgggccgcatcgcgcaggacctggggctggagctggcggagctggtgccgcgcctgttccagttggattccaaaggccgcggggaccttctggaggtaaatctgcagaatggcattttgtttgtgaattctcggatcgaccgcgaggagctgtgcgggcggagcgcggagtgcagcatccacctggaggtgatcgtagacaggccgctgcaggttttccatgtggacgtggaggtgaaggacattaacgacaaccctccagtgttcccagcgacacaaaagaatctgttcatcgcggaatccaggccgcttgactctcggtttccactagagggcgcgtccgatgcagatatcggggagaacgccctgctcacttacagactgagccccaatgagtatttcttcctggacgtgccaaccagcaaccagcaggtaaaacctcttggacttgtattacggaaacttttagacagagaagaaactccggagcttcatttattgctcacggccaccgatggaggcaaacccgagctgactggcaccgttcaattactcatcacggtactggacaacaatgacaatgccccagtgttcgacagaaccctgtatacggtgaaattaccagaaaacgtttctatcggaacgctggtgattcaccccaatgcctcagatttagacgaaggcttgaatggggatattatttactccttctccagtgatgtttctccagatataaaatccaagttccacatggaccccttaagtggggcaatcacagtgataggacatatggattttgaagaaagtagagcacacaagatcccagtcgaggctgtcgataaaggcttcccacccctggctggtcattgtacacttcttgtggaagttgtggatgtaaatgacaatgctccacagttgactatcaaaacgctctcggttcctgtaaaagaggacgcacaactggggacagttattgccctgattagtgtgatcgacctagacgcagatgccaacgggcaggttacctgctccctgacgccccacgtccccttcaagctggtgtccacctacaagaattactactcgttggtgctggacagagctctggaccgcgagagtgtgtccgcctacgagctggtggttaccgcgcgggacgggggctcgccttcactgtgggccacggccagggtgtctgtggaggtggccgacgtgaacgacaacgcaccagcgttcgcgcagtccgagtacacggtgttcgtgaaggagaacaacccgccgggctgccacatcttcacggtgtctgcgcgggacgctgacgcgcaggagaacgccctggtgtcctactcgctggtggagcggcggttgggcgagcgctcgctgtcgagctacgtgtcagtgcacgcggagagcggcaaggtgtacgcgctgcagccgttggaccacgaggagctggagctgctacagttccaggtgagcgcgcgcgacgcgggcgtgccgcctctgggcagcaacgtgacgctgcaggtgttcgtgctggacgagaacgacaatgcgccggcgctgctgacacctcggatgaggggcactgacggcgcagtgagcgagatggtgctgcggtcggtgggcgccggcgtagtggtggggaaggtgcgcgcagtggacgccgactcgggctacaacgcgtggctttcatacgagctgcagccagaaacggccagcgcgagcatcccgttccgcgtggggctgtacacgggcgagatcagcacaacgcgtgccctggacgaaacggacgcaccgcgccagcgcctactggtgctggtgaaagaccacggggagccagcgctgacggccacggccactgtgctggtgtcgctggtggagagcggccaggcgccaaagtcatcgtcgcgggcgtcagtgggtgccacgggccccgaggtgacgctggtggatgtcaacgtgtacctgatcatcgccatctgcgcggtgtctagcctgttggttctcacgctgctgctgtacactgtgctgcggtgctcggcgatgcccaccgagggcgagtgcgcgcctggcaagccgacgctggtgtgttctagcgcggtggggagttggtcgtactcgcagcagaggaggcagagggtgtgctctggcgagggtaagcagaagaccgacctcatggccttcagcccgggcctttctccttgtgctggatctacagagcgaacgggagaaccctctgcttcctcagattcaactgggaaggtgggtttttctagcattttatttatttatataattttttttcttgaaagatattatcgattactcccaggggccgttcaaatagttttattcatttttctagaaatccagcagattttttttctgataaagtaaaccccttaacattggagccgactttgtcttgacttctagtgagaattataaactgtatattaaatagatattttttgggtgctgaatcaattttatttaaatttgtgattaaagtgacattgaatttctgatgctatgctgccataacacttgaaaaccaatttagttgttagtcattcattaaacattaacatcactatcatttatttattgctaaatgatgcatagtattttagtctacttgtattgtttataagaaacccaagcaaaaatatatagcaattgttaccttgttaagtttgtagttctctacatttctctggatggagactgtgaacatctgattgttcagcaaccttcagtatctattattttaataagaaagaaacttcccctaaactttagaaaacagttgctccactttaggaatcaaattatgtcaataaatgttataaacacagccttcatttcaacttatataaaatatgttttaaaatgcctgacaatgtagataattcaagaaatgttgactgaaattttgtctacacttagaacattttttgaaattcagtttacagaaattggagaaaatgctttttaaacaagtgtttcctttcttcaagaagatattctccttttaattgaaattttctccattcagtgataaaatgatcagccatgtgaagattcgaaacttcgagttcttttgaaattcagagtctgtaacttaaaacattacccttatgaatttagatgagaattcacttgttctgtcagtaatccataagacagaaatctgtttttttaaaaatatctttttctcctctcagctcatacataacacaaggcagaaatctggatatgagatttgcctctttaatgtcactacatgttatgtttcctgaattgtagtatgtgactttcaaaatggtggttttccacactctacctttagtgcaagctatttgtttgttttctaatttatagttttaaaaacttcgcttattgagtttttgttatgtggtttatatttttctttctctttcagctattttatttaatattgtgtcagatattttacaaggtatgacctaattaaaaactcagtagagaaagatcagaatggccttgagaatagagccacaaaaataactatgaaaatgccagtaacgtttatttaaaacaaaatattttaatttttaaattttcccttaaaacacacttttggaatatgctacaatattacatgttttttgtctttttatttttctgagacggagtcgttttctgccacccaggctggagtacagtggcatgatcttggctcactgcaacgtctgcctcctgggttcaagcaattctcctgcctcagcctcctgagtagctgggattataggcacatgccaccgcgcccagctaatttttgtatttttagtagagatggggtttcatcatgttggccaggttggtctcgaactcctgaccttgtgatgctcccacctcggcctcccaaagtgctgggattaaagctgtgagccactgtgccaaggcttttttattttttttttttgtcattttctttcaaaacttgagtggtctctgagctcctgtcattaaacctatctatatctgtctatcagcacaactcaccttgaatatagtcttatactttcaagtatctttgtctttgcacgtttttcaagtttcatgtgccatttaaacttggacccaggtatctgattatttgatgtgaatagagggatgctacagatgtcatttgtctcccgccctaagtcctccagtctccttagagctagtacttactaagcatttactatgtcatcaataatcataaaacgtatttttttttttgagtcagagtctcgctctgttgcccaggctggagtgcagtggtgccatcttggctcactccaagctccccctcccgtgttcacgccattctcctgcctcagcctcccgagtagctgggactacaggcgcctgccaccatgcccgcctaatttttttgtatttttagtagagatggggtttcaccgtgttagtcaggatggtctcgatctcctgacctcatgatcctcccgcctcagcctcccaaaatgctgggattacaggcgtgagccaccgcgcctggcctaaaatgtgttctttattattgacggctgtattgatgggattggtaatttagtccttcatattaatctctattctctctcagagtacaagctctcatcatatgcaaattctcagaagggctgtgaacaccttagtaataaatttatcttttgaggtcattagcaaacatgaactcacagggatccagagatggtaaaattcaaaacagcctgtcaagttcaaaacagagaggtgaaagcagaagagacactttcctattttgcctaataggtctccttatatgcatctgtagttaacattcctcaattcaagttagaatcatgaaacaataatgaagctcctcctatgtctcttttcaagttgtaattactatataggaaaaactaagttgtcacccaatatcttagacactttgagagcaaagggggtgctgtaaataagtatacaagatcacagacctaaattgagcctgttccagacaaattggggcctatggtcaacctatccttagacctgctaacgcattagcattagcagcacctaagtcctcattgaatgttctggttcaaggctccacctcagaaattctgaaatgggtagtaagagcaaattttcattttaaagcacacctgagatgattctcatacaaccgaaattttagatccatagccctatttgatacttgacagtgcaagtttctgtaatttaaaaagatgtggtggcctgacacctgcaatcccaacattttgggaggccaaggtgggagggtcccttccttgagcccagcagtttgagaccaatgtagtgagactcatctctgccaaaaaaaaaaaattagccgggcatggtggcacacatctctagtcccaattactcaggaggctgaggcgagagaatcgcttgagcctgggacattgaggctgcagtgaactgtgatggcacaactgcatttcagcccgggagacagcaagattctgtctc

SEQ ID NO: 24866 - DNA, 6293 bp, Homo sapiens
  source 1..6293: mol_type = unassigned DNA
acttggacgttggaataagatagtaaaactcacaacaaaactttgtagaacttagtcaggaaaagaatctcaagcatagctttaaaaacagaaattgccccgagtactaaggatgagcaataatgaaattaaaacatattgtaataacattacacaaactatattggagactacaaagaagagattattcatagattataaagcttggaaagaatcaaaacaacacatttctggaaacagattgtataaatgctacaaaagagaaaaatatattttctccccacgcaacacaagaccttaaagtcaattctcgcttttcttgcaatattttataccttttcaattcatagaattactcaagaaaactacctcagttggttgctactttttgttgattccttttaccagacatgactaagtttctttttcatcagtagatttctgggctcctatattcactagagattgcaactcctggatttctcttacactagaatcctatttcgagccatatgggagattctgaattccagaacaaaagaattttgtaatttaaaattcgtgattgctcaatggaatcattttaattgttacttcatttctgtcgttatttaaaacttaagtggagagttttctcagggataagaaaaccacaatcaaggtcatacaaaacttttagaggcagtcagtctgctaagaaggctccagcaagagaaacgggatcttctgtttcaacaatcattacttaagaaaaaattaagaaaatgaaataagttttgcagaataactgtgaaatttttattcatgaaatatgtacttacactttgggccacgtgatgtcactctttgccgcgatgttctctctgaatccagacaaatacagcccttttcccatgggaaagaggctcaattctttttcactctctctgtgctgaacgatggcgaacacagcagaatgggactgacgaaatcagatgatttcttctaatttggaggcaattttcactaattagaagaagactgagtatttgaaatgttatactcaagtcgaggagatccagagggtcagcctctactgctctcgcttctgatcctcgcaatgtgggtggtggggagcggccagctccactactccgtcccggaggaagccgaacacggcaccttcgtgggccgcatcgcgcaggacctggggctggagctggcggagctggtgccgcgcctgttccagttggattccaaaggccgcggggaccttctggaggtaaatctgcagaatggcattttgtttgtgaattctcggatcgaccgcgaggagctgtgcgggcggagcgcggagtgcagcatccacctggaggtgatcgtagacaggccgctgcaggttttccatgtggacgtggaggtgaaggacattaacgacaaccctccagtgttcccagcgacacaaaagaatctgttcatcgcggaatccaggccgcttgactctcggtttccactagagggcgcgtccgatgcagatatcggggagaacgccctgctcacttacagactgagccccaatgagtatttcttcctggacgtgccaaccagcaaccagcaggtaaaacctcttggacttgtattacggaaacttttagacagagaagaaactccggagcttcatttattgctcacggccaccgatggaggcaaacccgagctgactggcaccgttcaattactcatcacggtactggacaacaatgacaatgccccagtgttcgacagaaccctgtatacggtgaaattaccagaaaacgtttctatcggaacgctggtgattcaccccaatgcctcagatttagacgaaggcttgaatggggatattatttactccttctccagtgatgtttctccagatataaaatccaagttccacatggaccccttaagtggggcaatcacagtgataggacatatggattttgaagaaagtagagcacacaagatcccagtcgaggctgtcgataaaggcttcccacccctggctggtcattgtacacttcttgtggaagttgtggatgtaaatgacaatgctccacagttgactatcaaaacgctctcggttcctgtaaaagaggacgcacaactggggacagttattgccctgattagtgtgatcgacctagacgcagatgccaacgggcaggttacctgctccctgacgccccacgtccccttcaagctggtgtccacctacaagaattactactcgttggtgctggacagagctctggaccgcgagagtgtgtccgcctacgagctggtggttaccgcgcgggacgggggctcgccttcactgtgggccacggccagggtgtctgtggaggtggccgacgtgaacgacaacgcaccagcgttcgcgcagtccgagtacacggtgttcgtgaaggagaacaacccgccgggctgccacatcttcacggtgtctgcgcgggacgctgacgcgcaggagaacgccctggtgtcctactcgctggtggagcggcggttgggcgagcgctcgctgtcgagctacgtgtcagtgcacgcggagagcggcaaggtgtacgcgctgcagccgttggaccacgaggagctggagctgctacagttccaggtgagcgcgcgcgacgcgggcgtgccgcctctgggcagcaacgtgacgctgcaggtgttcgtgctggacgagaacgacaatgcgccggcgctgctgacacctcggatgaggggcactgacggcgcagtgagcgagatggtgctgcggtcggtgggcgccggcgtagtggtggggaaggtgcgcgcagtggacgccgactcgggctacaacgcgtggctttcatacgagctgcagccagaaacggccagcgcgagcatcccgttccgcgtggggctgtacacgggcgagatcagcacaacgcgtgccctggacgaaacggacgcaccgcgccagcgcctactggtgctggtgaaagaccacggggagccagcgctgacggccacggccactgtgctggtgtcgctggtggagagcggccaggcgccaaagtcatcgtcgcgggcgtcagtgggtgccacgggccccgaggtgacgctggtggatgtcaacgtgtacctgatcatcgccatctgcgcggtgtctagcctgttggttctcacgctgctgctgtacactgtgctgcggtgctcggcgatgcccaccgagggcgagtgcgcgcctggcaagccgacgctggtgtgttctagcgcggtggggagttggtcgtactcgcagcagaggaggcagagggtgtgctctggcgagggtaagcagaagaccgacctcatggccttcagcccgggcctttctccttgtgctggatctacagagcgaacgggagaaccctctgcttcctcagattcaactgggaagccacgacagcccaaccctgactggcgttactctgcctccctgagagcaggcatgcacagctctgtgcacctagaggaggctggcattctacgggctggtccaggagggcctgatcagcagtggccaacagtatccagtgcaacaccagaaccagaggcaggagaagtgtcccctccagtcggtgcgggtgtcaacagcaacagctggacctttaaatacggaccaggcaaccccaaacaatccggtcccggtgagttgcccgacaaattcattatcccaggatctcctgcaatcatctccatccggcaggagcctactaacagccaaattgacaaaagtgacttcataaccttcggcaaaaaggaggagaccaagaaaaagaagaaaaagaagaagggtaacaagacccaggagaaaaaagagaaagggaacagcacgactgacaacagtgaccagtgaggtcctcaaatggaaacaagccacttagccagtttttgtaataatggcaaatctctcccatgtagcaattccctgctcctttttcctatctacatgagccctcttagagacctcagaaatctgcagaaagttccctgtgtctgtctagaacgcatttaacaggttttgtcgtaaaagctttactaagtctggtgttaactctttctctccactctggcttgttttcagaacctaaaaagcagacccaagtttcctttctcctccgccgcaaaggagaggcttcccagccccgccagtgagaggttggactctctgccctgtgctccggggatcctgtcttgatgacacttgcagggcaggctgaaaagttttgagattgagcagcttgggagtttgtggccactgggtatgtgtggctaccgcgggtatgcgagtgccagatattggctgagacgagccagcttagactaattggtacaaggaaggcaagaaaacaaagacaaataaacagcggaagttatcagtatggaggggaagtgtaaacttaaagggaccagactttctaaatcttacaactcaagaggtggcagccaccctctaggagacaaaactacccccactgacaaggctttaggagaccctaaagtctgttggctgtgacgtcattatacctaaaatctgcatcatacctgcaagccaacagttcagtgttttaacagagaaccaccctgggaaacagaagcagatctgatgtgtttcctatacatgtcctgtgctcactttattaaaaattcttttgcacacaatgtttatgaaaaggccagatccttttccaatacttatgcaaaagcaaaagaaaaccccgacacctcacctttcgctgtttgttgtttcatagatttatttaaaaaaagagaaagtctatagctataaatctttaaagagaaatatgaatacaattcccctaaactctcctcaaaagagaattcagtctacagccatttaaatgatcattgctgctacagaagtgctttaagagaattgcctgaaacatctgtattatatcggccacctgccaatcacagctttactctttcaggtcactctggggctgcctcttgcatgtattactaaataaaatgatctctctttctctctctctctctcttttctaagaaacaattatgtgcactttgatacacaaccttctctaaccaactatatatcaagacccaaaaattgaagaaaaatattgttttctcatacagtgagcagatttttcaatctactaattctgtgacttgtcttggtgtgctagcctacaccttctctttggtttagttttccttttctataacactctgaattgctaatcttactaacacctatgatgttacctgaaatcaatctcccatatgtatgctgtatgctatgctaagactcctgaaatatacttactctgtgcttgtgtatgtgaatgttaatgcaactattacctagagtgaactttaagctttattgttgaatgtaattccattatatttccttttgtacacctgtgaaaaagtggagtagtgtttttttaaccattgttaatcagcttttgtgtatgaaagacacagtaaaatttctttcttaaatcaagatactggtgattcaaggaattttatttatggtccagccaagagccatctcgtgccaagacttctgctggcaagggaatggataaagctgttttgttctagtaacaattttggaatgaatactgacaatattccatgagggtgtgcaagcacaaattttaccaatctgacctctttgaagttgcagaatgctttgaaattctaatggtatctgaaatatcagctcatagaaagtaacaaaatttgctgtcaccttaaataagacattttaattttgttataatgtacaatttagaagtttgattaattatattatctatttaggcattaatataaaagaggtaggagtctgttatttaaaaaaagcattaaatttaaaaaaaaactgtcttgtctacttttagcttcattctcccatattttgaagggtgtgtaacttcagctctgcaggattgcatggggtaaaacttgttaccaacacatgtgaaccattgctacattgtaggttgtgatcattttgccccactgaagcccatgtatctgaccttacgtgccttttgaactaggagaatcgggctaatttattaatgatgataattataatgtatctgtacagcactttttacatttgcgaagtgctttccaatccatgttagttactagttattacagctgtaaggataaaacacgtcatgtggattcattttgaattggtgctattggtatttcctctgttattgctaataaatgaaaatggtggtatg

SEQ ID NO: 24867 - DNA, 5299 bp, Homo sapiens
  source 1..5299: mol_type = unassigned DNA
atggtgggctgtggggtggcagttttatgtttgtgggtttcctgcggcgctgcagcgggacagctcgagtactcagtgccggaggagacggagcggggcgtagccgtaggcaatctctccgcggacttgaggctgccagcggccgctatgtcctcgcggaactttcgcttcctttccagccaccgcgagctctacttcggggtggatctacccagcggcaatttggtggtcagagagccggcggaccgcgaacagctgtgcagggccaaagctgcctgcgtcttgacctacgacctggtgctcgaggacccgctggagctgcacaagattcggattcacgtcctggacaccaatgacaactcacctctctttcctgccggcgacgtgcagctgcacatccccgagttcctgacgcccggagcccgctttactctcccgaatgcccaagatgacgacgagggaagcaatgggatactaagctacagcctaagccccagtcagcactttcgcctggacatgggatcgcgggttgacggcagcgaatacccggagttggtgttggagaaagcactggatcgcgaacagcgcgccacccacctgctggtgcttacagctcgggacggcgggctacctgcccgctcaggagacgcacaagtcaccatcattgtggtggacacaaatgacaacgcgcctgtatttgagcgctccgtataccgcaccaaggttccagagactgcacccaatgggactgtgttattccgagttcaagccttggatccagatgaagggtccaatggggaagtccagtactccctaagcaacagcacgcaagcagagctgcgacaccgctttcacgtgcaccctaaaagtggggaggtgcaagtagctgcttcactaggtccgcctgaaacgctcttggaggcatacattgaggcgagggacgaaggtgtctttggtttagctagcaccgctaaactgctggtggaggtgactgacgtgaacgatcatgcccccgaactggacttcctgactctttcgaacccagtacctgaggacgctgcccctggcacagtgattgctctctttagtgtaaaggatgaagacctcgattctaatggtagggtcatttgtggcatgtctagtgcaggcccttttcagctgacggcttcctttgacaactactacagcctgctgattgatgggcccctggaccgggagcagatcagtgaataccaagtcctgatcacggcctcagatagtggctcacccccacttagcacccgaaggacaatcactgtgtcagttgctgatgtgaatgacaatacaccaaactttcctcaaccccagcaggaacttttcgttgctgaaaacaatggccctggggcctctctaggccgagtgtttgcccaggaccccgacctggggaagaatggccttgtctcttatgagctgttggatgttatctctgaagggccatcagcctctagcttgctggcagtggaatcatccagtggggccatcactgccaaaacttcctttgactttgagcagctcagggggtttcatttccaagtagaaggccgggatggtggcattcctcccagaagtgcaacagtgactataaacttgtttgtggtagataggaatgacaattatccggttatcttgtttcccttgcccagaaatggttctgtcccagtggaaattgtgccccgctctgccaggactggacacttggtcacaaaagtggtagcagaggatgctgacagtggttctaatgcctggctttcctaccacatctcccgggcgtctgactctagtctctttagaatttcagccaatataggtgagctccgtactgctcgcttagttcttcccactgatgcagttaagcagagggtggtggtagtggttcgggaccatggagacccaccactttcctcctctgtcactctgggtgtgctgttgagcaactctgtccctcagttacttccagactttgaagatgtctgggaaccaggagggcagctttctgcccagaacttgtatttagtaattgccttggcttgtatttcctttttatttctggggtgcttacttttcttcgtgtgtaccaagttgcaccagagcccaggctgttgcgctcagagctgctgtcgctctacagaggatctgaggtatggaagtaagatggtttcaaatccttgcatgacatcagccaccatagatgtcactacagttgagagactttctcagacttatctctatcgggcctctctgggacttggttctgataataacagtttgctgttgcgtggggagtacaatgctgccgacctgcgaaatcttgccactggggtaggactgaatttgccaatatcctgtattcagattcggaataggaaaggggatcacgctaatgtcaatgccatgccacgacagcccaaccctgactggcgttactctgcctccctgagagcaggcatgcacagctctgtgcacctagaggaggctggcattctacgggctggtccaggagggcctgatcagcagtggccaacagtatccagtgcaacaccagaaccagaggcaggagaagtgtcccctccagtcggtgcgggtgtcaacagcaacagctggacctttaaatacggaccaggcaaccccaaacaatccggtcccggtgagttgcccgacaaattcattatcccaggatctcctgcaatcatctccatccggcaggagcctactaacagccaaattgacaaaagtgacttcataaccttcggcaaaaaggaggagaccaagaaaaagaagaaaaagaagaagggtaacaagacccaggagaaaaaagagaaagggaacagcacgactgacaacagtgaccagtgaggtcctcaaatggaaacaagccacttagccagtttttgtaataatggcaaatctctcccatgtagcaattccctgctcctttttcctatctacatgagccctcttagagacctcagaaatctgcagaaagttccctgtgtctgtctagaacgcatttaacaggttttgtcgtaaaagctttactaagtctggtgttaactctttctctccactctggcttgttttcagaacctaaaaagcagacccaagtttcctttctcctccgccgcaaaggagaggcttcccagccccgccagtgagaggttggactctctgccctgtgctccggggatcctgtcttgatgacacttgcagggcaggctgaaaagttttgagattgagcagcttgggagtttgtggccactgggtatgtgtggctaccgcgggtatgcgagtgccagatattggctgagacgagccagcttagactaattggtacaaggaaggcaagaaaacaaagacaaataaacagcggaagttatcagtatggaggggaagtgtaaacttaaagggaccagactttctaaatcttacaactcaagaggtggcagccaccctctaggagacaaaactacccccactgacaaggctttaggagaccctaaagtctgttggctgtgacgtcattatacctaaaatctgcatcatacctgcaagccaacagttcagtgttttaacagagaaccaccctgggaaacagaagcagatctgatgtgtttcctatacatgtcctgtgctcactttattaaaaattcttttgcacacaatgtttatgaaaaggccagatccttttccaatacttatgcaaaagcaaaagaaaaccccgacacctcacctttcgctgtttgttgtttcatagatttatttaaaaaaagagaaagtctatagctataaatctttaaagagaaatatgaatacaattcccctaaactctcctcaaaagagaattcagtctacagccatttaaatgatcattgctgctacagaagtgctttaagagaattgcctgaaacatctgtattatatcggccacctgccaatcacagctttactctttcaggtcactctggggctgcctcttgcatgtattactaaataaaatgatctctctttctctctctctctctcttttctaagaaacaattatgtgcactttgatacacaaccttctctaaccaactatatatcaagacccaaaaattgaagaaaaatattgttttctcatacagtgagcagatttttcaatctactaattctgtgacttgtcttggtgtgctagcctacaccttctctttggtttagttttccttttctataacactctgaattgctaatcttactaacacctatgatgttacctgaaatcaatctcccatatgtatgctgtatgctatgctaagactcctgaaatatacttactctgtgcttgtgtatgtgaatgttaatgcaactattacctagagtgaactttaagctttattgttgaatgtaattccattatatttccttttgtacacctgtgaaaaagtggagtagtgtttttttaaccattgttaatcagcttttgtgtatgaaagacacagtaaaatttctttcttaaatcaagatactggtgattcaaggaattttatttatggtccagccaagagccatctcgtgccaagacttctgctggcaagggaatggataaagctgttttgttctagtaacaattttggaatgaatactgacaatattccatgagggtgtgcaagcacaaattttaccaatctgacctctttgaagttgcagaatgctttgaaattctaatggtatctgaaatatcagctcatagaaagtaacaaaatttgctgtcaccttaaataagacattttaattttgttataatgtacaatttagaagtttgattaattatattatctatttaggcattaatataaaagaggtaggagtctgttatttaaaaaaagcattaaatttaaaaaaaaactgtcttgtctacttttagcttcattctcccatattttgaagggtgtgtaacttcagctctgcaggattgcatggggtaaaacttgttaccaacacatgtgaaccattgctacattgtaggttgtgatcattttgccccactgaagcccatgtatctgaccttacgtgccttttgaactaggagaatcgggctaatttattaatgatgataattataatgtatctgtacagcactttttacatttgcgaagtgctttccaatccatgttagttactagttattacagctgtaaggataaaacacgtcatgtggattcattttgaattggtgctattggtatttcctctgttattgctaataaatgaaaatggtggtatg

SEQ ID NO: 24868 - DNA, 3084 bp, Homo sapiens
  source 1..3084: mol_type = unassigned DNA
caatgccggcgttcgggaggcgcaacgtcggcggtcgctgagtatccagcccgcagcagtgacggccggcaggagcgtgctcttccccgcggctcgtgctctccaggagtccggagcatggtcctgggtcaccgttggtgtagcgtgttggtggaacgtggacgcctagagggaggatggtgggctgtggggtggcagttttatgtttgtgggtttcctgcggcgctgcagcgggacagctcgagtactcagtgccggaggagacggagcggggcgtagccgtaggcaatctctccgcggacttgaggctgccagcggccgctatgtcctcgcggaactttcgcttcctttccagccaccgcgagctctacttcggggtggatctacccagcggcaatttggtggtcagagagccggcggaccgcgaacagctgtgcagggccaaagctgcctgcgtcttgacctacgacctggtgctcgaggacccgctggagctgcacaagattcggattcacgtcctggacaccaatgacaactcacctctctttcctgccggcgacgtgcagctgcacatccccgagttcctgacgcccggagcccgctttactctcccgaatgcccaagatgacgacgagggaagcaatgggatactaagctacagcctaagccccagtcagcactttcgcctggacatgggatcgcgggttgacggcagcgaatacccggagttggtgttggagaaagcactggatcgcgaacagcgcgccacccacctgctggtgcttacagctcgggacggcgggctacctgcccgctcaggagacgcacaagtcaccatcattgtggtggacacaaatgacaacgcgcctgtatttgagcgctccgtataccgcaccaaggttccagagactgcacccaatgggactgtgttattccgagttcaagccttggatccagatgaagggtccaatggggaagtccagtactccctaagcaacagcacgcaagcagagctgcgacaccgctttcacgtgcaccctaaaagtggggaggtgcaagtagctgcttcactaggtccgcctgaaacgctcttggaggcatacattgaggcgagggacgaaggtgtctttggtttagctagcaccgctaaactgctggtggaggtgactgacgtgaacgatcatgcccccgaactggacttcctgactctttcgaacccagtacctgaggacgctgcccctggcacagtgattgctctctttagtgtaaaggatgaagacctcgattctaatggtagggtcatttgtggcatgtctagtgcaggcccttttcagctgacggcttcctttgacaactactacagcctgctgattgatgggcccctggaccgggagcagatcagtgaataccaagtcctgatcacggcctcagatagtggctcacccccacttagcacccgaaggacaatcactgtgtcagttgctgatgtgaatgacaatacaccaaactttcctcaaccccagcaggaacttttcgttgctgaaaacaatggccctggggcctctctaggccgagtgtttgcccaggaccccgacctggggaagaatggccttgtctcttatgagctgttggatgttatctctgaagggccatcagcctctagcttgctggcagtggaatcatccagtggggccatcactgccaaaacttcctttgactttgagcagctcagggggtttcatttccaagtagaaggccgggatggtggcattcctcccagaagtgcaacagtgactataaacttgtttgtggtagataggaatgacaattatccggttatcttgtttcccttgcccagaaatggttctgtcccagtggaaattgtgccccgctctgccaggactggacacttggtcacaaaagtggtagcagaggatgctgacagtggttctaatgcctggctttcctaccacatctcccgggcgtctgactctagtctctttagaatttcagccaatataggtgagctccgtactgctcgcttagttcttcccactgatgcagttaagcagagggtggtggtagtggttcgggaccatggagacccaccactttcctcctctgtcactctgggtgtgctgttgagcaactctgtccctcagttacttccagactttgaagatgtctgggaaccaggagggcagctttctgcccagaacttgtatttagtaattgccttggcttgtatttcctttttatttctggggtgcttacttttcttcgtgtgtaccaagttgcaccagagcccaggctgttgcgctcagagctgctgtcgctctacagaggatctgaggtatggaagtaagatggtttcaaatccttgcatgacatcagccaccatagatgtcactacagttgagagactttctcagacttatctctatcgggcctctctgggacttggttctgataataacagtttgctgttgcgtggggagtacaatgctgccgacctgcgaaatcttgccactggggtaggactgaatttgccaatatcctgtattcagattcggaataggaaaggggatcacgctaatgtcaatgccatggtaagcaaattttatggaatttgattcctttggcccggagatggctgctagctgtgttttgaaatatttcttagacaagcctttcacaacatttcatcaattgaactaaacactccttcttagcacttcctgtgccaagaaatctggaagtatagaagtattagaagattgccctaggcctcaagggacttatagtttatttttgagaaacaagggcaaaaattaaaacctatttaagaacaataaaagtaatatgacataaaggtctaaaattaaaaataaaataccaaaatattttataagcaacagatgtgtaaggcactctaatatttaaagtgaagaatgaaaaatatgtaagagtctgctttatatgaatataatatggaaggtgaaacatttacttaaactattgcaatgcattattaaaagatgacgataaccacaaaagatgtaaaaataaattacaatgggggtt

SEQ ID NO: 24869 - DNA, 5970 bp, Homo sapiens
  source 1..5970: mol_type = unassigned DNA
gttaagcaggggagagacggtggagactggatgaactggacagtgggggtagggagaaagggagtggccgtgttcctgcggtccgctgggatccggcaggtccagggtgaaggagatggggctggagaggctgagcagtccgggttcgctgtccgccacttcggcgcggaatcagagcaggacttgctgagccctcctaccgctccctttccccctccccctctgtcttcccttctgtttccttttccctccccctggagctgtagcggcagcagcagcaggaagccgagccgggttgagcgactcggaggcgagcggaggagctggaatatggggagtcagcgaggacggtggggccaggagcccttgggagggcctacggagggagcggccccaggcgctttctagagcgtgagcggtgggggagcaggcgcagggtggcacgagcggaggcggggcccgggcgtggggcacggctggggaagctgccgcctccggccctgcccggctgcctccgccgcggccagtggctatggagcaggcgggcaccagacctgcggcgacagagcatccacggctccggcggcccatgccctggctgctgctactgcctctcctgctgctgttgctgctgctgctacctggccctgcggcctcccagctgcgatactctgtgccagaggagcaggcacccggcgcgctcgtgggcaacgtggctcgcgcgctggggcttgagctgcggcgcttggggccgggttgcttgcgcatcaaccatctgggtgcgcccagtccgcgctacctggagctggacctgacgagtggagcgctcttcgtcaacgagcgcattgatcgggaggcgctgtgtgagcagcggcctcgctgcctgctcagcttggaagtgctggcgcacaaccccgtggcggtgagcgccgttgaggtggaaatattggacatcaacgacaactcaccgcgtttcccgcggcccaactaccagcttcaggtaagcgaatcggtggcgcctggagcgcgctttcacatagagagtgcgcaggaccccgacgtgggcgccaactcagtacagacctacgagctcagccccagcgagcacttcgagctggaccttaagcccctgcaggagaacagtaaagtgcttgagctggtgctgcgtaagggcctagaccgggagcaggcagccttgcaccacctggttctcacagccgtggatgggggcatcccagcccgctcgggtacggcacagatctctgtgcgtgtcctggacactaacgacaactctcctgcctttgaccagtccacttatcgcgtccagctacgggaggactcacccccaggcacattggtggtgaagctgaatgcctcagacccggatgagggctccaatggtgagctcaggtactccttgagcagctacacgtcggaccgggagaggcagctcttcagcatagatgccagtaccggggaagtgcgagtaattggggggctggattatgaggaagcctcctcctaccagatctatgtgcaggcgactgaccggggtccagtgcccatggcaggtcactgcaaggtgctggtggacatcgtggacgtgaatgacaatgccccagaggtggtgctcacggacctgtatagcccagtgcctgagaatgctacacccaacaccattgtggccgttctcagtgtcaatgaccaagactcaggccccaaccggaaagtgagcctgggtctggaggccacactgcctttccgactgaatggctttggaaactcctatacactggtggtgagcggcccactggaccgagagcgggtggctgtctacaacatcacggtgacagccacagatgggggaataccgcagctcacatccctgcgtacactgaaggttgagatctctgacatcaatgacaatccaccaagcttcctggaggactcctattccatctacatacaggagaacaatttgccaggtgtgttgctctgtactgtgcaagccacagacccagatgaaaaggagaatgcagaggtgacctactcccttctggagagggagattcaagggctgccagtcacctcctatgtctccattaacagtgccagtggcagcctttatgctgtcaactcctttgactatgagaagtttcgggagttctttgtgactgtggaggctcaggacaaggggagcccaccactgagcagcactgtgactgccaacgtatatgtggtggacatgaatgaccatgcccctcacattctgtaccctacctcaaccaactcgtcagcagccttcgagatggtgcctcgaactgcccctgctggctacctggtcaccaaagtcatagctatggactcagactctgggcaaaatgcttggcttttttaccatctagcccagacttctgacctggacctctttaaggtagagctgcacacaggagaaattaggactaccaggaagatgggagatgagagtggtagcactttcaacctgaccgtggtggtccgagataatggagagccatcactatcagcctctgtggccattacagtagctgtggtggatagggtttccaaaatcctccctgacactcagaggcatgttaagagccctcggacatactctgaaattaccctttatctaataatagcattaagcacagtgtcttttatatttcttttgacaatcatcattttgagcatcatcaagtgctaccgctacactgcgtatggcactgcatgctgtggaggcttctgtggagtaagggaaaggtcccctgcagaactgtacaaacaagccaacaacaatattgatgccaggataccgcatggcctcaaagtgcagcctcacttcattgaagttcgagggaatggctccctcaccaagacctactgctacaaggcctgtctgacagcaggctcagggagtgacactttcatgttttacaatacaggggcccagacaggaccagggccttcgggagcccaagcagcagtgactgacagcaggaatctcacaggccaaagtggtcagaatgctgggaacctgattattctcaaaaatgaggctgtttctcaaaatgagccacgacagcccaaccctgactggcgttactctgcctccctgagagcaggcatgcacagctctgtgcacctagaggaggctggcattctacgggctggtccaggagggcctgatcagcagtggccaacagtatccagtgcaacaccagaaccagaggcaggagaagtgtcccctccagtcggtgcgggtgtcaacagcaacagctggacctttaaatacggaccaggcaaccccaaacaatccggtcccggtgagttgcccgacaaattcattatcccaggatctcctgcaatcatctccatccggcaggagcctactaacagccaaattgacaaaagtgacttcataaccttcggcaaaaaggaggagaccaagaaaaagaagaaaaagaagaagggtaacaagacccaggagaaaaaagagaaagggaacagcacgactgacaacagtgaccagtgaggtcctcaaatggaaacaagccacttagccagtttttgtaataatggcaaatctctcccatgtagcaattccctgctcctttttcctatctacatgagccctcttagagacctcagaaatctgcagaaagttccctgtgtctgtctagaacgcatttaacaggttttgtcgtaaaagctttactaagtctggtgttaactctttctctccactctggcttgttttcagaacctaaaaagcagacccaagtttcctttctcctccgccgcaaaggagaggcttcccagccccgccagtgagaggttggactctctgccctgtgctccggggatcctgtcttgatgacacttgcagggcaggctgaaaagttttgagattgagcagcttgggagtttgtggccactgggtatgtgtggctaccgcgggtatgcgagtgccagatattggctgagacgagccagcttagactaattggtacaaggaaggcaagaaaacaaagacaaataaacagcggaagttatcagtatggaggggaagtgtaaacttaaagggaccagactttctaaatcttacaactcaagaggtggcagccaccctctaggagacaaaactacccccactgacaaggctttaggagaccctaaagtctgttggctgtgacgtcattatacctaaaatctgcatcatacctgcaagccaacagttcagtgttttaacagagaaccaccctgggaaacagaagcagatctgatgtgtttcctatacatgtcctgtgctcactttattaaaaattcttttgcacacaatgtttatgaaaaggccagatccttttccaatacttatgcaaaagcaaaagaaaaccccgacacctcacctttcgctgtttgttgtttcatagatttatttaaaaaaagagaaagtctatagctataaatctttaaagagaaatatgaatacaattcccctaaactctcctcaaaagagaattcagtctacagccatttaaatgatcattgctgctacagaagtgctttaagagaattgcctgaaacatctgtattatatcggccacctgccaatcacagctttactctttcaggtcactctggggctgcctcttgcatgtattactaaataaaatgatctctctttctctctctctctctcttttctaagaaacaattatgtgcactttgatacacaaccttctctaaccaactatatatcaagacccaaaaattgaagaaaaatattgttttctcatacagtgagcagatttttcaatctactaattctgtgacttgtcttggtgtgctagcctacaccttctctttggtttagttttccttttctataacactctgaattgctaatcttactaacacctatgatgttacctgaaatcaatctcccatatgtatgctgtatgctatgctaagactcctgaaatatacttactctgtgcttgtgtatgtgaatgttaatgcaactattacctagagtgaactttaagctttattgttgaatgtaattccattatatttccttttgtacacctgtgaaaaagtggagtagtgtttttttaaccattgttaatcagcttttgtgtatgaaagacacagtaaaatttctttcttaaatcaagatactggtgattcaaggaattttatttatggtccagccaagagccatctcgtgccaagacttctgctggcaagggaatggataaagctgttttgttctagtaacaattttggaatgaatactgacaatattccatgagggtgtgcaagcacaaattttaccaatctgacctctttgaagttgcagaatgctttgaaattctaatggtatctgaaatatcagctcatagaaagtaacaaaatttgctgtcaccttaaataagacattttaattttgttataatgtacaatttagaagtttgattaattatattatctatttaggcattaatataaaagaggtaggagtctgttatttaaaaaaagcattaaatttaaaaaaaaactgtcttgtctacttttagcttcattctcccatattttgaagggtgtgtaacttcagctctgcaggattgcatggggtaaaacttgttaccaacacatgtgaaccattgctacattgtaggttgtgatcattttgccccactgaagcccatgtatctgaccttacgtgccttttgaactaggagaatcgggctaatttattaatgatgataattataatgtatctgtacagcactttttacatttgcgaagtgctttccaatccatgttagttactagttattacagctgtaaggataaaacacgtcatgtggattcattttgaattggtgctattggtatttcctctgttattgctaataaatgaaaatggtggtatgaaagaaa

SEQ ID NO: 24870 - DNA, 2534 bp, Homo sapiens
  source 1..2534: mol_type = unassigned DNA
agtaacctgttgcagaaaagtgaaagtatatccgcaacagttggctctgattgcagagagcgcgcttgtgagaactgatggcgggtacgcgcagaaaatctttgcaaaacaggcaagtgggatctcttctcatttttctgtgcatatctgtgggggatgcgacaactatccgctattcagtggcagaggaaatggagagcggctcgtttgtggccaacgtagctaaggacctaggactggaggtagggaagctggctgcgcgcggggcgcggctggtttccgagggcaacaaaatgcatttccggctccaccgcaagacgggagatttgtttgtgaaggagaaactggatcgggagtcactttgtggcaaagccgacccttgtgttctgcactttgaagtagtcctggtggagccgctgcagtccttccgggccgaggtcagggtatttgatatcaatgacaatgccccagttttcctaaacaaggagccgcttttaaagattccggagagcacccctttgggttcacgttttcctctgcagagcgcccaggatctggacgtgggccttaacggtctccagaactacaccctgagtgccaatgggtatttccacctgcacacccgcttctgcagccacgggcctaaatatgctgagctggtgctgaacaaacccctggaccgagaggagcagcctgaagtcaacttgacaattacggcggtggacggcgggtccccgcctaagtctggcacagctcacatccacgtggtggttctggatgtcaacgaccacgtgccccagttctcgcgactggtgtacagagcccaggtatcagagaacagccccaatggctctttggtggccacggtgactgccgtggacctagacgagggcaccaacaaagcgataacttactctttagctcaaaacccagaagcaattctcaagacgtttcagattgaccctcaaaatggagaagttcgactaagaggacccctcgattttgaagccattgaaacatacgacattgacattcaagctacagatggtggaggcctctctgcccacagcaaagtcctggtagaagtggtggatgtgaatgacaatcctcccgaagtgatggtctcctctgtgtccagcccactccctgaagactcaccaccacagacagtagtagcccttttcactatcagagaccgggacattcgagtgggaggaaaagtcacctgcttcctcagagaagaccttccctttgtaatcaaacctacatttgggaattcttactcactggtcactgacagaagcttggatcgggaggaggtctcaggctataatatcaccattgttgccatggatactggaccacctagcttgtctgccgagactatgatagaggtgctaatatccgacgttaatgacaatcctccaatatttcgggaagattcctatatcttgactgttcgagaaaacaacagtcctgcggtttttattggcaaagtccatgctgaggatcttgatttgggtgagaatgcccaaataacatattctctgttgcctccaaaaaacggagatctttcagtctttgcttacatatccataaattcaggcaatgggaagctctacgcgctgagaaccatggattatgaggccattcaagattttcaatttgtggtaaaggcaactgatgggggcttcctgtcactgagtagccaagttactgtcagagtggttgtcctagatgacaatgacaatcgtccaatgatcttatacccactgcagaacggcaccttgccctgcaatgacctggtgcccaggtctgcagaggcaggctacctagtgaccaaagtggtggctgtggatggtgactcaggtcagaattcttggctttcatatcatctacttaaggccactgaccttgggttattttctgttcaaagacaaaatggagaaatccatacattaaggcagatatctgagagagaccccatgatgcagaaattgatcattcttgttcaggatcacggccaaccagctctttccactactgtctcactcaacatcctgctggtagatggcttttcagagccctacctgcagttccaggatccaaccaagcattctagaaaggtaaatccatccactaaatatttggtcatttctctggtcatcctttcctttctctttctcctctctgtcatagtgatcttcattatacatgtctaccaaaagattaaatatagagaaaagttcacaattcaagagcatttctatgatgactgtaatttctctaacaacctggtacaaggacaaggcaatggatccttatctcggccttgtccatatgaaatgtgttcagccactggcactggtaatagtgagtttcgctttcttaagcgttttatgcccaacttccctttccctcatgccactggggagataaaaatggaggctggctccagtttgcccccaaattctgataggaataagtctcagagattagagggccatgaccaggtatctgatgactatatgtag

SEQ ID NO: 24871 - DNA, 3271 bp, Homo sapiens
  source 1..3271: mol_type = unassigned DNA
atggagaaccaagggacacgcactcagcagataaggcaagtcctgcttctctttgttttgctcggaatgtctcaggcgggctctgaaacctggagcttttctgtggcagaagaaatgcagagcgggagttttgtaggcaatctggcaaaggacctggggctgaaggtgagagaactgtcctcacggggggctcgggtggtctctaatgataagaaacagcgtttgcagctggacataaacactggggatttgctcttaagtgaaacactagacagggaggagctctgcggttccatcgagccttgcgtgctacatttgcaggtgttaatgcaaaaccccacgcagtttttacaaattgagcttcaggtcagggatataaatgatcactctcccatcttctcggaaaaacaaatgctcctagaaatcccagagaacagtcccgttggtgctgtgttcttactagaaagtgcgaaggatttagatgtaggaatcaatgctgtaaaaagctacacaataagccccaactctcattttcacattaaaatgagagtcattccagacaataggaaataccccgagttagttctggacaaggcgctggattatgaagagctcccggagctcagtttcatcctctctgctctggatggtgggtcccctcccaggtctggaactgccttggtcagggtggtggttgtggacattaatgacaactcccctgaatttgagcaggctttttatgaggtgaagattcgggagaatagcatccttggctcgctgattttgattgtctcagcttgggatttagactctggaacaaatggtgaaatatgctataccttttcccatgcctcagaagatattcgcaagacatttgaaattaatcaaaagtctggagaaattactttaagagcacctctggattttgaaacgattgagtcatactcaataatcattcaagccacagatgggggaggactttttggaaaatctacagtcataattcacgtgatagatgtaaatgacaatgctcctgaaatcactgtgtcatcaattaccagtccaatcccagaaaatacgccagagaccgtggttatggtttttagtatccaagatatagactctggggacaacggaagaattgtttgttccattccggaagacctcccattcgtgctaaaatcttcagttgagaattactacacgttggaaacagagagaccactggacagagagagcacagccgagtacaatatcaccatcaccgtcaccgacttggggatacccaggctgaaaaccgagcacaacacaactgtgttggtctctgacgtcaatgacaacgcccccaccttcacccaaacctcctacaccctgttcgtccgcgagaacaacagccccgccctgcacatcggcagtgtcagcgctacagacagagactcaggcaccaacgcccaggtcaactactcgctactcccgccccaggacctgcacctgcccctcgcctccctggtctccatcaacacagacaacggccacctgttcgccctcaggtcgctggactacgaggccctgcaggctttcgacttccgcgtgggcgccacagaccgcggctccccggctttgagcagcgaggcgctggtgcgcgtgctggtgctggacgccaacgacaactcgcccttcgtgctgtacccgctgcagaacggctccgcgccctgcaccgagctggtgccccgggcggccgagccgggctacctggtgaccaaggtggtggcggtggacggcgactcgggccagaacgcctggctgtcgtaccagctgctcaaggccacggagcccgggctattcggcgtgtgggcgcacaatggcgaggtgcgcaccgccaggctgctgagcgagcgcgacgcggccaagcacaggctggtggtgctggtcaaggacaatggcgagcctccgcgctcggccaccgccacgctgcaagtgctcctggtggacggcttctcccagccctacctgccgctccctgaggcggcaccggcccaggcccaggccgactcgctcaccgtctacttggtggtggcgttggcctcggtgtcttcgctcttcctcttctcggtgctcctgttcgtggcggtgcggctgtgcaggaggagcagggcggcctcggtgggaagctgctcggtgcctaagggcccctttccagggcatctggtggacgtgagcggcaccgggaccctttcccagagctaccagtacgaggtgtgtctgacgggaggttccgagacaaatgaattcaagttcctaaaaccggttatccctaatatccaggcaaaaggtcttgggaagaatagtgaagaaaactccacctttcgaaatagctttggatttaatttttagtaagaatgctatttacatttgcatgtacttttttagttttatgtaaccatatcaatattatttagtcttaaactagttacgttattatgcaatacgactaattgtatttttaattttttcttttctcccccaattttttttttttttttgagaccgagtctcattctgtcgccctggctggagtgcaatggtgtgatctcagctcactgcaccctccgcctctcgggttcaagcaattctcctgcatcagcctcccgagtagctggcattacaggcgcccaccaccacgctcggctaaattttttttttttttatctttagtagagacggggtttcaccacgttggccgggcaggttttaaactcttgacctcatgttccacccgccacggcctcccaaagtgctgtgattaccggtgtgagccactgcgcccggccttttttttttcttttcttttcttttttttgatacagagtcttagtcacccagactagaggtcagtggcaggatctcagctcactgcaacctctgcctcctgggctcaagagaccagcccacctccgcctccaagtagctgggactacaggcgtgcgccaccatgcccggctacttcttgtattttttgtagagacggatcgtcaccatatttcttaggctggcctttaacttctgagctcaagagatgcactcccctcagcctcccaaagtgctgggattacaggcggccaggcctattttcaattttcaagtattgcatatcattgtgaataacattgtaaatcctttttatattaagtaacaggtagttaatccatttctaatgaataattttaaggttttaatcctttccaagtgtacaataatttactgattatta

SEQ ID NO: 24872 - DNA, 1973 bp, Homo sapiens
  source 1..1973: mol_type = unassigned DNA
gcacacagagaatcagaagacagaaacaacaagccttcaagagggtgacctggaaaccattcaacagggttaaaatccttagaccacagaggatttggtggacaagtcagagacgcgttccgcagagctgaagcctttcttcaagaagcctacaagaaaggaactatggagaaccaagggacacgcactcagcagataaggctttttatgaggtgaagattcgggagaatagcatccttggctcgctgattttgattgtctcagcttgggatttagactctggaacaaatggtgaaatatgctataccttttcccatgcctcagaagatattcgcaagacatttgaaattaatcaaaagtctggagaaattactttaagagcacctctggattttgaaacgattgagtcatactcaataatcattcaagccacagatgggggaggactttttggaaaatctacagtcataattcacgtgatagatgtaaatgacaatgctcctgaaatcactgtgtcatcaattaccagtccaatcccagaaaatacgccagagaccgtggttatggtttttagtatccaagatatagactctggggacaacggaagaattgtttgttccattccggaagacctcccattcgtgctaaaatcttcagttgagaattactacacgttggaaacagagagaccactggacagagagagcacagccgagtacaatatcaccatcaccgtcaccgacttggggatacccaggctgaaaaccgagcacaacacaactgtgttggtctctgacgtcaatgacaacgcccccaccttcacccaaacctcctacaccctgttcgtccgcgagaacaacagccccgccctgcacatcggcagtgtcagcgctacagacagagactcaggcaccaacgcccaggtcaactactcgctactcccgccccaggacctgcacctgcccctcgcctccctggtctccatcaacacagacaacggccacctgttcgccctcaggtcgctggactacgaggccctgcaggctttcgacttccgcgtgggcgccacagaccgcggctccccggctttgagcagcgaggcgctggtgcgcgtgctggtgctggacgccaacgacaactcgcccttcgtgctgtacccgctgcagaacggctccgcgccctgcaccgagctggtgccccgggcggccgagccgggctacctggtgaccaaggtggtggcggtggacggcgactcgggccagaacgcctggctgtcgtaccagctgctcaaggccacggagcccgggctattcggcgtgtgggcgcacaatggcgaggtgcgcaccgccaggctgctgagcgagcgcgacgcggccaagcacaggctggtggtgctggtcaaggacaatggcgagcctccgcgctcggccaccgccacgctgcaagtgctcctggtggacggcttctcccagccctacctgccgctccctgaggcggcaccggcccaggcccaggccgactcgctcaccgtctacttggtggtggcgttggcctcggtgtcttcgctcttcctcttctcggtgctcctgttcgtggcggtgcggctgtgcaggaggagcagggcggcctcggtgggaagctgctcggtgcctaagggcccctttccagggcatctggtggacgtgagcggcaccgggaccctttcccagagctaccagtacgaggtgtgtctgacgggaggttccgagacaaatgaattcaagttcctaaaaccggttatccctaatatccaggcaaaaggtcttgggaagaatagtgaagaaaactccacctttcgaaatagctttggatttaatttttagtaagaatgctatttacatttgcatgtacttttttagttttatgtaaccatatcaatattatttagtcttaaactagttacgttattatgcaatacgactaattgtattttt

SEQ ID NO: 24873 - DNA, 396 bp, Homo sapiens
  source 1..396: mol_type = unassigned DNA
acgattgagtcatactcaataatcattcaagccacagatgggggaggactttttggaaaatctacagtcataattcacgtgatagatgtaaatgacaatgctcctgaaatcactgtgtcatcaattaccagtccaatcccagaaaatacgccagagaccgtggttatggtttttagtatccaagatatagacgggacaacggaagaattgtttgttccattccggaagacctcccatgtgctaaaatcttcagttgagaattactacacgttggaaacagagagaccactggacagagagagcacagccgagtacaatatcaccatcaccgtcaccgacttggggatacccaggctgaaaaccgagcacaacacaactgtgttggtctctgacgtc

SEQ ID NO: 24874 - DNA, 3406 bp, Homo sapiens
  source 1..3406: mol_type = unassigned DNA
agtacacgcggagaactgggaagacagaaagaacaatcctttaagggagaacctagaagccattcaacaaggttaaaatcttcaggcttccgaggatttggtagacagatcagaggcacgtttcccacaactgcgaagaggcgctgaggcaattctgcaagaagattttggggttttggaaaagaagctatggaaaacggaggggcaggcactctgcagataaggcaagtcctgcttttctttgttttgctgggaatgtctcaggcgggctctgaaactgggaactttttggtgatggaggaattgcagagcgggagctttgtaggaaatttggcaaagaccctgggactcgaggtgagtgagctgtcttcgcggggggctcgggtggtttctaatgataacaaagagtgtttgcagctggacacaaacactggggatttgctcctgagagaaatgctagacagggaggagctctgtggctccaatgagccttgtgtgctgtatttccaagtgttaatgaaaaaccccacgcagtttttacaaattgagctccaggtcagggatataaatgatcactctcccgtcttcttggaaaaagaaatgctcttagaaatcccagagaacagtcctgttggtgctgtgttcttgcttgaaagtgcaaaggatttagatgtaggaatcaatgctgtaaaaagctacacaataaatccgaactctcatttccacgttaaaataagagtcaatccagacaataggaaataccctgagttagttctggacaaggcgctggattatgaagagcgcccggagctcagtttcatcctcactgctctggatggcgggtcccctcccaggtctggaactgccttggtcagggtggtggttgtagatattaatgacaactcccctgagtttgagcaggctttttatgaggtgaagattctggagaatagcatccttggctccctggttgtgaccgtctcagcctgggatttagactctggaacaaacagtgaactatcctataccttttcccatgcctcagaagatattcgcaagacatttgaaattaatcaaaagtctggtgacattactttaacagcacctttggattttgaagcaattgagtcatactcaataatcattcaagccacagatgggggaggactttttggaaaatctacagtcagaattcaggtgatggatgtaaacgacaacgctcctgaaatcactgtgtcatcaattaccagtccaatcccagaaaacactccagagactgtggttatggttttcaggatacgagacagagactctggggacaacggaaagatggtttgttctatcccggaggacatcccattcgtgctaaaatcttcggtaaataattactacactttggaaacagagagaccgctggacagagagagcagagccgagtacaacatcaccatcaccgtcaccgacttggggacccccaggctaaaaaccgagcacaacataaccgtgctggtctccgacgtcaatgacaacgcccccgccttcacccaaacttcctacgccctgttcgtccgcgagaacaacagccccgccctgcacatcggcagcatcagcgccacagacagagactcgggcaccaacgcccaggtcaactactcgctgctgccgtcccaggacccgcacctgcccctcgcctccctggtctccatcaacgcggacaacggccacctgtttgccctcaggtcgctggactacgaggccctgcaggggttccagttccgcgtgggcgccacagaccacggctccccggctttgagcagcgaggcgctggtgcgcgtgctggtgctggacgccaacgacaactcgcccttcgtgctgtacccgctgcagaacggctccgcgccctgcaccgagctggtgccctgggcggccgagccgggctacctggtgaccaaggtggtggcggtggacggtgactcgggccagaacgcctggctgtcgtaccagctgctcaaggccacggagcccgggctattcggcgtgtgggcgcacaatggcgaggtgcgcaccgccaggctgctgagcgagcgcgacgcggccaagcacaggctggtggtgctggtcaaggacaatggcgagcctccgcgctcggccaccgccacgctgcacgtgctcctggtggacggcttctcccagccctacctgcctctcccggaggcggccccggcccaggcccaggccgactcgctcactgtctacctggtggtggcgttggcctcagtgtcgtcgctcttcctcttctcggtgctcctgttcgtggcggtgcggctgtgcaggaggagcagggcggccccggtcggtcgctgctcggtgcctgagggcccctttccaggacatctggtggacgtgagtggcaccgggaccctgtcccagagctaccactatgaggtgtgtgtgactggaggctccaggtcaaataagttcaaatttctgaaaccaattatccccaacttcctaccccagagcacaggtagtgaagtcgaagaaaatcccccatttcagaataatttgggtttctgataaagaatgaaaaataaaacctgtgtttatgaatacatttataattaggaacttatcgtgaggtgcctgtaaagtagtatttttgatcacttcaaatacatactcttcaagtcaagaaataaatttctttacatagaaaaggatacagatttagtaccaagaacacttcacaaagcaggaaatgtgcatgtgtaatggtttatgtcaaacaattatgcttaatataaagtctattaagtggtaagtcttgtttgagatattttaaattgctttccattgttttcaatatttactgtgacttttgttttctgagttgattagaatgctgttcgagtatacctaccctagtttcagaagcatagattgtagtgtacctttttaaactttatttttttaaaaaaagttgttttatgaatcatacactattttcacacttttaatctcagaagaaacatatgtgacatggtattttagtaatgaccaaatagacggtcttagagattcagtaagttcactaaggtccactaactaataagtgacaaaactgagcatccatcctagatctgcctgactctaagtcagtgactttgctcccattccatactgtttttgtcattggatatcacctggcaagtttctgcctaactaaagagaagaaaagtttttatcgtattcatactactgttcaatctttatttagaaataaactttatctatgatttcattttcttataaaccagtaatcttgcttttctgggtaaattttcagctattattactaatgctctgatctgcccaaatcttaagtaaaaaacaaaattgaaagagc

SEQ ID NO: 24875 - DNA, 1254 bp, Homo sapiens
  source 1..1254: mol_type = unassigned DNA
atggtttgttctatcccggaggacatcccattcgtgctaaaatcttcggtaaataattactacactttggaaacagagagaccgctggacagagagagcagagccgagtacaacatcaccatcaccgtcaccgacttggggacccccaggctaaaaaccgagcacaacataaccgtgctggtctccgacgtcaatgacaacgcccccgccttcacccaaacttcctacgccctgttcgtccgcgagaacaacagccccgccctgcacatcggcagcatcagcgccacagacagagactcgggcaccaacgcccaggtcaactactcgctgctgccgtcccaggacccgcacctgcccctcgcctccctggtctccatcaacgcggacaacggccacctgtttgccctcaggtcgctggactacgaggccctgcaggggttccagttccgcgtgggcgccacagaccacggctccccggctttgagcagcgaggcgctggtgcgcgtgctggtgctggacgccaacgacaactcgcccttcgtgctgtacccgctgcagaacggctccgcgccctgcaccgagctggtgccctgggcggccgagccgggctacctggtgaccaaggtggtggcggtggacggtgactcgggccagaacgcctggctgtcgtaccagctgctcaaggccacggagcccgggctattcggcgtgtgggcgcacaatggcgaggtgcgcaccgccaggctgctgagcgagcgcgacgcggccaagcacaggctggtggtgctggtcaaggacaatggcgagcctccgcgctcggccaccgccacgctgcacgtgctcctggtggacggcttctcccagccctacctgcctctcccggaggcggccccggcccaggcccaggccgactcgctcactgtctacctggtggtggcgttggcctcagtgtcgtcgctcttcctcttctcggtgctcctgttcgtggcggtgcggctgtgcaggaggagcagggcggccccggtcggtcgctgctcggtgcctgagggcccctttccaggacatctggtggacgtgagtggcaccgggaccctgtcccagagctaccactatgaggtgtgtgtgactggaggctccaggtcaaataagttcaaatttctgaaaccaattatccccaacttcctaccccagagcacaggtagtgaagtcgaagaaaatcccccatttcagaataatttgggtttctggatacag

SEQ ID NO: 24876 - DNA, 1963 bp, Homo sapiens
  source 1..1963: mol_type = unassigned DNA
gatgttgtagaccctgttatccagtacacgcggagaactgggaagacagaaagaacaatcctttaagggagaacctagaagccattcaacaaggttaaaatcttcaggcttccgaggatttggtagacagatcagaggcacgtttcccacaactgcgaagaggcgctgaggcaattctgcaagaagattttggggttttggaaaagaagctatggaaaacggaggggcaggcactctgcagataagcacctttggattttgaagcaattgagtcatactcaataatcattcaagccacagatgggggaggactttttggaaaatctacagtcagaattcaggtgatggatgtaaacgacaacgctcctgaaatcactgtgtcatcaattaccagtccaatcccagaaaacactccagagactgtggttatggttttcaggatacgagacagagactctggggacaacggaaagatggtttgttctatcccggaggacatcccattcgtgctaaaatcttcggtaaataattactacactttggaaacagagagaccgctggacagagagagcagagccgagtacaacatcaccatcaccgtcaccgacttggggacccccaggctaaaaaccgagcacaacataaccgtgctggtctccgacgtcaatgacaacgcccccgccttcacccaaacttcctacgccctgttcgtccgcgagaacaacagccccgccctgcacatcggcagcatcagcgccacagacagagactcgggcaccaacgcccaggtcaactactcgctgctgccgtcccaggacccgcacctgcccctcgcctccctggtctccatcaacgcggacaacggccacctgtttgccctcaggtcgctggactacgaggccctgcaggggttccagttccgcgtgggcgccacagaccacggctccccggctttgagcagcgaggcgctggtgcgcgtgctggtgctggacgccaacgacaactcgcccttcgtgctgtacccgctgcagaacggctccgcgccctgcaccgagctggtgccctgggcggccgagccgggctacctggtgaccaaggtggtggcggtggacggtgactcgggccagaacgcctggctgtcgtaccagctgctcaaggccacggagcccgggctattcggcgtgtgggcgcacaatggcgaggtgcgcaccgccaggctgctgagcgagcgcgacgcggccaagcacaggctggtggtgctggtcaaggacaatggcgagcctccgcgctcggccaccgccacgctgcacgtgctcctggtggacggcttctcccagccctacctgcctctcccggaggcggccccggcccaggcccaggccgactcgctcactgtctacctggtggtggcgttggcctcagtgtcgtcgctcttcctcttctcggtgctcctgttcgtggcggtgcggctgtgcaggaggagcagggcggccccggtcggtcgctgctcggtgcctgagggcccctttccaggacatctggtggacgtgagtggcaccgggaccctgtcccagagctaccactatgaggtgtgtgtgactggaggctccaggtcaaataagttcaaatttctgaaaccaattatccccaacttcctaccccagagcacaggtagtgaagtcgaagaaaatcccccatttcagaataatttgggtttctgataaagaatgaaaaataaaacctgtgtttatgaatacatttataattaggaacttatcgtgaggtgcctgtaaagtagtatttttgatcacttcaaatacatactcttcaagtcaagaaataaatttctttacatagaaaaggatacagatttagtaccaagaacacttcacaaagcaggaaatgtgcatgtgtaatggtttatgtcaaacaattatgcttaatataaagtctattaagtggt

SEQ ID NO: 24877 - DNA, 3485 bp, Homo sapiens
  source 1..3485: mol_type = unassigned DNA
aaaaagcagcagaacctggaagtccacggggagcttggatgccaaagggaggacggctgggtcctctggagaggactactcactggcatatttctgaggtatctgtagaataaccacagcctcagatactggggactttacagtcccacagaaccgtcctcccaggaagctgaatccagcaagaacaatggaggccagcgggaagctcatttgcagacaaaggcaagtccttttttcctttctccttttgggcttatctctggcgggcgcggcggaacctagaagctattctgtggtggaggaaactgagggcagctcctttgtcaccaatttagcaaaggacctgggtctggagcagagggaattctccaggcggggggttagggttgtttccagagggaacaaactacatttgcagctcaatcaggagaccgcggatttgttgctaaatgagaaattggaccgtgaggatctgtgcggtcacacagagccctgtgtgctacgtttccaagtgttgctagagagtcccttcgagttttttcaagctgagctgcaagtaatagacataaacgaccactctccagtatttctggacaaacaaatgttggtgaaagtatcagagagcagtcctcctgggactacgtttcctctgaagaatgccgaagacttagatgtaggccaaaacaatattgagaactatataatcagccccaactcctattttcgggtcctcacccgcaaacgcagtgatggcaggaaatacccagagctggtgctggacaaagcgctggaccgagaggaagaagctgagctcaggttaacactcacagcactggatggtggctctccgcccagatctggcactgctcaggtctacatcgaagtcctggatgtcaacgataatgcccctgaatttgagcagcctttctatagagtgcagatctctgaggacagtccggtaggcttcctggttgtgaaggtctctgccacggatgtagacacaggagtcaacggagagatttcctattcacttttccaagcttcagaagagattggcaaaacctttaagatcaatcccttgacaggagaaattgaactaaaaaaacaactcgatttcgaaaaacttcagtcctatgaagtcaatattgaggcaagagatgctggaaccttttctggaaaatgcaccgttctgattcaagtgatagatgtgaacgaccatgccccagaagttaccatgtctgcatttaccagcccaatacctgagaacgcgcctgaaactgtggttgcacttttcagtgtttcagatcttgattcaggagaaaatgggaaaattagttgctccattcaggaggatctacccttcctcctgaaatccgcggaaaacttttacaccctactaacggagagaccactagacagagaaagcagagcggaatacaacatcactatcactgtcactgacttggggacccctatgctgataacacagctcaatatgaccgtgctgatcgccgatgtcaatgacaacgctcccgccttcacccaaacctcctacaccctgttcgtccgcgagaacaacagccccgccctgcacatccgcagcgtcagcgctacagacagagactcaggcaccaacgcccaggtcacctactcgctgctgccgccccaggacccgcacctgcccctcacatccctggtctccatcaacgcggacaacggccacctgttcgccctcaggtctctggactacgaggccctgcaggggttccagttccgcgtgggcgcttcagaccacggctccccggcgctgagcagcgaggcgctggtgcgcgtggtggtgctggacgccaacgacaactcgcccttcgtgctgtacccgctgcagaacggctccgcgccctgcaccgagctggtgccccgggcggccgagccgggctacctggtgaccaaggtggtggcggtggacggcgactcgggccagaacgcctggctgtcgtaccagctgctcaaggccacggagctcggtctgttcggcgtgtgggcgcacaatggcgaggtgcgcaccgccaggctgctgagcgagcgcgacgcggccaagcacaggctggtggtgctggtcaaggacaatggcgagcctccgcgctcggccaccgccacgctgcacgtgctcctggtggacggcttctcccagccctacctgcctctcccggaggcggccccgacccaggcccaggccgacttgctcaccgtctacctggtggtggcgttggcctcggtgtcttcgctcttcctcttttcggtgctcctgttcgtggcggtgcggctgtgtaggaggagcagggcggcctcggtgggtcgctgcttggtgcccgagggcccccttccagggcatcttgtggacatgagcggcaccaggaccctatcccagagctaccagtatgaggtgtgtctggcaggaggctcagggaccaatgagttcaagttcctgaagccgattatccccaacttccctccccagtgccctgggaaagaaatacaaggaaattctaccttccccaataactttgggttcaatattcagtgaccatagttgacttttacattccataggtattttattttgtggcatttccatgccaatgtttatttcccccaatttgtgtgtatgtaatattgtacggatttactcttgatttttctcatgttctttctccctttgttttaaagtgaacatttacctttattcctggttcttaaaaggtgacaattcattctttaacccagatggtcttaatttgtaattaatttgcctccctaaagagcaataccaaatcacatttttttcatgcccctatctttagctgaacttcacccactattatgcttatggtaaaattaaatagagcaatttggaagtgattccaattttccagcatttcttcatttgattctctttttttagtcttaaaataatgactcctattcagacatatcatttttcttttttgtaaatccagtgcgtttttagttaacctttaaatatgctttttgctttcaaaaataaaccagaaaacctatatcctatgatacaactctaagtgttatcacttgattcgaaagggtcagaagaccagttttttagtatcctttcctcattcatcctggagaggattgtgcaggcacattaatattgtgaccaatcacagaatctgggaatatgaagctataattttttaattaatgtcacaaagctctagtgcaatctagttgaatgcagatgcctgtgcccaaataataattcatatagcataaattggagttgtgtgttaatgtgtaaaaatttttgcctgtactatcatataatttaatgtatatacaccagaaactatttttcaaactttttttactgcaaccaatagttaagattatattttacatattttgaaacacacaagcttaatagaaataaatgcttgtgaacaatg

SEQ ID NO: 24878 - DNA, 2235 bp, Homo sapiens
  source 1..2235: mol_type = unassigned DNA
atggaggccagcgggaagctcatttgcagacaaaggcaagtccttttttcctttctccttttgggcttatctctggcgggcgcggcggaacctagaagctattctgtggtggaggaaactgagggcagctcctttgtcaccaatttagcaaaggacctgggtctggagcagagggaattctccaggcggggggttagggttgtttccagagggaacaaactacatttgcagctcaatcaggagaccgcggatttgttgctaaatgagaaattggaccgtgaggatctgtgcggtcacacagagccctgtgtgctacgtttccaagtgttgctagagagtcccttcgagttttttcaagctgagctgcaagtaatagacataaacgaccactctccagtatttctggacaaacaaatgttggtgaaagtatcagagagcagtcctcctgggactacgtttcctctgaagaatgccgaagacttagatgtaggccaaaacaatattgagaactatataatcagccccaactcctattttcgggtcctcacccgcaaacgcagtgatggcaggaaatacccagagctggtgctggacaaagcgctggaccgagaggaagaagctgagctcaggttaacactcacagcactggatggtggctctccgcccagatctggcactgctcaggtctacatcgaagtcctggatgtcaacgataatgcccctgaatttgagcagcctttctatagagtgcagatctctgaggacagtccggtaggcttcctggttgtgaaggtctctgccacggatgtagacacaggagtcaacggagagatttcctattcacttttccaagcttcagaagagattggcaaaacctttaagatcaatcccttgacaggagaaattgaactaaaaaaacaactcgatttcgaaaaacttcagtcctatgaagtcaatattgaggcaagagatgctggaaccttttctggaaaatgcaccgttctgattcaagtgatagatgtgaacgaccatgccccagaagttaccatgtctgcatttaccagcccaatacctgagaacgcgcctgaaactgtggttgcacttttcagtgtttcagatcttgattcaggagaaaatgggaaaattagttgctccattcaggaggatctacccttcctcctgaaatccgcggaaaacttttacaccctactaacggagagaccactagacagagaaagcagagcggaatacaacatcactatcactgtcactgacttggggacccctatgctgataacacagctcaatatgaccgtgctgatcgccgatgtcaatgacaacgctcccgccttcacccaaacctcctacaccctgttcgtccgcgagaacaacagccccgccctgcacatccgcagcgtcagcgctacagacagagactcaggcaccaacgcccaggtcacctactcgctgctgccgccccgcgtggtggtgctggacgccaacgacaactcgcccttcgtgctgtacccgctgcagaacggctccgcgccctgcaccgagctggtgccccgggcggccgagccgggctacctggtgaccaaggtggtggcggtggacggcgactcgggccagaacgcctggctgtcgtaccagctgctcaaggccacggagctcggtctgttcggcgtgtgggcgcacaatggcgaggtgcgcaccgccaggctgctgagcgagcgcgacgcggccaagcacaggctggtggtgctggtcaaggacaatggcgagcctccgcgctcggccaccgccacgctgcacgtgctcctggtggacggcttctcccagccctacctgcctctcccggaggcggccccgacccaggcccaggccgacttgctcaccgtctacctggtggtggcgttggcctcggtgtcttcgctcttcctcttttcggtgctcctgttcgtggcggtgcggctgtgtaggaggagcagggcggcctcggtgggtcgctgcttggtgcccgagggcccccttccagggcatcttgtggacatgagcggcaccaggaccctatcccagagctaccagtatgaggtgtgtctggcaggaggctcagggaccaatgagttcaagttcctgaagccgattatccccaacttccctccccagtgccctgggaaagaaatacaaggaaattctaccttccccaataactttgggttcaatattcagtga

SEQ ID NO: 24879 - DNA, 2802 bp, Homo sapiens
  source 1..2802: mol_type = unassigned DNA
aagtccacggggagcttggatgccaaagggaggacggctgggtcctctggagaggactactcactggcatatttctgaggtatctgtagaataaccacagcctcagatactggggactttacagtcccacagaaccgtcctcccaggaagctgaatccagcaagaacaatggaggccagcgggaagctcatttgcagacaaaggcaagtccttttttcctttctccttttgggcttatctctggcgggcgcggcggaacctagaagctattctgtggtggaggaaactgagggcagctcctttgtcaccaatttagcaaaggacctgggtctggagcagagggaattctccaggcggggggttagggttgtttccagagggaacaaactacatttgcagctcaatcaggagaccgcggatttgttgctaaatgagaaattggaccgtgaggatctgtgcggtcacacagagccctgtgtgctacgtttccaagtgttgctagagagtcccttcgagttttttcaagctgagctgcaagtaatagacataaacgaccactctccagtatttctggacaaacaaatgttggtgaaagtatcagagagcagtcctcctgggactacgtttcctctgaagaatgccgaagacttagatgtaggccaaaacaatattgagaactatataatcagccccaactcctattttcgggtcctcacccgcaaacgcagtgatggcaggaaatacccagagctggtgctggacaaagcgctggaccgagaggaagaagctgagctcaggttaacactcacagcactggatggtggctctccgcccagatctggcactgctcaggtctacatcgaagtcctggatgtcaacgataatgcccctgaatttgagcagcctttctatagagtgcagatctctgaggacagtccggtaggcttcctggttgtgaaggtctctgccacggatgtagacacaggagtcaacggagagatttcctattcacttttccaagcttcagaagagattggcaaaacctttaagatcaatcccttgacaggagaaattgaactaaaaaaacaactcgatttcgaaaaacttcagtcctatgaagtcaatattgaggcaagagatgctggaaccttttctggaaaatgcaccgttctgattcaagtgatagatgtgaacgaccatgccccagaagttaccatgtctgcatttaccagcccaatacctgagaacgcgcctgaaactgtggttgcacttttcagtgtttcagatcttgattcaggagaaaatgggaaaattagttgctccattcaggaggatctacccttcctcctgaaatccgcggaaaacttttacaccctactaacggagagaccactagacagagaaagcagagcggaatacaacatcactatcactgtcactgacttggggacccctatgctgataacacagctcaatatgaccgtgctgatcgccgatgtcaatgacaacgctcccgccttcacccaaacctcctacaccctgttcgtccgcgagaacaacagccccgccctgcacatccgcagcgtcagcgctacagacagagactcaggcaccaacgcccaggtcacctactcgctgctgccgccccaggacccgcacctgcccctcacatccctggtctccatcaacgcggacaacggccacctgttcgccctcaggtctctggactacgaggccctgcaggggttccagttccgcgtgggcgcttcagaccacggctccccggcgctgagcagcgaggcgctggtgcgcgtggtggtgctggacgccaacgacaactcgcccttcgtgctgtacccgctgcagaacggctccgcgccctgcaccgagctggtgccccgggcggccgagccgggctacctggtgaccaaggtggtggcggtggacggcgactcgggccagaacgcctggctgtcgtaccagctgctcaaggccacggagctcggtctgttcggcgtgtgggcgcacaatggcgaggtgcgcaccgccaggctgctgagcgagcgcgacgcggccaagcacaggctggtggtgctggtcaaggacaatggcgagcctccgcgctcggccaccgccacgctgcacgtgctcctggtggacggcttctcccagccctacctgcctctcccggaggcggccccgacccaggcccaggccgacttgctcaccgtctacctggtggtggcgttggcctcggtgtcttcgctcttcctcttttcggtgctcctgttcgtggcggtgcggctgtgtaggaggagcagggcggcctcggtgggtcgctgcttggtgcccgagggcccccttccagggcatcttgtggacatgagcggcaccaggaccctatcccagagctaccagtatgaggtgtgtctggcaggaggctcagggaccaatgagttcaagttcctgaagccgattatccccaacttccctccccagtgccctgggaaagaaatacaaggaaattctaccttccccaatttgtgtgtatgtaatattgtacggatttactcttgatttttctcatgttctttctccctttgttttaaagtgaacatttacctttattcctggttcttaaaaggtgacaattcattctttaacccagatggtcttaatttgtaattaatttgcctccctaaagagcaataccaaatcacatttttttcatgcccctatctttagctgaacttcacccactattatgcttatggtaaaattaaatagagcaatttggaagtg

SEQ ID NO: 24880 - DNA, 2781 bp, Homo sapiens
  source 1..2781: mol_type = unassigned DNA
atggagatcagaggggcactcgatctgcgaaaaaggcaagttctaatattccttgttttgctgggattgtctcgggcaggtactgaatctgcacactattctgtggcagaggaaacagaaattggctcttttgtggctaatctagcgagggacctagggctgggggtggaggagctgtcttcacgtgaagcccgggtagtgtctgatgataataaaaagtatttgcaccttgatttgctgactgggaatttgctcctaaatgagaaactagaccgagacgagctgtgtggctccaccgagccctgtgtgctgcattttcaggtggttttggaaaaccctttacagttttttcggtttgagctgtgtgtcaaagacataaatgatcactcccctacatttctagacaaggaaatacttattaaaatatcagaaggtaccactgttggagctacctttctaatggagagtgctcaagatttggatgtcggaagcaacagtctccaaaactacacaattagccccaattctcacttctacattaaaattcccgacagtagtgacagaaagatatacccagagctggtcctagatagagctttagattatgaacaggaagctgaactcagattaacactcacagcagtggatggtggatccccgcccaagtctgggacaactttggttctcatcaaggtgttggacatcaatgataatgcccctgagtttcctcagagtctctatgaggtgcaagtccccgaggacagaccccttggctcctggattgccaccatctcagctaaggatctggatgcaggaaactatggaaaaatatcttacacatttttccatgcatcagaagatattcgtaaaacatttgaaattaatccaatatctggggaagttaatttgagatcacccctggattttgaagtaatacagtcctacactataaatattcaggcaacagatggtgggggtctttcaggaaaatgcacccttctagttaaagttatggatataaacgacaacccaccagaagtgaccatatcgtcgattacaaagagaattccagagaatgcctcagagaccctagtagctctttttagtatcctagaccaagactctggagacaatgggaggatgatttgctctattcaagataacctcccttttttcctgaaaccgaccttcaagaactttttcactctagtttctgaaaaagcactggacagagagagccaagccgagtacaacatcacgatcaccgtcacagacttggggacacccaggctgaaaaccgagtacaacataaccgtgctgctctctgacgtcaatgacaacgcccccaccttcacccaaacctcctacaccctgttcgtccgcgagaacaacagccccgccctgcacatcggcagcgtcagcgccacagacagagactcaggcaccaacgcccaggtcaactactcgctgctgccgccccaggaccggcacctgcccctcgcctccttggtctccatcaacgcggacaatggccacctgtttgccctcaggtcgctggactacgaggccctacaggagttcgagtttcgcgtgggcgccacagaccgcgggtccccggcgttgagcagcgaggcgctggtgcgcgtgctggtgctggacgccaacgacaactcgcccttcgtgctgtacccgctgcagaacggctccgcgccctgcaccgagctggtgccccgggcggccgagccgggctacctggtgaccaaggtggtggcggtggacggcgactcgggccagaacgcctggctgtcgtaccagctgctcaaggccacggagcccgggctgttcggcgtgtgggcgcacaatggcgaggtgcgcaccgccaggctgctgagcgagcgcgacgcggccaagcacaggctggtggtgctggtcaaggacaatggcgagcctcctcgctcggccaccgccacgctgcacgtgctcctggtggacggcttctcccagccctacctgccgctccctgaggcggccccggcccaggcccaggccgactccctcaccgtctacctggtggtggcattggcctcggtgtcgtcgctcttcctcttctcggtgctcctgttcgtggcggtgcggctgtgcaggaggagcagggcggcctcggtgggtcgctgctcggtgcccgagggtccctttccagggcatctggtggacgtgagcggcaccgggaccctgtcccagagctaccaatacgaggtgtgtctgacaggaggttccgggacaaatgagttcaaatttctgaagccgattatccccaattttcaagttcatgacactggtaggaatatgggggaaatcgagaactttcgaaatagctttggacttaacattcaataaaacaatttattttaaatgtctaatttttggttattcttggcaagctgatggtactttttgcataatcttttgtggattcttggttgtactgtagttgcatgcatgattatagctcttgtttttctcacagtttctttaaaaatctttattagtggctataatgacgtggaaatgtaatctgtgttttctggtttttcatttatttggccaaaatgttatattaatggagttattgctatttttgctgtgataatggtattatgcaagaccatattctcaattatttggatatgcaaactaaagtattaagagctaatgtcattatatatgtaacttaaatctagacaccatcaaagcataaaataaaaataaaaagcgttgctg

SEQ ID NO: 24881 - DNA, 2367 bp, Homo sapiens
  source 1..2367: mol_type = unassigned DNA
actgaaaagacaggcattaaaggagcttcgcctacagagctgctggaggatacactctccagggggttcctgttaaaaaccagagcttcagcttccaaaattacggctgagcttcagtttttccacaagagattgcctaaaggaaccatggagatcagaggggcactcgatctgcgaaaaagacaaggaaatacttattaaaatatcagaaggtaccactgttggagctacctttctaatggagagtgctcaagatttggatgtcggaagcaacagtctccaaaactacacaattagccccaattctcacttctacattaaaattcccgacagtagtgacagaaagatatacccagagctggtcctagatagagctttagattatgaacaggaagctgaactcagattaacactcacagcagtggatggtggatccccgcccaagtctgggacaactttggttctcatcaaggtgttggacatcaatgataatgcccctgagtttcctcagagtctctatgaggtgcaagtccccgaggacagaccccttggctcctggattgccaccatctcagctaaggatctggatgcaggaaactatggaaaaatatcttacacatttttccatgcatcagaagatattcgtaaaacatttgaaattaatccaatatctggggaagttaatttgagatcacccctggattttgaagtaatacagtcctacactataaatattcaggcaacagatggtgggggtctttcaggaaaatgcacccttctagttaaagttatggatataaacgacaacccaccagaagtgaccatatcgtcgattacaaagagaattccagagaatgcctcagagaccctagtagctctttttagtatcctagaccaagactctggagacaatgggaggatgatttgctctattcaagataacctcccttttttcctgaaaccgaccttcaagaactttttcactctagtttctgaaaaagcactggacagagagagccaagccgagtacaacatcacgatcaccgtcacagacttggggacacccaggctgaaaaccgagtacaacataaccgtgctgctctctgacgtcaatgacaacgcccccaccttcacccaaacctcctacaccctgttcgtccgcgagaacaacagccccgccctgcacatcggcagcgtcagcgccacagacagagactcaggcaccaacgcccaggtcaactactcgctgctgccgccccaggaccggcacctgcccctcgcctccttggtctccatcaacgcggacaatggccacctgtttgccctcaggtcgctggactacgaggccctacaggagttcgagtttcgcgtgggcgccacagaccgcgggtccccggcgttgagcagcgaggcgctggtgcgcgtgctggtgctggacgccaacgacaactcgcccttcgtgctgtacccgctgcagaacggctccgcgccctgcaccgagctggtgccccgggcggccgagccgggctacctggtgaccaaggtggtggcggtggacggcgactcgggccagaacgcctggctgtcgtaccagctgctcaaggccacggagcccgggctgttcggcgtgtgggcgcacaatggcgaggtgcgcaccgccaggctgctgagcgagcgcgacgcggccaagcacaggctggtggtgctggtcaaggacaatggcgagcctcctcgctcggccaccgccacgctgcacgtgctcctggtggacggcttctcccagccctacctgccgctccctgaggcggccccggcccaggcccaggccgactccctcaccgtctacctggtggtggcattggcctcggtgtcgtcgctcttcctcttctcggtgctcctgttcgtggcggtgcggctgtgcaggaggagcagggcggcctcggtgggtcgctgctcggtgcccgagggtccctttccagggcatctggtggacgtgagcggcaccgggaccctgtcccagagctaccaatacgaggtgtgtctgacaggaggttccgggacaaatgagttcaaatttctgaagccgattatccccaattttcaagttcatgacactggtaggaatatgggggaaatcgagaactttcgaaatagctttggacttaacattcaataaaacaatttattttaaatgtctaatttttggttattcttggcaagctgatggtactttttgcataatcttttgtggattcttggttgtactgtagttgcatgcatgattatagctcttgtttttctcacagtttctttaaaaatctttattagtggctataatgacgtggaaatgtaatctgtgttttctgg

SEQ ID NO: 24882 - DNA, 2653 bp, Homo sapiens
  source 1..2653: mol_type = unassigned DNA
atggagcctgcaggggagcgctttcccgaacaaaggcaagtcctgattctccttcttttactggaagtgactctggcaggctgggaaccccgtcgctattctgtgatggaggaaacagagagaggttcttttgtagccaacctggccaatgacctagggctgggagtgggggagctagccgagcggggagcccgggtagtttctgaggataacgaacaaggcttgcagcttgatctgcagaccgggcagttgatattaaatgagaagctggaccgggagaagctgtgtggccctactgagccctgtataatgcatttccaagtgttactgaaaaaacctttggaagtatttcgagctgaactactagtgacagacataaacgatcattctcctgagtttcctgaaagagaaatgaccctgaaaatcccagaaactagctcccttgggactgtgtttcctctgaaaaaagctcgggacttggacgtgggcagcaataatgttcaaaactacaatatttctcccaattctcatttccatgtttccactcgcacccgaggggatggcaggaaatacccagagctggtgctggacacagaactggatcgcgaggagcaggccgagctcagattaaccttgacagcggtggacggtggctctccaccccgatctggcaccgtccagatcctcatcttggtcttggacgccaatgacaatgccccggagtttgtgcaggcgctctacgaggtgcaggtcccagagaacagcccagtaggctccctagttgtcaaggtctctgctagggatttagacactgggacaaatggagagatatcatactccctttattacagctctcaggagatagacaaaccttttgagctaagcagcctttcaggagaaattcgactaattaaaaaactagattttgagacaatgtcttcgtatgatctagatatagaggcatctgatggcgggggactttctggaaaatgctctgtctctgttaaggtgctggatgttaacgataacttcccggaactaagtatttcatcacttaccagccctattcccgagaattctccagagacagaagtggccctgtttaggattagagaccgagactctggggaaaatggaaaaatgatttgctcaattcaggatgatgttccttttaagctaaaaccttctgttgagaatttctacaggctggtaacagaaggggcgctggacagagagaccagagccgagtacaacatcaccatcaccatcacagacttggggactccaaggctgaaaaccgagcagagcataaccgtgctggtgtcggacgtcaatgacaacgcccccgccttcacccaaacctcctacaccctgttcgtccgcgagaacaacagccccgccctgcacatcggcagtgtcagcgccacagacagagactcgggcaccaacgcccaggtcacctactcgctgctgccgccccgggacccgcacctgcccctcacctccctggtctccattaacacggacaacggccacctgttcgctctccagtcgctggactacgaggccctgcaggctttcgagttccgcgtgggcgccacagaccgcggcttcccggcgctgagcagcgaggcgctggtgcgagtgctggtgctggacgccaacgacaactcgcccttcgtgctgtacccgctgcagaacggctccgcgccctgcaccgagctggtgccccgggcggccgagccgggctacctggtgaccaaggtggtggcggtggacggcgactcgggccagaacgcctggctgtcgtaccagctgctcaaggccacggagcccgggctgttcggcgtgtgggcgcacaatggcgaggtgcgcaccgccaggctgctgagcgagcgcgacgtggccaagcacaggctagtggtgctggtcaaggacaatggcgagcctccgcgctcggccaccgccacgctgcaagtgctcctggtggacggcttctctcagccctacctgccgctcccagaggcggccccggcccaagcccaggccgactcgcttaccgtctacctggtggtggcattggcctcggtgtcttcgctcttcctcttctcggtgttcctgttcgtggcagtgcggctgtgcaggaggagcagggcggcctcagtgggtcgctgctcggtgcccgagggcccctttccagggcatctggtggacgtgagcggcaccgggaccctttcccagagctaccagtacgaggtgtgtctgacgggaggctctgaaagtaatgatttcaagttcttgaagcctatattcccaaatattgtaagccaggactctaggaggaaatcagaatttctagaataatgtaggtatctgtagctttccgaccgtctgttaattttgtcttcctcacttttcaccttagttttttttaaccctttagtaatcttgaattctacttttttttaaatttctactgttgtctttagtaatgttactcatttcctttgtctgattgttagttttcaaattattgtattattataaatattttatatcaggaaagttcatatttctgaataaattaatagtattcattcctgaagggtgatatgaaagttaaccccacctaataaacataactctaattctg

SEQ ID NO: 24883 - DNA, 4814 bp, Homo sapiens
  source 1..4814: mol_type = unassigned DNA
caaagctctaagtatgctgggacagatactacaaatgaactttatgatgagcgaattaacctgatttatagtcctgtactttctctacgtgccatatccattattaaagaaatgagtctaagtaggaagtagagttaacctatagtttcatttcttgaatttcttattctctttcttcagtctttttcagttaacctacacacacacacacacacacacacacacacacacacatatgtttataagtgggatgggagaacgggtacggtgataattaaaagaggtaaggtttctcttgagatgaaaatgttctaaaattgtgatggcggatgcacacctctgaatatattaaaagccattgaaatgaaaaaagggtggggggaatccaaaagtgtagcagacccaaccttgagatttgcttgtttgggaatgaattttccaataacttgaaagttgtaaaaactcacacttctcagggttaggtgtcagaaagaaaaggaagtaatttattctttaataaagcaattgttaaatactctttagaactaccactgattgcaattttgcagtgtctactcatagtgtctatataggtaccatgaaaaagatgtacttgtgaaactgttctcatgttacttcagaaaaattttgcttctaagtgtgtattctatgtctggttaaatgttcattgaattttatttaatcattaatctcaacagcattaaacagtcaataacataaatgacagtcttctctttgtactcctccctgtacaacatcacagagctccatctgtatacacgaaagtcacatgaaaatagaactcagtgttttgtattacatagtctattcagtacatttagaagtattttgcctccaatattcaaccacagtaaaagactcagtgagaacgcgtggtggcgctgcaggttaagatgacggaaaatacaactgcctacgcagctccaggatccagcaaaccgtttcccaaagcctggaagcaaaagaatagctgagccagagcgaacgtgagtgtgaaacctctttaagacaccgttgggctgcttggttctgacattctggactgcaaaacagttctactaggatcctggggatacatgaagcttctgtgaaccaacttttcaagaaaaagcaatggagattggatggatgcacaatcggagacaaaggcaagtccttgttttctttgttttgctgagcttgtctggggcgggcgccgagttggggtcctattccgtagtggaagaaacggagagaggctcttttgtggcaaatctaggaaaagacctggggttggggttgacagagatgtccacccgcaaggccaggatcatttcccaggggaacaaacagcatttgcagctcaaggctcaaactggggatttgctcataaatgagaagctagatcgagaggagctatgcggtcccactgagccttgcatactacatttccaagtgttaatggaaaaccctttagaaatatttcaggctgaactgagggtgatagatataaatgaccattctcccatgttcactgaaaaggaaatgattctaaaaataccggaaaacagtcctctaggaactgagttccctctgaatcatgctttggacttggacgtaggaagcaataatgttcaaaactataaaatcagcccaagctctcatttccgggttctaatccatgaattcagagatggcaggaaataccctgagctagtgttggataaagagctggatcgggaggaggagcctcaactaagattaaccctgacagcgctggatggtggctctccaccgcgatctggaactgctcaggtccgtattgaagtggtggacatcaatgataacgctcctgagtttgagcagcccatctacaaagtgcagattccagagaacagtcctcttggctccctggttgccaccgtctccgccagggatttagacggcggagccaatggaaaaatatcatacacactctttcagccttcggaggatattagtaaaactttggaggtaaatcctatgacaggggaagttcgactgagaaagcaagtagatttcgaaatggttacgtcttatgaagtgcgcatcaaagccacagatgggggaggtctttcaggaaagtgcactcttctcctgcaggtggtggacgtgaatgacaatcccccacaggtgaccatgtctgcactcaccagccccatcccagagaactcgcctgagatagtagttgctgttttcagcgtttcagatcctgactccggaaacaatgggaagacgatttcctccatccaggaagaccttccctttcttctaaaaccttcagtcaagaacttttacaccttggtaacggagagagcactcgacagagaagcaagagctgaatataatatcaccctcaccgtcacagatatggggactccaaggctgaaaacggagcacaacataacagtgcagatatcagatgtcaatgataacgcccccactttcacccaaacctcctacaccctgttcgtccgcgagaacaacagccccgccctgcacatcggcagcgtcagcgccacagacagagactcaggcaccaacgcccaggtcacctactcgctgctgccgccccaggacccgcacctgcccctcgcctccctggtctccatcaacgcagacaacggccacctgttcgccctcaggtcgctggactacgaggccctgcgggagttcgagttccgcgtgagcgccacagaccgcggctccccggctttgagcagcgaggcgctggtgcgcgtgctggtgctggacgccaacgacaactcgcccttcgtgctgtacccgctgcagaacggctccgcgccctgcactgagctggtgccccgggcggccgagccgggctacctggtgaccaaggtggtggcggtggacggcgactcgggccagaatgcctggctgtcgtaccagctgctcaaggccacggagcccgggctgttcggtgtgtgggcgcacaatggcgaggtgcgcaccgccaggctgctgagcgagcgcgacgcagccaagcagaggctggtggtgctggtcaaggacaatggcgagcctccgcgctcggccaccgccacgctgcacgtgctcctggtggacggcttctcccagcccttcctgccgctcccagaggcggcccccggccagacccaggccaactcgctcactgtctacctggtggtggcgttggcctcggtgtcgtcgctcttcctcttttcggtgctcctgttcgtggcggtgcggctgtgcaggaggagcagggcggcctcggtgggccgctgctcgatgcctgagggcccctttccagggcgtctggtggacgtaagcggcaccgggaccctgtcccagagctaccaatacgaggtgtgtctgacaggaggctcagaaacaagtgagttcaagttcctgaagccgattatccccaacttctctccttagggcactaggaaagaaatagattaaaattccacccttcacaatagctttggatttaattattgataggaacccatttgataaattccttaacttcttatgattgtcttgttgattaaattgttcatgctcaccaccaccaataaggtatttttctctgattgttagttcaaattatattgttaattccagtttcccttttcctcatatttaccccgaagaggtgttgcatatagaatcccaattaacaaaatatactttatcttcaaagttgatgtcatttaaaatttttccgtctttatattttatttacttcctattcattttttgctccatttttcatgttacttctcagtttcctagaacttcaagtattaaaataacctgttgcatgtattaggcatatttcctatgttacatttcttttgtctattttcctttcaaaattggtatttttgttgggctcaattttcattataatacttttcttaaagtttctttctttcttttcttttctttctttttttttttttcctttttgagacagggtcttactcttgtcacccaggctggagtgcagtggcacaatcttggctcactgcaacctctgcctcctgggctcaacggatccttccacctcagcctcccaagtagcttggactataggtgcatgccaccatgcctggctaatcttttgcagcgatgagattttgccaagttgcccaggctgatcttgaactcctgggctcaagccatcctccctcctcagcctcccaaaattctgggattacaggcataagccaatgtgcccatccaaagttttatttatttatttttttgagatggagtctcgtaaagttacctttaaaaaaaaagttctattttccctgtattggtatctccttaaataaaataaaatattcctattgtaagtgatatgagaaatctttaaccagccttatctaaaaataaaaagagaagccattgtaagacattcagtatgtgtaaatgtgtttgtgtttgtagacaaaaggcaaaggtattatgtaaaaatatttaataatttattctttctattactgaattaaaaaatcagaggtccctgttatatttttaatggctaacaactcaatctcattaagttggaaaaaaaacttatcaaagagacatttacatggtttggcttttatattcatcatagtatacattggcggtatctagccctttctctgtaaaatatccctatgtttaatctgtatttcttgcttattatatgtaaagttgagcttctttctagatattaggcctttgaataaaattctatgtgagtc

SEQ ID NO: 24884 - DNA, 2736 bp, Homo sapiens
  source 1..2736: mol_type = unassigned DNA
ggaagaggaggctttctaaggcggtcgctccgggaaatccgggccctaggattgtccactcatcccagtatcagcgagatacggggagatagagttagcgacaacgtgagccagagctggagcacgtttggtgagagaccagaaagcaatggaggccggagaggggaaggagcgcgttccgaaacaaaggcaagtcctgatattctttgttttgctgggcatagctcaggctagttgccagcctaggcactattcagtggccgaggaaacggagagtggctcctttgtggccaatttgttaaaagacctggggctggagataggagaacttgctgtgaggggggccagggtcgtttccaaaggaaaaaaaatgcatttgcagttcgataggcagaccggggatttgttgttaaatgagaaattggaccgggaggagctgtgcggccccacagagccctgtgtcctacctttccaggtgttactagaaaatcccttgcagttttttcaggcggagctacggattagggacgtaaatgatcattccccagttttcctagacaaagaaatacttttgaaaattccagaaagtatcactcctggaactactttcttaatagaacgtgcccaggacttggatgtaggaaccaacagtctccaaaattacacaatcagtcccaatttccactttcatcttaatttacaagacagtctcgatggcataatattaccacagctggtgctgaacagagccctggatcgcgaggagcagcctgagatcaggttaaccctcacagcgctagatggcgggagtccacccaggtccggcacggccctggtacggattgaagttgtggacatcaatgacaacgtcccagagtttgcaaagctgctctatgaggtgcagatcccggaggacagccccgttggatcccaggttgccatcgtctctgccagggatttagacattggaactaatggagaaatatcttatgcattttcccaagcatctgaagacattcgcaaaacgtttcgattaagtgcaaaatcgggagaactgcttttaagacagaaactggatttcgaatccatccagacatacacagtaaatattcaggcgacagatggtgggggcctatctggaacttgtgtggtatttgtccaagtgatggatttgaatgacaatcctccggaactaactatgtcgacacttatcaatcagatcccagaaaacttgcaggacaccctcattgctgtattcagcgtttcagatcctgactccggagacaacggaaggatggtgtgctccatccaagatgatcttccttttttcttgaaaccttctgttgagaacttttacactctggtgataagcacggccctggaccgggagaccagatccgaatacaacatcaccatcaccgtcaccgacttcgggacacccaggctgaaaaccgagcacaacataaccgtgctggtctccgacgtcaatgacaacgcccccgccttcacccaaacctcctacaccctgttcgtccgcgagaacaacagccccgccctgcacatcggcagcgtcagcgccacagacagagactcgggcaccaacgcccaggtcacctactcgctgctgccgccccaggacccgcacctgcccctcgcctccctggtctccatcaacgcggacaacggccacctgttcgctctccagtcgctggactacgaggccctgcaggcgttcgagttccgcgtgggcgccgcagaccgcggctccccggcgttgagcagcgaggcgctggtgcgcgtgctggtgctggacgccaacgacaactcgcccttcgtgctgtacccgctgcagaacggctccgcgccctgcaccgagctggtgccccgggcggccgagccgggctacctggtgaccaaggtggtggcggtggacggcgactcgggccagaacgcctggctgtcgtaccagctgctcaaggccacggagcccgggctgttcggcgtgtgggcgcacaatggcgaggtgcgcaccgccaggctgctgagggagcgcgacgctgccaagcagaggctggtggtgctggtcaaggacaatggcgagcctccgcgctcggccaccgccacgctgcacgtgctcctggtggacggcttctcccagccctacctgctgctcccggaggcggcaccggcccaggcccaggccgacttgctcaccgtctacctggtggtggcgttggcctcggtgtcttcgctcttcctcttctcggtgctcctgttcgtggcggtgcggctgtgcaggaggagcagggcggcctcggtgggtcgctgctcggtgcccgagggcccctttccagggcagatggtggacgtgagcggcaccgggaccctgtcccagagctaccagtacgaggtgtgtctgactggaggctccgggacaaatgagttcaagttcctgaagccaattatccccaacttcgttgctcagggtgcagagagggttagcgaggcaaatcccagtttcaggaagagctttgaattcacttaagtgttaataaggatctactgaggctagtctcgtttaatttgtggaaagtccttttttactgctttgcccattggaggtgtctccttttattagaaagtaaccatcttattccaattctatgcatgttactggtatttataaatgtatgagtttttttgcggtataataaatgtaaattttctttgtattct

SEQ ID NO: 24885 - DNA, 3173 bp, Homo sapiens
  source 1..3173: mol_type = unassigned DNA
atggaggcgggaggagagcgatttcttagacaaaggcaagtcttgcttctctttgtttttctgggagggtctctggctgggtccgagtcaagacgctattctgtggctgaggaaaaagagaagggctttttaatagccaacctagcaaaggatctgggactaagggtagaggaactggccgcgaggggggcccaagttgtgtccaaagggaacaaacagcattttcagctcagtcatcagacaggtgatttgctcctgaatgagaaattggaccgggaggagctatgcggccccacagaaccatgcatactacattttcagatattactgcaaaaccctttgcaattcgttacaaacgagctccgtatcatagatgtaaatgaccattctccggtattctttgaaaatgaaatgcatctgaaaatcctagaaagcactctgccaggaacagtaattcctttgggaaatgctgaggacttggatgtgggaagaaacagcctccaaaactacactatcactccgaattcccacttccacgtactcactcgcagtcgtagggacggaaggaagtacccggaactagtactggataaagcgctcgatcgggaggagcagccggaactcagcttaacgctcaccgcgctggacggcggctctccccctcggtctgggacagcccagataaacatccaggtcttagatataaacgacaatgcaccagaatttgcacagccgctctatgaggttgcagttctagagaatacccccgttaactctgtcattgtcactgtctcggcttctgacttagatacaggaagttttgggacaatatcatatgcattttttcatgcttctgaagaaattcgcaaaacttttcagctaaatccaattactggtgatatgcaactggtcaaatatttgaattttgaagcgattaatagttatgaagtcgacatcgaggccaaggatggcggaggcctatccggaaagtctacagtcatagtccaggtggttgatgtcaacgacaacccaccggaactgaccttgtcttcagtaaacagccctattcctgagaactcgggagagactgtactggctgttttcagtgtttctgatctagactctggagacaacggaagagtgatgtgttccattgagaacaatctccccttcttcctgaaaccatctgtagagaatttttacaccctagtgtcagaaggcgcgctggacagagagaccagatccgagtacaacattaccatcactatcactgacctggggacacccaggctgaaaaccaagtacaacataaccgtgctggtctccgacgtcaatgacaacgcccccgccttcacccaaatctcctacaccctgttcgtccgcgagaacaacagccccgccctgcacatcggcagtgtcagcgccacagacagagactcaggcaccaacgcccaggtaacctactcgctgctgccgccccaggacccgcacctgcccctctcttccctggtctccatcaacgcggacaacggccacctgtttgccctcaggtcgctggactacgaggccctgcaggcgttcgagttccgcgtgggcgccacagaccgtggctccccggctttgagcagcgaggcgctggtgcgcgtgctggtgctggacgccaacgacaactcgcccttcgtgctgtacccgctgcagaacggctccgcgccctgcaccgagctggtgccccgggcggctgagccgggctacctggtgaccaaggtggtggcggtggacggcgactcgggccagaacgcctggctgtcgtaccagctgctcaaggccacggagcccgggctgttcggcgtgtgggcgcacaatggcgaagtgcgcaccgccaggctgctgagcgagcgcgacgcggccaagcacaggctggtggtgctggtcaaggacaatggcgagcctccgcgctcggccaccgccacgctgcatgtgctcctggtggacggcttctcccagccctacctgcctctcccggaggcggcaccggcccaggcccaggccgacttgctcaccgtctacctggtggtggcattggcctcggtgtcttcgctcttcctcttttcggtgctcctgttcgtggcggtgcggctgtgcaggaggagcagggcggcctcggtgggtcgctgctcggtgcccgagggcccctttccagggcagatggtggacgtgagcggcaccgggaccctgtcccagagctaccagtacgaggtgtgtctgactggaggctccgggacaaatgagttcaagttcctgaagccaattatccccaacttcgttgctcagggtgcagagagggttagcgaggcaaatcccagtttcaggaagagctttgaattcagttaagtgttaataaggatctactgagcctcgtcttagttaatctgtggaaagtccttttttactgctttgtccattggagaggtcttttttggtctggttcaaggcaagtagcaagaatagagcaaaatatcaaatccagggatggcttaggtttcattaacagtactggaaagtagttgtgtggctctgaatgttttgtatttcaatcgagaatccttagtcgatagaacattttgtttatatattgattctactttttctgtagttaatccttgcatattctcctttcatcctggcttgccaacgcagtcttaattccgccttttttttttctaatggggagcaaaaagaaattcactgtcttttaatagtgatttcaaatagcttattaaaataactccattcaaattttacattataaagcaatgtagagagagttccaaaccaccaattttataatttcccttgttgaatatattcatataatgtgttctataatatgcccaaagcagctttgtctatagttaacaaagttttaaggatagacaagaatgtgttttctttaataaatagtaatatatcatctttttagggatatagtactcaaatgaaagtaatttagttcattttctgtgttgacatttgcaattaatatttcaatattttatgtgcttatattggccaaaatatggacacaaatatagactaatatgggtaattaccctttggtttatctaaagtgtgttcatgatgactgaggaaaaaaattaaacctatgccattta

SEQ ID NO: 24886 - DNA, 3621 bp, Homo sapiens
  source 1..3621: mol_type = unassigned DNA
atgaagaagctagggagaattcatccaaacaggcaagtgttggcctttattttgatggtgttcttgtctcaggttcgcctcgagcctattcgttattctgtgttggaggaaacagagagcggctcctttgtagcccatctggccaaggatctgggcctgggaattggggaactggcctcccggtcagcccgggtgctgtctgacgatgacaagcagcgtttgcagctggatcgtcagactggagatttgcttctgagggagaaactagaccgggaagagctctgtggtcctattgaaccgtgtgtactgcatttccaagtgttcctggaaatgccggtgcaattttttcaaggagaattattgatccaggacataaatgatcactctccaatattccctgaaagggaagtgctcttgaaaatactagaaaatagccagccgggtactctatttccgttgctaatagctgaggatttggatgtgggcagcaatggtcttcaaaaatacacaatcagccccaattctcattttcacattctcactcgaaatcatagtgagggcaagaaatacccagatttggtgcaggacaaaccactggatcgagaggagcagcctgagttcagcttaaccctcgtggcgctggatggtgggtcaccacctaggtctggcacggtcatggttcgaatcctgatcatggacatcaatgacaatgctcctgagtttgtgcacactccatatggggtgcaggtcctggaaaacagccccctagactctccaattgttagggtcttagctagagatatagatgctggaaacttcgggagtgtttcttatggcttattccaagcatcagatgaaattaaacaaactttctcaataaatgaagtcacgggagaaatactgttgaaaaaaaaattggatttcgaaaaaattaaatcttaccatgtagaaattgaggccacagatggaggaggcctttctggaaaaggcactgtagtcatagaggtggtggatgtgaatgacaatcccccagaacttatcatatcttcactcaccagctccatcccagaaaatgctcctgagacggtagtctctatcttccgaattcgagatagagattccggagaaaatggaaagatgatttgctctattccagataatctaccgtttattctaaaaccaactttgaagaatttttacaccctggtaacagagagaccactggaccgagagaccagcgctgagtacaacatcaccatcgccgtcactgacttggggacacccaggctgaaaacccagcagaacataaccgtgcaggtctccgacgtcaatgacaacgcccccgccttcacccaaacctcctacaccctgttcgtccgcgagaacaacagccccgccctgcacatcggcagtgtcagcgccacagacagagactcgggcaccaacgcccaggtcacctactcgctgctgccgccccaggacccgcacctgcccctcgcctccctggtctccatcaacgcagacaacggccacctgttcgccctcaggtcgctggactacgaggccctgcaggcgttcgagttccgcgtgggcgcctcagaccgcggttctccggctttgagcagcgaggcgctggtgcgcgtgctggtgctggacaccaacgacaactcgcccttcgtgctgtacccgctgcagaatggctccgcgccctgcaccgagctggtgccccgggcggccgagccgggctacctggtgaccaaggtggtggcggtggacggcgactcgggccagaacgcctggctgtcgtaccagctgctcaaggccacggagcctgggctgttcggcgtgtgggcgcacaatggcgaggtgcgcaccgccaggctgctgagcgagcgcgacgcagccaagcacaggctcgtggtgcttgtcaaggacaatggcgagcctccgcgctcggccaccgccacgctgcacgtgctcctggtggatggcttctcccagccctacctgcctctccctgaggcggccccggcccaggcccaggccgactctctcaccgtctacctggtggtggcgttggcctcggtgtcgtcgctcttcctcttctcggtgctcctgttcgtggcggtgcggctgtgcaggaggagcagggcggcctcggtgggtcgctgctcggtgcccgagggcccctttccagggcatctggtggacgtaagcggcaccgggaccctgtcccagagctaccagtacgaggtgtgtctgacaggagactctgggactggtgagttcaagttcctgaagccaatatttcctaatctcttggttcaggacaccgggagggaagttaaggaaaaccccaagttcagaaatagcttggtattcagttaagtattgtatttagttcagtgaaccgcccgttagttttgtcaaacttcccactgcaatgcctttatttaaaaaaattgtctacttatctaaatattcataccacaatttcaaacctactcatgtccctgataaagctaaatttgtcccttttttattgttattaattgcacttaacatttttagttatactggatattgagtatggattttctctatatttgatctattggtgattaatctttttgtaatcataaattactcaattaggataaaaataaattatgttttaatgaaattcttaaattaacatctttttaatggaacatttaagtgaatatatgaatattgaatttctaaatatttgttgtgcctgtctttaccatgtaacttaatgtttgcaaggccagagtgtttgaaagttttgtatttaactttataattaccttgtcctttctggttgactatactaggctaagccctcttaatagccatgagtgtaaaatttagtttactcatttttcacaaattgtatataaacatgcacttcactacattggtaatacactaaaattgtggtccttttcctcttgtgaccaccacatgtctagtgattattttgtttatttggttgctacttacctagcacattgtaatgttccatgaatgctaatattaaattttgtaaaaataacttatttataaataatttttaaagagaaaaatctcatataatttgtcataacctttcaataaataaaactgttaaatcatggcctgatatcatcttaaaaaaaaatctcagaatctgaaataagccctaaatttctccccaaaatcaagactcttgagagcatcataggtctccttgtgctaccttttactccctataaatagaaatccaagtatactttaatatgtgtatattttttggttttcctacagcttctccccatctttcaaaagaatcacgaaatttcttctgcaccttggctattctgtttaaatctgataatcagttgatctcaggtttttcactgtacattactttgcagatatggacagcctttacaaaaataatttttaaatgcttaattattttaatttgttctttaaggtaaccttcagttattttgaattaatttaacttctcaattatgccaaagttgcacttgcatgaaataaatattattttgtccttgtatagactggaacagtaataaatttatctgaatt

SEQ ID NO: 24887 - DNA, 2904 bp, Homo sapiens
  source 1..2904: mol_type = unassigned DNA
agtgggctctgcggataactcagacgccattaagctggggaatccaaactctaaaagaaggacgcattttaggtaagatctagtggctagatcttcagggtgggcttcgttcttgtggaaatcagtcaagaaagatcggattcgcggttatttatgcaaatcatctgggtggattgtgtacggagttaaactgcgccttctggaccgggtctgaacaatggagactgcgctagcaaaaacgccacagaaaaggcaagttatgtttcttgctatattgttgcttttgtgggaggctggctctgaggcagttaggtattccataccagaagaaacagaaagtggctattctgtggccaacctggcaaaagacctgggtcttggggtgggggaactggccactcggggcgcgcgaatgcattacaaaggaaacaaagagctcttgcagcttgatataaagaccggcaatttgcttctatatgaaaaactagaccgggaggtgatgtgcggggcgacagaaccctgtatattgcatttccagctcttactagaaaatccagtgcagttttttcaaactgatctgcagctcacagatataaatgaccatgccccagagttcccagagaaggaaatgctcctaaaaatcccagagagcacccagccagggactgtgtttcccttaaaaatagcccaggactttgacataggtagcaacactgttcagaactacacaatcagcccaaattcacactttcatgttgctacgcataatcgcggagatggcagaaaatacccagagctggtgctggacaaagcgctggaccgggaggagcggcctgagctcagcttaacactcactgcactggacggtggggctccgcccaggtccgggaccaccacaattcgcattgtcgtcttggataataatgacaacgcccccgaatttttacaatcattctatgaggtacaggtgcccgagaacagcccccttaactccttagttgtcgttgtctccgctcgagatttagatgcaggagcatatgggagtgtagcctatgctctattccaaggcgatgaagttactcaaccatttgtaatagacgagaaaacagcagaaattcgcctgaaaagggcattggatttcgaggcaactccatattataacgtggaaattgtagccacagatggtgggggcctttcaggaaaatgcactgtggctatagaagtggtggatgtgaatgacaacgcccctgaactcaccatgtctacgctctccagccctaccccagaaaatgccccggaaactgtagttgccgttttcagtgtttctgatccagactccggggacaacggtaggatgatttgctccatccagaatgatctcccctttcttttgaagcccacattaaaaaacttttacaccctagtgacacagagaacactggacagagagagccaagccgagtacaacatcaccatcactgtcaccgacatggggacacccaggctgaaaaccgagcacaacataacggtcctggtctccgacgtcaatgacaacgcccccgccttcacccaaacctcctacaccctgttcgtccgagagaacaacagccccgccctgcacatcggcagtgtcagcgccacagacagagactcaggcaccaacgcccaggtcacctactcgctgctgccgccccagaacccacacctgcgcctcgcctccctggtctccatcaacgcggacaacggccacctgtttgccctcaggtcgctggactacgaggccctgcaggcgttcgagttccgcgtgggagccacagaccgcggctccccggcgctgagcagcgaggcgctggtgcgcgtgctggtgctggacgccaacgacaactcgcccttcgtgctgtatccgctgcagaacggctcggcgccttgcaccgagctggtgccccgggcggccgagccgggctacctggtgaccaaggtggtggcggtggacggcgactcgggccagaacgcctggctgtcgtaccagctgctcaaggccacggagcccgggctgttcagcatgtgggcgcacaatggcgaggtgcgcaccgccaggctgctgagcgagcgcgacgcggccaagcacaggctggtggtgctggtcaaggacaatggcgagcctccgcgctcggccaccgccacgctgcacgtgctcctggtggacggcttctcccagccctacctgccgctgccggaggcggccccggcccaggcccaggccgactcgctcactgtctacctggtggtggcattggcctcggtgtcgtcgctcttcctcttttcggtgctcctgttcgtggcagtgcggctgtgcaggaggagcagggcggcctcggtcggtcgctgctcggtgcccgagggcccctttccagggcatctggtggacgtgagcggcaccgggaccctatcccagagctaccactacgaggtgtgtttgaccggagactcaggggccggcgagttcaagttcctgaagccgattattcctaaccttttgccccagggcgctggtgaagaaatagggaaaactgctgccttccggaatagctttggattaaattagagatctcgtgatgacgcgttgttttctgccatttatcccaaactttttcagatctagaattcgagagtgtcatggacaaaaatttcaccttgagattgagcttttatttccctttttaatggatttgtctgttgaacttcatgctgtccaagtgttgaaaagtcaattttatttcattgcatttatttacatagtgtcattccaaatccatgcatgctgttgattttcctgagatttttttctcttcttgttggtatttgttgtgataaaccaccttaataaaatcaagtattaatttt

SEQ ID NO: 24888 - DNA, 1107 bp, Homo sapiens
  source 1..1107: mol_type = unassigned DNA
ggtggggctccgcccaggtccgggaccaccacaattcgcattgtcgtcttggataataatgacaacgcccccgaatttttacaatcattctatgaggtacaggtgcccgagaacagcccccttaactccttagttgtcgttgtctccgctcgagatttagatgcaggagcatatgggagtgtagcctatgctctattccaaggcgatgaagttactcaaccatttgtaatagacgagaaaacagcagaaattcgcctgaaaagggcattggatttcgaggcaactccatattataacgtggaaattgtagccacagatggtgggggcctttcaggaaaatgcactgtggctatagaagtggtggatgtgaatgacaacgcccctgaactcaccatgtctacgctctccagccctaccccagaaaatgccccggaaactgtagttgccgttttcagtgtttctgatccagactccggggacaacggtaggatgatttgctccatccagaatgatctcccctttcttttgaagcccacattaaaaaacttttacaccctagtgacacagagaacactggacagagagagccaagccgagtacaacatcaccatcactgtcaccgacatggggacacccaggctgaaaaccgagcacaacataacggtcctggtctccgacgtcaatgacaacgcccccgccttcacccaaacctcctacaccctgttcgtccgagagaacaacagccccgccctgcacatcggcagtgtcagcgccacagacagagactcaggcaccaacgcccaggtcacctactcgctgctgccgccccagaacccacacctgcgcctcgcctccctggtctccatcaacgcggacaacggccacctgtttgccctcaggtcgctggactacgaggccctgcaggcgttcgagttccgcgtgggagccacagaccgcggctccccggcgctgagcagcgaggcgctggtgcgcgtgctgtgctggacgccaacgacaactcgcccttcgtgctgtatccgctgcagaacggctcggcgccttgcaccgagctggtgccccgggcggccgagccgggctacctggtga

SEQ ID NO: 24889 - DNA, 3030 bp, Homo sapiens
  source 1..3030: mol_type = unassigned DNA
atgatgcaaactaaagtacagaacaagaaaaggcaagtggctttcttcattttattgatgctttggggagaggtgggttctgaatcgattcagtattccgtattggaggagacagaaagtggcacgtttgtggccaacttgacaaaggacctgggactgagggtgggggagctggcttcgcggggcgctcgggttgttttcaaagggaacagacaacatttgcagtttgatccacagacccatgatttactgctaaatgaaaaactggaccgggaggagctgtgtggctccactgagccgtgtgtgctacctttccaagtgttactggaaaaccccttgcagttttttcaggcttccttgcgagtcagagatataaatgaccacgccccggaattccctgccagagaaatgctcctgaaaatatcagaaattactatgccaggaaagatatttcctttgaaaatggcacacgatttagacaccggcagcaacggccttcagaggtacacaatcagctccaaccctcacttccacgttctcacccgcaatcgcagcgaaggcaggaagttcccggagctggtgctagacaaaccgttggaccgcgaggagcagccccaactcaggctaacgctgatcgcgctggatggcgggtctccgccccggtcagggacctccgagattcagatccaggttttggacatcaatgacaacgtccccgagtttgctcaggagctctatgaagcacaagtccctgagaacaaccccctcggctctctggttattaccgtctcagccagagatttagatgcaggatcgtttgggaaggtatcttacgccctgtttcaagtcgatgacgtcaaccaacccttcgaaataaacgcaatcacaggagaaattcggctgagaaaggctttggattttgaggaaattcagtcttatgacgtggatgttgaggctacagatggtggaggcctatcaggaaaatgctctttagtcgtcagggtcctggacgtgaatgacaatgcccctgaactcaccatgtcgttcttcatcagcctcatcccagaaaacttaccagagatcacagtggcagttttcagtgtttcagatgcagactctggacataaccaacaggttatttgttcaatagagaacaatctcccctttctactaagaccttccgtggagaatttctacaccctggtaacagaaggcgcgctggacagagagagcagagccgagtacaacatcactatcacggtcactgatttggggacaccaaggctgaaaacccagcagagcataactgtgcaggtctccgacgtcaatgacaacgtccccgccttcacccaaacctcctacaccctgttcgtccgcgagaacaacagccccgccctgcacatcggcagcgtcagcgccacagacagagactcaggcatcaacgcccaggtcacctactcgctgctgccgccccaggacccgcacctgcccctctcttccctggtctccatcaacgcggacaacggccacctgtttgccctcaggtcgctggactacgaggccctgcagtctttcgagttccgcgtgggcgccacagaccgcggctccccggcgttgagcagcgaggcgctggtgcgcttgctggtgctggacgccaacgacaactcgcccttcgtgttgtacccgctgcagaacggctccgcgccctgcaccgagctggtgccccgggcggccgagccgggctacctggtgaccaaggtggtggcggtggacggcgactcgggccagaacgcctggctgtcgtaccagctgctcaaggccacggagctcggtctgttcggcgtgtgggcgcacaatggcgaggtgcgcaccgccaggctgctgagcgagcgagacgcagccaagcacaggctggtggtgcttgtcaaggacaatggcgagcctccgcgctcggccaccgccacgctgcacgtgctcctggtggacggcttctcccagccctacctgcctctccctgaggcggccccggcccaagcccaggccgactctctcaccgtctacctggtggtggcgttggcctcggtgtcgtcgctcttcctcttttcggtgctcctgttcgtggcggtgcggctgtgcaggaggagcagggcggcctcggtgggtcgctactcggtgcccgagggtccctttccagggcatctggtggatgtgagcggcaccgggaccctatcccagagctaccagtacaaggtgtgtctgacgggaggctcagaaacaaatgagttcaagttcctgaagccgattatgcccaacttccctcctcagggcactgagagagaaatggaagaaacccccacctctcggaatagcttcccgttcagttaagtgtgggattattttactaaatcttacttatgtttggagatctcttttaacttaaagttacatggtctgtttcttgtttattttacctctattctttaggttgaaattttatataaagtaagatactggtatcttagtatttcctgttcatgcttagtagtttattacttcacttgagggtacttgacaatatgaacaaaaagtaaatttttatttgcataattttaagcttttgaaattaaattatctattcttcccccccccaaaaaaaagtattgtaaatccttaagtaaaattgtatttctagctattggtaagagttgtttcactattgctatgtaggactgtttaaaatgtgagtatctgatattatttaatcctccaatgtctcattttgcagtaactcctacagtgtgtaacactaaaaataagaactaatgatggctaaacactaaagtagccattcatacttatgcatattttagtatcccataatagtcaatccaaaatttttgtgactatagactttactgaagtgtcaacacattagtttgtgagcctcatgtaagaacatgatggtctttttttaaaaaaaaagtcgtgccaattataagtgcttaataaatatttgctgaatgttactaa

SEQ ID NO: 24890 - DNA, 1107 bp, Homo sapiens
  source 1..1107: mol_type = unassigned DNA
ggcgggtctccgccccggtcagggacctccgagattcagatccaggttttggacatcaatgacaacgtccccgagtttgctcaggagctctatgaagcacaagtccctgagaacaaccccctcggctctctggttattaccgtctcagccagagatttagatgcaggatcgtttgggaaggtatcttacgccctgtttcaagtcgatgacgtcaaccaacccttcgaaataaacgcaatcacaggagaaattcggctgagaaaggctttggattttgaggaaattcagtcttatgacgtggatgttgaggctacagatggtggaggcctatcaggaaaatgctctttagtcgtcagggtcctggacgtgaatgacaatgcccctgaactcaccatgtcgttcttcatcagcctcatcccagaaaacttaccagagatcacagtggcagttttcagtgtttcagatgcagactctggacataaccaacaggttatttgttcaatagagaacaatctcccctttctactaagaccttccgtggagaatttctacaccctggtaacagaaggcgcgctggacagagagagcagagccgagtacaacatcactatcacggtcactgatttggggacaccaaggctgaaaacccagcagagcataactgtgcaggtctccgacgtcaatgacaacgtccccgccttcacccaaacctcctacaccctgttcgtccgcgagaacaacagccccgccctgcacatcggcagcgtcagcgccacagacagagactcaggcatcaacgcccaggtcacctactcgctgctgccgccccaggacccgcacctgcccctctcttccctggtctccatcaacgcggacaacggccacctgtttgccctcaggtcgctggactacgaggccctgcagtctttcgagttccgcgtgggcgccacagaccgcggctccccggcgttgagcagcgaggcgctggtgcgcttgctgtgctggacgccaacgacaactcgcccttcgtgttgtacccgctgcagaacggctccgcgccctgcaccgagctggtgccccgggcggccgagccgggctacctggtga

SEQ ID NO: 24891 - DNA, 2600 bp, Homo sapiens
  source 1..2600: mol_type = unassigned DNA
aaagctgagatagatgtgtccgggaaggcagtcgtcgccagacaagttgtaagaacgaatttaaaaatctctgcaaagacatccgagagggtcgacggtagatgtggtgattgggagctgaaaaggatttttcttccgtattcagacataatagacatgatgcaaactaaagtacagaacaagaaaagacccatgatttactgctaaatgaaaaactggaccgggaggagctgtgtggctccactgagccgtgtgtgctacctttccaagtgttactggaaaaccccttgcagttttttcaggcttccttgcgagtcagagatataaatgaccacgccccggaattccctgccagagaaatgctcctgaaaatatcagaaattactatgccaggaaagatatttcctttgaaaatggcacacgatttagacaccggcagcaacggccttcagaggtacacaatcagctccaaccctcacttccacgttctcacccgcaatcgcagcgaaggcaggaagttcccggagctggtgctagacaaaccgttggaccgcgaggagcagccccaactcaggctaacgctgatcgcgctggatggcgggtctccgccccggtcagggacctccgagattcagatccaggttttggacatcaatgacaacgtccccgagtttgctcaggagctctatgaagcacaagtccctgagaacaaccccctcggctctctggttattaccgtctcagccagagatttagatgcaggatcgtttgggaaggtatcttacgccctgtttcaagtcgatgacgtcaaccaacccttcgaaataaacgcaatcacaggagaaattcggctgagaaaggctttggattttgaggaaattcagtcttatgacgtggatgttgaggctacagatggtggaggcctatcaggaaaatgctctttagtcgtcagggtcctggacgtgaatgacaatgcccctgaactcaccatgtcgttcttcatcagcctcatcccagaaaacttaccagagatcacagtggcagttttcagtgtttcagatgcagactctggacataaccaacaggttatttgttcaatagagaacaatctcccctttctactaagaccttccgtggagaatttctacaccctggtaacagaaggcgcgctggacagagagagcagagccgagtacaacatcactatcacggtcactgatttggggacaccaaggctgaaaacccagcagagcataactgtgcaggtctccgacgtcaatgacaacgtccccgccttcacccaaacctcctacaccctgttcgtccgcgagaacaacagccccgccctgcacatcggcagcgtcagcgccacagacagagactcaggcatcaacgcccaggtcacctactcgctgctgccgccccaggacccgcacctgcccctctcttccctggtctccatcaacgcggacaacggccacctgtttgccctcaggtcgctggactacgaggccctgcagtctttcgagttccgcgtgggcgccacagaccgcggctccccggcgttgagcagcgaggcgctggtgcgcttgctggtgctggacgccaacgacaactcgcccttcgtgttgtacccgctgcagaacggctccgcgccctgcaccgagctggtgccccgggcggccgagccgggctacctggtgaccaaggtggtggcggtggacggcgactcgggccagaacgcctggctgtcgtaccagctgctcaaggccacggagctcggtctgttcggcgtgtgggcgcacaatggcgaggtgcgcaccgccaggctgctgagcgagcgagacgcagccaagcacaggctggtggtgcttgtcaaggacaatggcgagcctccgcgctcggccaccgccacgctgcacgtgctcctggtggacggcttctcccagccctacctgcctctccctgaggcggccccggcccaagcccaggccgactctctcaccgtctacctggtggtggcgttggcctcggtgtcgtcgctcttcctcttttcggtgctcctgttcgtggcggtgcggctgtgcaggaggagcagggcggcctcggtgggtcgctactcggtgcccgagggtccctttccagggcatctggtggatgtgagcggcaccgggaccctatcccagagctaccagtacaaggtgtgtctgacgggaggctcagaaacaaatgagttcaagttcctgaagccgattatgcccaacttccctcctcagggcactgagagagaaatggaagaaacccccacctctcggaatagcttcccgttcagttaagtgtgggattattttactaaatcttacttatgtttggagatctcttttaacttaaagttacatggtctgtttcttgtttattttacctctattctttaggttgaaattttatataaagtaagatactggtatcttagtatttcctgttcatgcttagtagtttattacttcacttgagggtacttgacaatatgaacaaaaagtaaatttttatttgcataattttaagcttttgaaattaaattatctattcttccccccccc

SEQ ID NO: 24892 - DNA, 3715 bp, Homo sapiens
  source 1..3715: mol_type = unassigned DNA
gaagagaaaagcataggaaaggaaacagtggtaataggaattggggtaaaatgaggatccttccccacaaacattgctattattcagctcatttcaaaggattccgctgctgccatttgtgagagccgctggaggctgagtgaaagtcattttgaaagactgatccaaagaagaatggaggccagagtggagcgtgctgtgcagaaaaggcaagtcttatttctttgtgtatttctgggaatgtcttgggctggcgccgaaccgcttcggtattttgtggcggaggaaaccgagagaggcacctttcttaccaacttggcaaaagacctagggttaggggtaggggaactgagagcccggggaactagaattgtttcagaccagaacatgcaaattttactgctcagttcgcttactggtgatctacttctaaatgagaaattggaccgagaggaactgtgtggccccagagagccctgtgtgctgcctttccagttgttattggaaaaaccttttcagattttccgtgctgaactatgggtcagagacatcaatgatcacgctccagtatttctagacagagagatttccttgaaaatattagaaagtaccactccaggggcggcatttctcctagagagtgcacaggattcagatgttggaaccaacagcctgagtaactacaccatcagccccaatgcctatttccatattaatgtccatgatagcggggaggggaatatctatcccgaattggtgctgaatcaagtgctggatcgggaagagataccagagttcagtttaaccctcaccgctttagacggcggctctcctccaagatcagggaccgccctcgtgcgcattctggttctagacgtaaatgacaacgcccctgattttgtgcggtcgctctacaaggtgcaggtgcccgaaaatagccccgttggttccatggttgtctccgtgtcagccagagatttagataccggaagtaatggggaaatagcctatgcattttcttacgccactgaaagaattctcaaaacgtttcaaatcaatccaacatctggcagtcttcatcttaaagcgcaattggactatgaggcaattcaaacttacacattaactattcaggccaaagacggcggcgggctttctggaaaatgcactgtagtggttgatgtaacagatataaacgataatcgacccgagctgctcctgtcttcacttactagcccaattgcagaaaactcacccgagacagtcgtggctgtttttaggattagagacagagattccgggaacaatggaaagacagtgtgctccatccaggacgatgtccccttcatcctgaagccatctgtcgaaaacttctatactctggtaacagagaaacctttggatcgagagaggaacactgagtacaacatcaccatcaccgtcaccgacttggggacacccaggctgaaaaccgagcacaacataaccgtgctggtctccgacgtcaatgacaacgctcccgccttcacccaaacctcctacaccctgtttgtccgtgagaacaacagccccgccctgcccatcggcagtgtcagcgccacagacagagactcgggcaccaacgcccaggtcatctactccctgctgccgtcccaggacccgcacctgcccctcgcctccctggtctccatcaacgcggacaacggccacctgtttgccctcaggtccctggactacgaggccctgcaggcgttcgagttccgcgtgggcgccacagaccgcggctcccccgcgctgagcagcgaggcgctggtgcgcgtgctggtgctggacgccaacgacaactcgcccttcgtgctgtacccgctgcagaacagctccgcgccctgcaccgagccgttgccccgggcggccgagccgggctacctggtgaccaaggtggtggcggtggacggcgactcgggccagaacgcctggctgtcgtaccagctgctcaaggccacggagcccgggctattcggcgtgtgggcgcacaatggcgaggtgcgtaccgccaggctgctgagcgagcgcgacgcagccaagcagaggctggtggtgctggtcaaggacaatggcgagcctccgcgctcggccaccgccacgctgcacgtgctcctggtggacggcttctcccagccctacctgcggctcccggaggcggccccggaccaggccaactcgctcaccgtctacctggtggtggcgttggcctcggtgtcttcgctcttcctcctctcggtgctcctgttcgtggcggtgcggctgtgcaggaggagcagggcggccccggtgggtcgctgctcggtgcctgagggcccctttccacgacatctggtggacttgagcggcaccgggaccctatcccagagctaccagtatgaggtgtgcctgactggaggctccgggacaaatgagttcaagtttctgaaaccaattatccccaacctgctaccccagagcacaggcagggaagtggaagaaaatcgcccatttcagaataatttgggtttctgataaagaatgtaaactaaatccgcgtctgtgaatacgtttctgattaggaacttattgcgaggttcccttaagggagtgtctttacatcatttcaaatatgtactcttgaagtcaagcaataaatttctatacataaaataggatcctgatttagtatcaagaacccttcacaaagcatgaaatgtatatgtgtaatgttttatgtcaaacaattatgcttaatatacagtctattaaatgtaagtcttgtttgagatattttaaattgctttccattgttttcaatctctactgagacttcctgagttgattagaaagctgtatgagtgtacctaccctagtctcagaagcatagactgtagagtatctttttaagcatttttaaaaaatgcttttaatgcatcatacactattttaacacttttaatctgagaagaagcatatgaggcatggtattttaggaatgaacaaatagatggtcttagagattcagtaagttcactaagttccactaactaataagtgacaaaactgagcatccatcccagatctgtctgactctgggtcagtgaccctgctccgattccatactgttttctgtcattagatatcacctggcaagtttctgcctaattaaggagaagtcttttatcatatttatactgctgtccaatcttttctatatttagaaataataatgtacatatttatctatggttttattttcttatacaccaaaagtcctgcttttctgggtcaattttcaactattattactaatgctctgatctgtccaaactcaagcggaaaacaaaattgaaagggcaacctgtgccttctcctttcttcagaacatatgactttcatttcccagaaaaaagattaatggtcctgagtaggaatattacataattttgattgcatcattagttaattattttcttcatattgtagattttctgcagtcacccatacttaacatttgtaatacattttcctgatttgaaagtttgtttttaaaagttttctattaattatagtgcactattgaatcaggaaaatttaagaaaaagaatagttagttttaaatgcataatatcaaagagaatcatagatgatcattaaatttttagaaattctcggaagttaaggagaagca

SEQ ID NO: 24893 - DNA, 1107 bp, Homo sapiens
  source 1..1107: mol_type = unassigned DNA
ggctctcctccaagatcagggaccgccctcgtgcgcattctggttctagacgtaaatgacaacgcccctgattttgtgcggtcgctctacaaggtgcaggtgcccgaaaatagccccgttggttccatggttgtctccgtgtcagccagagatttagataccggaagtaatggggaaatagcctatgcattttcttacgccactgaaagaattctcaaaacgtttcaaatcaatccaacatctggcagtcttcatcttaaagcgcaattggactatgaggcaattcaaacttacacattaactattcaggccaaagacggcggcgggctttctggaaaatgcactgtagtggttgatgtaacagatataaacgataatcgacccgagctgctcctgtcttcacttactagcccaattgcagaaaactcacccgagacagtcgtggctgtttttaggattagagacagagattccgggaacaatggaaagacagtgtgctccatccaggacgatgtccccttcatcctgaagccatctgtcgaaaacttctatactctggtaacagagaaacctttggatcgagagaggaacactgagtacaacatcaccatcaccgtcaccgacttggggacacccaggctgaaaaccgagcacaacataaccgtgctggtctccgacgtcaatgacaacgctcccgccttcacccaaacctcctacaccctgtttgtccgtgagaacaacagccccgccctgcccatcggcagtgtcagcgccacagacagagactcgggcaccaacgcccaggtcatctactccctgctgccgtcccaggacccgcacctgcccctcgcctccctggtctccatcaacgcggacaacggccacctgtttgccctcaggtccctggactacgaggccctgcaggcgttcgagttccgcgtgggcgccacagaccgcggctcccccgcgctgagcagcgaggcgctggtgcgcgtgctgtgctggacgccaacgacaactcgcccttcgtgctgtacccgctgcagaacagctccgcgccctgcaccgagccgttgccccgggcggccgagccgggctacctggtga

SEQ ID NO: 24894 - DNA, 2711 bp, Homo sapiens
  source 1..2711: mol_type = unassigned DNA
tggcgctgcaggataagaaggcacaaaccagaaccgcagctgcagctccattaaccggcaaaaagcagcagaacctggaagtccacggggagcttggatgccaaagggaggacggctgggtcctctggagaggactactcactggcatatttctgaggtatctgtagaaaaccacagcctcagatactggggactttacagtcccacagaaccgtcctcccaggaagctgaattcagcaagaacaatggaggccagcgggaagctcatttgcagacaaaggcaagtccttttttcctttctccttttgggcttatctctggcgggcgcggcggaacctagaagctattctgtggtggaggaaactgagggcagctcctttgtcaccaatttagcaaaggacctgggtctggagcagagggaattctccaggcggggggttagggttgtttccagagggaacaaactacatttgcagctcaatcaggagaccgcggatttgttgctaaatgagaaattggaccgtgaggatctgtgcggtcacacagagccctgtgtgctacgtttccaagtgttgctagagagtcccttcgagttttttcaagctgagctgcaagtaatagacataaacgaccactctccagtatttctggacaaacaaatgttggtgaaagtatcagagagcagtcctcctgggactgcgtttcctctgaagaatgctgaagacttagatataggccaaaacaatattgagaactatataatcagccccaactcctattttcgggtcctcacccgcaaacgcagtgatggcaggaaatacccagagctggtgctggacaaagcgctggaccgagaggaagaagctgagctcaggttaacactcacagcactggatggtggctctccgcccagatctggcactgctcaggtctacattgaagttgtcgatgtcaatgataatgcccctgaatttgagcagcctttctatagggtgcagatctctgaggacagtccaataagcttcctggttgtgaaggtctctgccacggatgtagacacaggagtcaacggagagatttcctattcacttttccaagcttcagatgagataagcaaaacttttaaggtcgatttcttgacaggagaaattcgactaaagaaacaacttgatttcgaaaaatttcagtcctatgaagtcaatatcgaggcgagagatgctggaggcttttctggaaaatgcaccgttctgattcaagtgatagatgtgaacgaccatgccccagaagttaccatgtctgcatttaccagcccaatacctgagaatgcgcctgaaactgtggttgcacttttcagtgtttcagaccttgattcaggagaaaatgggaaaataagttgctccattcaggaggatctacccttcctcctgaaatcttctgtggggaacttttacaccctactaacagagacaccactagacagagaaagcagagccgagtacaacgtcactatcaccgtcactgacttagggacacccaggctgacaacacatctcaatatgaccgtgctggtgtcggacgtcaatgacaacgcccccgccttcacccaaacctcctacaccctgttcgtccgcgagaacaacagccccgccctgcacatcggcagcgtcagcgccacagacagagactcgggcaccaacgcccaggtcacctactcgctgctgccgccccaggatccgcacctgcccctcgcctccctggtctccatcaacacagacaacggccacctgttcgccctcaggtcgctggactacgaggccctgcaggcgttcgagttccgggtgggcgcttcagaccgcggctccccggctttgagcagcgaggcgctggtgcgcgtgctggtgctggacgccaacgacaactcgcccttcgtgctgtacccgctgcagaatggctccgcgccctgcaccgagctggtgccccgggcggccgagccgggctacctggtgaccaaggtggtggcggtggacggcgactcgggccagaacgcctggctgtcgtaccagctgctcaaggccacggagcccgggctgttcggtgtgtgggcgcacaatggcgaggtgcgcaccgccaggctgctgagcgagcgcgacgcggccaagcagaggctggtggtgctggtcaaggacaatggcgagcctccgtgctcggccaccgccacgctgcacttgctcctggtggacggcttctcccagccctacctgccgcttccggaggctgccccagcccagggccaggccgactctctcaccgtctacctggtggtggcgttggcctcggtgtcttcgctcttcctcttctcggtgctcctgttcgtggcggtgctgctgtgtaggaggagcagggcggcctcggtgggtcgctgctcagtgcctgagggcccctttccagggcatctggtggacgtgaggggcaccgggagcctgtctcagaactatcagtacgaggtgtgcctggcaggaggctcagggacgaatgagttccagttcctgaaaccagtattacctaatattcagggccattcttttgggccagaaatggaacaaaactctaactttaggaatggctttggtttcagccttcagttaaagtaattgatttcatattatatattttaatttttatgatcaattcaaaggaatggttttctgtca

SEQ ID NO: 24895 - DNA, 2472 bp, Homo sapiens
  source 1..2472: mol_type = unassigned DNA
atgaagattcagaaaaagctgactggctgcagcaggctgatgcttctgtgtctttctctggagctgctgttggaagctggggctgggaatattcactactcagtgccggaagagacagacaaaggttccttcgtaggcaacatcgccaaggacctagggctgcaaccccaggagctggcagatggcggagtccgcatcgtctccagaggtaggatgccgcttttcgctctgaatcctagaagtggcagcttgatcaccgcgcgcaggatagaccgggaggagctctgcgctcagagcatgccgtgtctcgtgagttttaatatccttgttgaggataaaatgaagctttttcctgttgaagtagaaataattgatattaatgacaacactccccaattccagttagaggaactggagtttaaaatgaatgaaataacgactccaggtaccagagtctcattgccttttgggcaagaccttgatgtgggtatgaactcactccagagctaccaactcagctctaaccctcatttctccctggatgtgcaacagggagccgatgggcctcaacatccagagatggtgctgcagagtcccttagacagagaagaagaagctgtccaccacctcatcctcacagcttctgatgggggtgaaccagtccgttcagggaccctcagaatttacattcaggtggtggatgcaaatgacaatcctccagcatttactcaggcacaataccatataaatgtccccgaaaacgtgccgctgggtactcagctgctcatggtaaatgccactgaccctgatgagggagccaatggggaagtaacgtactcctttcacaatgtagaccacagagtggcccaaatatttcgtttagattcttacacaggagaaatatcaaataaagaaccactagatttcgaagaatacaaaatgtattcaatggaagttcaagcccaggatggtgcggggctcatggctaaagttaaggtactgatcaaagttttggatgtaaatgataatgccccagaagtgaccatcacctctgtcaccactgcagttccagaaaactttcctcctgggaccataattgctcttatcagtgtgcatgaccaggactcaggagacaatggctacaccacatgtttcattcctggaaatttaccctttaaattggaaaagttagttgataattattaccgtttagtgactgaaagaacactggacagagaacttatctctgggtacaacatcacaataacagcaatagaccaaggaactccagctctatctactgaaactcacatttcactactagtgacagatatcaatgacaactccccagtcttccatcaggactcctactctgcctacattcccgaaaacaaccccagaggagcctccatcttctctgtgagggcccacgacttggacagcaatgagaatgcacaaatcacttactccctaatagaggacactatccagggggcacccctatctgcctacctctccatcaactccgacactggggtcctgtatgcgctgcgatccttcgactatgagcagttccgggacatgcaactgaaagtgatggcgcgggacagtggggatccgcccctcagcagcaacgtgtctctcagcctattcctgctggaccagaacgacaacgcgcccgagatcctgtaccccgccctccccacagatggttctaccggcgtggagctggcgcccctctccgcagagcccggctacctggtgaccaaggtggtggcggtggacagagactcgggccagaacgcctggctgtcctaccgcctgctcaaggccagcgagccgggactcttctcggtgggtctgcacacgggcgaggtgcgcacggcgcgagccctgctggacagagacgcgctcaagcagagtctcgtggtggccgtccaggaccacggccagcccccgctctccgccactgtcacgctcaccgtggccgtggccgacaggatctccgacatcctggccgacctgggcagcctcgagccctccgccaaacccaacgattcggacctcactctgtacctggtggtggcggcggccgcggtctcctgcgtcttcctggccttcgtcatcgtgctgctggcgcacaggctgcggcgctggcacaagtcacgtctgctacaggcttcgggaggcggcttagcgagcatgcccggttcgcactttgtgggcgtggacggggttcgggctttcctgcagacctattcccacgaggtctccctcactgcggactcgcggaagagccacctgattttcccccagcccaactatgcggacacactcatcagccaggagagctgtgagaaaaagggttttctatcagcaccccagtctttacttgaagacaaaaaggaaccattttctcaggtaaacttttgtgatgaatgtatcagctatctagagaaaaataattcttga

SEQ ID NO: 24896 - DNA, 4602 bp, Homo sapiens
  source 1..4602: mol_type = unassigned DNA
atgaagattcagaaaaagctgactggctgcagcaggctgatgcttctgtgtctttctctggagctgctgttggaagctggggctgggaatattcactactcagtgccggaagagacagacaaaggttccttcgtaggcaacatcgccaaggacctagggctgcaaccccaggagctggcagatggcggagtccgcatcgtctccagaggtaggatgccgcttttcgctctgaatcctagaagtggcagcttgatcaccgcgcgcaggatagaccgggaggagctctgcgctcagagcatgccgtgtctcgtgagttttaatatccttgttgaggataaaatgaagctttttcctgttgaagtagaaataattgatattaatgacaacactccccaattccagttagaggaactggagtttaaaatgaatgaaataacgactccaggtaccagagtctcattgccttttgggcaagaccttgatgtgggtatgaactcactccagagctaccaactcagctctaaccctcatttctccctggatgtgcaacagggagccgatgggcctcaacatccagagatggtgctgcagagtcccttagacagagaagaagaagctgtccaccacctcatcctcacagcttctgatgggggtgaaccagtccgttcagggaccctcagaatttacattcaggtggtggatgcaaatgacaatcctccagcatttactcaggcacaataccatataaatgtccccgaaaacgtgccgctgggtactcagctgctcatggtaaatgccactgaccctgatgagggagccaatggggaagtaacgtactcctttcacaatgtagaccacagagtggcccaaatatttcgtttagattcttacacaggagaaatatcaaataaagaaccactagatttcgaagaatacaaaatgtattcaatggaagttcaagcccaggatggtgcggggctcatggctaaagttaaggtactgatcaaagttttggatgtaaatgataatgccccagaagtgaccatcacctctgtcaccactgcagttccagaaaactttcctcctgggaccataattgctcttatcagtgtgcatgaccaggactcaggagacaatggctacaccacatgtttcattcctggaaatttaccctttaaattggaaaagttagttgataattattaccgtttagtgactgaaagaacactggacagagaacttatctctgggtacaacatcacaataacagcaatagaccaaggaactccagctctatctactgaaactcacatttcactactagtgacagatatcaatgacaactccccagtcttccatcaggactcctactctgcctacattcccgaaaacaaccccagaggagcctccatcttctctgtgagggcccacgacttggacagcaatgagaatgcacaaatcacttactccctaatagaggacactatccagggggcacccctatctgcctacctctccatcaactccgacactggggtcctgtatgcgctgcgatccttcgactatgagcagttccgggacatgcaactgaaagtgatggcgcgggacagtggggatccgcccctcagcagcaacgtgtctctcagcctattcctgctggaccagaacgacaacgcgcccgagatcctgtaccccgccctccccacagatggttctaccggcgtggagctggcgcccctctccgcagagcccggctacctggtgaccaaggtggtggcggtggacagagactcgggccagaacgcctggctgtcctaccgcctgctcaaggccagcgagccgggactcttctcggtgggtctgcacacgggcgaggtgcgcacggcgcgagccctgctggacagagacgcgctcaagcagagtctcgtggtggccgtccaggaccacggccagcccccgctctccgccactgtcacgctcaccgtggccgtggccgacaggatctccgacatcctggccgacctgggcagcctcgagccctccgccaaacccaacgattcggacctcactctgtacctggtggtggcggcggccgcggtctcctgcgtcttcctggccttcgtcatcgtgctgctggcgcacaggctgcggcgctggcacaagtcacgtctgctacaggcttcgggaggcggcttagcgagcatgcccggttcgcactttgtgggcgtggacggggttcgggctttcctgcagacctattcccacgaggtctccctcactgcggactcgcggaagagccacctgattttcccccagcccaactatgcggacacactcatcagccaggagagctgtgagaaaaagggttttctatcagcaccccagtctttacttgaagacaaaaaggaaccattttctcagcaagccccgcccaacacggactggcgtttctctcaggcccagagacccggcaccagcggctcccaaaatggcgatgacaccggcacctggcccaacaaccagtttgacacagagatgctgcaagccatgatcttggcgtccgccagtgaagctgctgatgggagctccaccctgggagggggtgccggcaccatgggattgagcgcccgctacggaccccagttcaccctgcagcacgtgcccgactaccgccagaatgtctacatcccaggcagcaatgccacactgaccaacgcagctggcaagcgggatggcaaggccccagcaggtggcaatggcaacaagaagaagtcgggcaagaaggagaagaagtaacatggaggccaggccaagagccacagggcggcctctccccaaccagcccagcttctccttacctgcacccaggcctcagagtttcagggctaacccccagaatactggtaggggccaaggccatgctccccttgggaaacagaaacaagtgcccagtcagcacctaccccttcccccccagggggttgaatatgcaaaagcagttccgctgggaacccccatccaatcaactgctgtacccatgggggtagtggggttactgtagacaccaagaaccatttgccacaccccgtttagttacagctgaactcctccatcttccaaatcaatcaggcccatccatcccatgcctccctcctccccaccccactccaacagttcctctttcccgagtaaggtggttggggtgttgaagtaccaagtaacctacaagcctcctagttctgaaaagttggaagggcatcatgacctcttggcctctcctttgattctcaatcttcccccaaagcatggtttggtgccagccccttcacctccttccagagcccaagatcaatgctcaagttttggaggacatgatcaccatccccatggtactgatgcttgctggatttagggagggcattttgctaccaagcctcttcccaacgccctggggaccagtcttctgttttgtttttcattgtttgacgtttccactgcatgccttgacttcccccacctcctcctcaaacaagagactccactgcatgttccaagacagtatggggtggtaagataaggaagggaagtgtgtggatgtggatggtgggggcatggacaaagcttgacacatcaagttatcaaggccttggaggaggctctgtatgtcctcaggggactgacaacatcctccagattccagccataaaccaataactaggctggacccttcccactacataatagggctcagcccaggcagccagctttgggctgagctaacaggaccaatggattaaactggcatttcagtccaaggaagctcgaagcaggtttaggaccaggtccccttgagaggtcagaggggcctctgtgggtgctgggtactccagaggtgccactggtggaagggtcagcggagccccagcaggaagggtgggccagccaggccattcttagtccctgggttggggaggcagggagctagggcagggaccaaatgaacagaaagtctcagcccaggatggggcttcttcaacagggcccctgccctcctgaagcctcagtccttcaccttgccaggtgccgtttctcttccgtgaaggccactgcccaggtccccagtgcgccccctagtggccatagcctggttaaagttccccagtgcctccttgtgcatagaccttcttctcccacccccttctgcccctgggtccccggccatccagcggggctgccagagaaccccagacctgcccttacagtagtgtagcgccccctccctctttcggctggtgtagaatagccagtagtgtagtgcggtgtgcttttacgtgatggcgggtgggcagcgggcggcgggctccgcgcagccgtctgtccttgatctgcccgcggcggcccgtgttgtgttttgtgctgtgtccacgcgctaaggcgaccccctcccccgtactgacttctcctataagcgcttctcttcgcatagtcacgtagctcccaccccaccctcttcctgtgtctcacgcaagttttatactctaatatttatatggctttttttcttcgacaaaaaaataataaaacgtttcttctgaaaagctg

SEQ ID NO: 24897 - DNA, 4617 bp, Homo sapiens
  source 1..4617: mol_type = unassigned DNA
atggccgctcaaaggaatcgctcaaaggaatcaaaggattgcagcgggctggtcctgctctgccttttcttcgggattccatgggaggctggagcccggcagatctcctactcaattcctgaggaattagagaaaggctctttcgtgggcaacatctccaaggacttgggtctggcgccccgggagctggcggagcgcggagtccgcatagtctccagaggtaggacgcagcttttctctctgaacccgcgcagcggcagcttgatcaccgcgggcaggatagaccgggaggagctctgcgctcagagcgcgcggtgcgtggtgagttttaatatccttgtggaagacagggtgaaactttttgggatagaaatagaagtaactgatatcaatgacaatgctccaaaattccaagcagaaaatctagacgtaaaaattaatgaaaatgtcgctgcgggaatgcgttttcctctcccggaagctattgatccggatgtgggcgtgaactccctgcagagctatcagctcagccccaataagcacttctccctaagagttcagagccgtgccaatggcgtcaagtacccggagctggtactggagcactccctagatcgcgaggaagaggccattcaccacctggtcctcaccgcctccgacgggggtgaccctctccgatctggcactgtccttgtcagtgtgactgtcttcgatgcaaatgacaacgcgccggtcttcaccttgccagaataccgagtgagtgttcctgagaatttgcctgtgggcactcagctgctgacagtcacagccaccgacagggacgaaggtgccaatggagaagtgacatattcattccgaaaattacctgacacgcaattgttgaagttccaactaaacaaatatactggagaaataaaaatatcagaaaatctagattatgaagaaaccggtttctatgaaatagaaatacaagcagaagatggaggagcatatcttgcaactgcaaaagtgttgattacagtagaagatgtaaatgacaacagtccagagctgaccatcacgtctctatttagtccagtgactgaagattcacctctgggaacagtcgtagcccttttaaatgtgcatgatttagactctgagcagaatggacaggtaacctgttccattttggcgtatctaccatttaaattagaaaagtccattgacagttattacagattggtgatacacagagcccttgacagggaacaggtatcctcttacaatatcacagtgacagccacagatgggggaagtcctcctctatcaacggaagctcactttatgctacaagtggcagatatcaatgacaacccacctaccttctctcaagtctcctactttacctatatcccagagaacaacgccaggggtgcctccatcttctcagtgacagcgctggacccggacagcaaagagaatgcccagattatttactccctggctgaagacaccatccagggggtacctctgtcctcatacatatccatcaactcagacactggcgtcctgtatgcactcagatccttcgactatgagcagtttcatgagctacagatgcaggtgacagccagcgacagcggggatcctccactcagcagcaacgtgtcgttgagcctgtttgtgctggaccagaacgacaatgcgcccgagatcctgtaccccgccctccccacagacggttccacaggcgtggagctggcgccccgctccgcagagcccggctacctggtgaccaaggtggtggcggtggacagagactccggccagaacgcctggctgtcctaccgtctgctcaaggccagcgagccgggactcttcgcggtgggggagcacacgggcgaggtgcgcacggcgcgagccctgctggacagagacgcgctcaagcaaagcctcgtagtggccgtccaggaccacggccagccccctctctccgccactgtcacgctcaccgtggccgtggccgacagcatcccccaagtcctggcggacctcggcagcttcgagtctccagctaactctgaaacctcagacctcactctgtacctggtggtagcggtggccgcggtctcctgcgtcttcctggccttcgtcatcgtgctgctggcgcacaggctgcggcgctggcacaagtcacgcctgctgcaggcttcaggaggcggcttgacaggtgtgtccggctcgcactttgtgggcgtggacggggttcgggctttcctgcagacctattcccacgaggtctctctcaccgcggactcgcgaaagagtcacctgatcttcccccagcccaattatgcggacacgctcatcagccaggagagctgtgagaaaaacgatcctttgtctttgttagatgattcgaagtttcctatagaggataccccattggttccacaagccccgcccaacacggactggcgtttctctcaggcccagagacccggcaccagcggctcccaaaatggcgatgacaccggcacctggcccaacaaccagtttgacacagagatgctgcaagccatgatcttggcgtccgccagtgaagctgctgatgggagctccaccctgggagggggtgccggcaccatgggattgagcgcccgctacggaccccagttcaccctgcagcacgtgcccgactaccgccagaatgtctacatcccaggcagcaatgccacactgaccaacgcagctggcaagcgggatggcaaggccccagcaggtggcaatggcaacaagaagaagtcgggcaagaaggagaagaagtaacatggaggccaggccaagagccacagggcggcctctccccaaccagcccagcttctccttacctgcacccaggcctcagagtttcagggctaacccccagaatactggtaggggccaaggccatgctccccttgggaaacagaaacaagtgcccagtcagcacctaccccttcccccccagggggttgaatatgcaaaagcagttccgctgggaacccccatccaatcaactgctgtacccatgggggtagtggggttactgtagacaccaagaaccatttgccacaccccgtttagttacagctgaactcctccatcttccaaatcaatcaggcccatccatcccatgcctccctcctccccaccccactccaacagttcctctttcccgagtaaggtggttggggtgttgaagtaccaagtaacctacaagcctcctagttctgaaaagttggaagggcatcatgacctcttggcctctcctttgattctcaatcttcccccaaagcatggtttggtgccagccccttcacctccttccagagcccaagatcaatgctcaagttttggaggacatgatcaccatccccatggtactgatgcttgctggatttagggagggcattttgctaccaagcctcttcccaacgccctggggaccagtcttctgttttgtttttcattgtttgacgtttccactgcatgccttgacttcccccacctcctcctcaaacaagagactccactgcatgttccaagacagtatggggtggtaagataaggaagggaagtgtgtggatgtggatggtgggggcatggacaaagcttgacacatcaagttatcaaggccttggaggaggctctgtatgtcctcaggggactgacaacatcctccagattccagccataaaccaataactaggctggacccttcccactacataatagggctcagcccaggcagccagctttgggctgagctaacaggaccaatggattaaactggcatttcagtccaaggaagctcgaagcaggtttaggaccaggtccccttgagaggtcagaggggcctctgtgggtgctgggtactccagaggtgccactggtggaagggtcagcggagccccagcaggaagggtgggccagccaggccattcttagtccctgggttggggaggcagggagctagggcagggaccaaatgaacagaaagtctcagcccaggatggggcttcttcaacagggcccctgccctcctgaagcctcagtccttcaccttgccaggtgccgtttctcttccgtgaaggccactgcccaggtccccagtgcgccccctagtggccatagcctggttaaagttccccagtgcctccttgtgcatagaccttcttctcccacccccttctgcccctgggtccccggccatccagcggggctgccagagaaccccagacctgcccttacagtagtgtagcgccccctccctctttcggctggtgtagaatagccagtagtgtagtgcggtgtgcttttacgtgatggcgggtgggcagcgggcggcgggctccgcgcagccgtctgtccttgatctgcccgcggcggcccgtgttgtgttttgtgctgtgtccacgcgctaaggcgaccccctcccccgtactgacttctcctataagcgcttctcttcgcatagtcacgtagctcccaccccaccctcttcctgtgtctcacgcaagttttatactctaatatttatatggctttttttcttcgacaaaaaaataataaaacgtttcttctgaaaagctg

SEQ ID NO: 24898 - DNA, 3936 bp, Homo sapiens
  source 1..3936: mol_type = unassigned DNA
gagaaaccgcggaatatcggcttagagcctgccatggcgaatcggctacagcgcggggaccgcagtcggctgctgctgctgctgtgcattttcctggggacgctgcgggggttccgggccaggcagatccgatattcggtgccagaagagaccgaaaagggctccttcgtgggcaatatctccaaggacctggggctggagccccgggagctggcgaagcgcggagtccgcatcgtctccagagggaagacacagcttttcgctgtgaatccgcgaagcggcagcttgatcacggcaggcaggatagaccgggaggagctctgtgagacggtgtcctcctgttttttaaatatggaacttctcgtggaagacaccttgaagatttacggagtggaggtggaaataatagatattaatgataacgcccccagcttccaggaggacgaagtggagataaaagtcagtgagcacgcaattcctggggcgcgatttgctcttcctaatgctagggatccagatgtgggcgtgaactccctccagagctaccagctcagccctaataattacttttccttgcaactgcggggcagaacggatggggccaagaatccagagctagtactggagggaagcctggaccgagagaaagaggctgctcacctgctcctcctcacagctttagatggaggcgatcccatccgaaagggcgcagttcccattcgtgtggtggtcctcgatgtaaatgatcacatcccaatgtttacacagtccgtatatcgcgtgagtgttccagaaaacatcagctccggaactcgggtgctgatggttaatgcaacggatccagacgagggaatcaacggggaagtaatgtattcatttcggaacatggaaagcaaggcttctgaaatattccaattggattcacaaactggagaagttcaagtacgggggtctctggattttgaaaaatatagattctatgagatggaaattcaaggccaagatggtggaggtctctttaccaccacgacgatgttgatcactgttgtggatgtgaatgataacgctccagaaataactatcacctcttctattaattcaattctggaaaactctcctccaggtacagtgattgctcttctaaatgtgcaagatcaagattctggagaaaatggtcaagtctcctgttttattcctaaccacctgccttttaaattagaaaagacttatggaaattattacaaattgataacaagcagagtgctggacagggagttggtccagagctacaatataacgttgacagccacagaccagggaagcccgcctttgtctgcagaaactcatgtctggctgaatgtggcagatgacaacgataaccctcccgtttttcctcactcctcttactctgcctacattcccgaaaacaaccccaggggtgcctccatcttctcagtgaccgccctcgacccggacagcaaacagaatgccctggtcacttactctctgacggatgacactgtccagggggtgcctctgtcctcctatgtctctattaactccaacactggtgttctctatgccctacaatccttcgactatgagcagtttcgagacttagaactgagagtgatagcacgtgacagcggggacccgcccctcagcagcaacgtgtcgctgagcctgttcgtgctggaccagaacgacaatgcgcccgagatcctgtaccctgccctccccacagacggctccactggcgtggagctggcgccccgctctgcggaacctggctacctggtgaccaaggtggttgcggtggacaaagattcaggccagaacgcctggctgtcctatcgcctgcttaaggccagcgagccgggactcttcgcggtgggggagcacacgggcgaggtgcgtacagcgcgggcactgctggacagagacgcgctcaagcagagcctcgtggtggccgtccaggaccacggccagccccctctctcggccaccgtcacgctcaccgtggctgtggccgacagcatccccgaagtcctggcggacctcggcagcctcgagtctctggctaactctgaaacctcagacctctcgctgtacttggtggtggcggtggccgcagtctcctgcatcttcctggtctttgtcatcgtgctgctggcactcaggctgtggcgctggcataagtcacgcctgctgcaggcttctgaaggcgggttggcaggtatgcccacgtcacattttgtaggcgtggacggggtacaggctttcctgcaaacctattcccacgaggtctctctcattgcggactcgcagaagagtcacctgattttcccccagcccaactatggggacacgctcatcagccaggagagctgtgagaaaagcgagccactcttgatagctgaagactcagctatcattttaggcaaatgtgacccgacaagtaatcagcaagccccgcccaacacggactggcgtttctctcaggcccagagacccggcaccagcggctcccaaaatggcgatgacaccggcacctggcccaacaaccagtttgacacagagatgctgcaagccatgatcttggcgtccgccagtgaagctgctgatgggagctccaccctgggagggggtgccggcaccatgggattgagcgcccgctacggaccccagttcaccctgcagcacgtgcccgactaccgccagaatgtctacatcccaggcagcaatgccacactgaccaacgcagctggcaagcgggatggcaaggccccagcaggtggcaatggcaacaagaagaagtcgggcaagaaggagaagaagtaacatggaggccaggccaagagccacagggcggcctctccccaaccagcccagcttctccttacctgcacccaggcctcagagtttcagggctaacccccagaatactggtaggggccaaggccatgctccccttgggaaacagaaacaagtgcccagtcagcacctaccccttcccccccagggggttgaatatgcaaaagcagttccgctgggaacccccatccaatcaactgctgtacccatgggggtagtggggttactgtagacaccaagaaccatttgccacaccccgtttagttacagctgaactcctccatcttccaaatcaatcaggcccatccatcccatgcctccctcctccccaccccactccaacagttcctctttcccgagtaaggtggttggggtgttgaagtaccaagtaacctacaagcctcctagttctgaaaagttggaagggcatcatgacctcttggcctctcctttgattctcaatcttcccccaaagcatggtttggtgccagccccttcacctccttccagagcccaagatcaatgctcaagttttggaggacatgatcaccatccccatggtactgatgcttgctggatttagggagggcattttgctaccaagcctcttcccaacgccctggggaccagtcttctgttttgtttttcattgtttgacgtttccactgcatgccttgacttcccccacctcctcctcaaacaagagactccactgcatgttccaagacagtatggggtggtaagataaggaagggaagtgtgtggatgtggatggtgggggcatggacaaagcttgacacatcaagttatcaaggccttggaggaggctctgtatgtcctcaggggactgacaacatcctccagattccagccataaaccaataactaggctggacccttcccactacataatagggctcagcccaggcagccagctttgggctgagctaacaggaccaatggattaaactggcatttcagtccaaggaagctcgaagcaggtttaggaccaggtccccttgagaggtcagaggggcctctgtgggtgctgggtactccaga

SEQ ID NO: 24899 - DNA, 2260 bp, Homo sapiens
  source 1..2260: mol_type = unassigned DNA
atggcgaatcggctacagcgcggggaccgcagtcggctgctgctgctgctgtgcattttcctggggacgctgcgggggttccgggccaggcagatccgatattcggtgccagaagagaccgaaaagggctccttcgtgggcaatatctccaaggacctggggctggagccccgggagctggcgaagcgcggagtccgcatcgtctccagagggaagacacagcttttcgctgtgaatccgcgaagcggcagcttgatcacggcaggcaggatagaccgggaggagctctgtgagacggtgtcctcctgttttttaaatatggaacttctcgtggaagacaccttgaagatttacggagtggaggtggaaataatagatattaatgataacgcccccagcttccaggaggacgaagtggagataaaagtcagtgagcacgcaattcctggggcgcgatttgctcttcctaatgctagggatccagatgtgggcgtgaactccctccagagctaccagctcagccctaataattacttttccttgcaactgcggggcagaacggatggggccaagaatccagagctagtactggagggaagcctggaccgagagaaagaggctgctcacctgctcctcctcacagctttagatggaggcgatcccatccgaaagggcgcagttcccattcgtgtggtggtcctcgatgtaaatgatcacatcccaatgtttacacagtccgtatatcgcgtgagtgttccagaaaacatcagctccggaactcgggtgctgatggttaatgcaacggatccagacgagggaatcaacggggaagtaatgtattcatttcggaacatggaaagcaaggcttctgaaatattccaattggattcacaaactggagaagttcaagtacgggggtctctggattttgaaaaatatagattctatgagatggaaattcaaggccaagatggtggaggtctctttaccaccacgacgatgttgatcactgttgtggatgtgaatgataacgctccagaaataactatcacctcttctattaattcaattctggaaaactctcctccaggtacagtgattgctcttctaaatgtgcaagatcaagattctggagaaaatggtcaagtctcctgttttattcctaaccacctgccttttaaattagaaaagacttatggaaattattacaaattgataacaagcagagtgctggacagggagttggtccagagctacaatataacgttgacagccacagaccagggaagcccgcctttgtctgcagaaactcatgtctggctgaatgtggcagatgacaacgataaccctcccgtttttcctcactcctcttactctgcctacattcccgaaaacaaccccaggggtgcctccatcttctcagtgaccgccctcgacccggacagcaaacagaatgccctggtcacttactctctgacggatgacactgtccagggggtgcctctgtcctcctatgtctctattaactccaacactggtgttctctatgccctacaatccttcgactatgagcagtttcgagacttagaactgagagtgatagcacgtgacagcggggacccgcccctcagcagcaacgtgtcgctgagcctgttcgtgctggaccagaacgacaatgcgcccgagatcctgtaccctgccctccccacagacggctccactggcgtggagctggcgccccgctctgcggaacctggctacctggtgaccaaggtggttgcggtggacaaagattcaggccagaacgcctggctgtcctatcgcctgcttaaggccagcgagccgggactcttcgcggtgggggagcacacgggcgagcaagccccgcccaacacggactggcgtttctctcaggcccagagacccggcaccagcggctcccaaaatggcgatgacaccggcacctggcccaacaaccagtttgacacagagatgctgcaagccatgatcttggcgtccgccagtgaagctgctgatgggagctccaccctgggagggggtgccggcaccatgggattgagcgcccgctacggaccccagttcaccctgcagcacgtgcccgactaccgccagaatgtctacatcccaggcagcaatgccacactgaccaacgcagctggcaagcgggatggcaaggccccagcaggtggcaatggcaacaagaagaagtcgggcaagaaggagaagaagtaacatggag

SEQ ID NO: 24900 - DNA, 4747 bp, Homo sapiens
  source 1..4747: mol_type = unassigned DNA
taggaatgaaccatccctgggagtatgtggaaacaacggaggagctctgacttcccaactgtcccattctatgggcgaaggaactgctcctgacttcagtggttaagggcagaattgaaaataattctggaggaagataagaatgattcctgcgcgactgcaccgggactacaaagggcttgtcctgctgggaatcctcctggggactctgtgggagaccggatgcacccagatacgctattcagttccggaagagctggagaaaggctctagggtgggcgacatctccagggacctggggctggagccccgggagctcgcggagcgcggagtccgcatcatccccagaggtaggacgcagcttttcgccctgaatccgcgcagcggcagcttggtcacggcgggcaggatagaccgggaggagctctgtatgggggccatcaagtgtcaattaaatctagacattctgatggaggataaagtgaaaatatatggagtagaagtagaagtaagggacattaacgacaatgcgccttactttcgtgaaagtgaattagaaataaaaattagtgaaaatgcagccactgagatgcggttccctctaccccacgcctgggatccggatatcgggaagaactctctgcagagctacgagctcagcccgaacactcacttctccctcatcgtgcaaaatggagccgacggtagtaagtaccccgaattggtgctgaaacgcgccctggaccgcgaagaaaaggctgctcaccacctggtccttacggcctccgacgggggcgacccggtgcgcacaggcaccgcgcgcatccgcgtgatggttctggatgcgaacgacaacgcaccagcgtttgctcagcccgagtaccgcgcgagcgttccggagaatctggccttgggcacgcagctgcttgtagtcaacgctaccgaccctgacgaaggagtcaatgcggaagtgaggtattccttccggtatgtggacgacaaggcggcccaagttttcaaactagattgtaattcagggacaatatcaacaataggggagttggaccacgaggagtcaggattctaccagatggaagtgcaagcaatggataatgcaggatattctgcgcgagccaaagtcctgatcactgttctggacgtgaacgacaatgccccagaagtggtcctcacctctctcgccagctcggttcccgaaaactctcccagagggacattaattgcccttttaaatgtaaatgaccaagattctgaggaaaacggacaggtgatctgtttcatccaaggaaatctgccctttaaattagaaaaatcttacggaaattactatagtttagtcacagacatagtcttggatagggaacaggttcctagctacaacatcacagtgaccgccactgaccggggaaccccgcccctatccacggaaactcatatctcgctgaacgtggcagacaccaacgacaacccgccggtcttccctcaggcctcctattccgcttatatcccagagaacaatcccagaggagtttccctcgtctctgtgaccgcccacgaccccgactgtgaagagaacgcccagatcacttattccctggctgagaacaccatccaaggggcaagcctatcgtcctacgtgtccatcaactccgacactggggtactgtatgcgctgagctccttcgactacgagcagttccgagacttgcaagtgaaagtgatggcgcgggacaacgggcacccgcccctcagcagcaacgtgtcgttgagcctgttcgtgctggaccagaacgacaatgcgcccgagatcctgtaccccgccctccccacggacggttccactggcgtggagctggctccccgctccgcagagcccggctacctggtgaccaaggtggtggcggtggacagagactccggccagaacgcctggctgtcctaccgtctgctcaaggccagcgagccgggactcttctcggtgggtctgcacacgggcgaggtgcgcacggcgcgagccctgctggacagagacgcgctcaagcagagcctcgtagtggccgtccaggaccacggccagccccctctctccgccactgtcacgctcaccgtggccgtggccgacagcatcccccaagtcctggcggacctcggcagcctcgagtctccagctaactctgaaacctcagacctcactctgtacctggtggtagcggtggccgcggtctcctgcgtcttcctggccttcgtcatcttgctgctggcgctcaggctgcggcgctggcacaagtcacgcctgctgcaggcttcaggaggcggcttgacaggagcgccggcgtcgcactttgtgggcgtggacggggtgcaggctttcctgcagacctattcccacgaggtttccctcaccacggactcgcggaagagtcacctgatcttcccccagcccaactatgcagacatgctcgtcagccaggagagctttgaaaaaagcgagccccttttgctgtcaggtgattcggtattttctaaagacagtcatgggttaattgagcaagccccgcccaacacggactggcgtttctctcaggcccagagacccggcaccagcggctcccaaaatggcgatgacaccggcacctggcccaacaaccagtttgacacagagatgctgcaagccatgatcttggcgtccgccagtgaagctgctgatgggagctccaccctgggagggggtgccggcaccatgggattgagcgcccgctacggaccccagttcaccctgcagcacgtgcccgactaccgccagaatgtctacatcccaggcagcaatgccacactgaccaacgcagctggcaagcgggatggcaaggccccagcaggtggcaatggcaacaagaagaagtcgggcaagaaggagaagaagtaacatggaggccaggccaagagccacagggcggcctctccccaaccagcccagcttctccttacctgcacccaggcctcagagtttcagggctaacccccagaatactggtaggggccaaggccatgctccccttgggaaacagaaacaagtgcccagtcagcacctaccccttcccccccagggggttgaatatgcaaaagcagttccgctgggaacccccatccaatcaactgctgtacccatgggggtagtggggttactgtagacaccaagaaccatttgccacaccccgtttagttacagctgaactcctccatcttccaaatcaatcaggcccatccatcccatgcctccctcctccccaccccactccaacagttcctctttcccgagtaaggtggttggggtgttgaagtaccaagtaacctacaagcctcctagttctgaaaagttggaagggcatcatgacctcttggcctctcctttgattctcaatcttcccccaaagcatggtttggtgccagccccttcacctccttccagagcccaagatcaatgctcaagttttggaggacatgatcaccatccccatggtactgatgcttgctggatttagggagggcattttgctaccaagcctcttcccaacgccctggggaccagtcttctgttttgtttttcattgtttgacgtttccactgcatgccttgacttcccccacctcctcctcaaacaagagactccactgcatgttccaagacagtatggggtggtaagataaggaagggaagtgtgtggatgtggatggtgggggcatggacaaagcttgacacatcaagttatcaaggccttggaggaggctctgtatgtcctcaggggactgacaacatcctccagattccagccataaaccaataactaggctggacccttcccactacataatagggctcagcccaggcagccagctttgggctgagctaacaggaccaatggattaaactggcatttcagtccaaggaagctcgaagcaggtttaggaccaggtccccttgagaggtcagaggggcctctgtgggtgctgggtactccagaggtgccactggtggaagggtcagcggagccccagcaggaagggtgggccagccaggccattcttagtccctgggttggggaggcagggagctagggcagggaccaaatgaacagaaagtctcagcccaggatggggcttcttcaacagggcccctgccctcctgaagcctcagtccttcaccttgccaggtgccgtttctcttccgtgaaggccactgcccaggtccccagtgcgccccctagtggccatagcctggttaaagttccccagtgcctccttgtgcatagaccttcttctcccacccccttctgcccctgggtccccggccatccagcggggctgccagagaaccccagacctgcccttacagtagtgtagcgccccctccctctttcggctggtgtagaatagccagtagtgtagtgcggtgtgcttttacgtgatggcgggtgggcagcgggcggcgggctccgcgcagccgtctgtccttgatctgcccgcggcggcccgtgttgtgttttgtgctgtgtccacgcgctaaggcgaccccctcccccgtactgacttctcctataagcgcttctcttcgcatagtcacgtagctcccaccccaccctcttcctgtgtctcacgcaagttttatactctaatatttatatggctttttttcttcgacaaaaaaataataaaacgtttcttctgaaaagctg

SEQ ID NO: 24901 - DNA, 4605 bp, Homo sapiens
  source 1..4605: mol_type = unassigned DNA
atggcggctctgcaaaagttgccacactgcagaaagctggtcctgctgtgcttccttttggcgaccctgtgggaggccagggccgggcagattcgctattctgtgcgggaagagatcgacagaggctccttcgtaggcaacatcgccaaggacttgggtttggagcccctggcactggcagagcagggagtccgcatcgtctccagaggtaggtcccagctctttgctctgaacccgcgaagcggcagcttggtcactgcgaacaggatagaccgggaggagctctgcgctcagagcgcaccctgtctgttgaattttaacattctgctggaggataaattgactatttattcagtagaggtggaaataacagatattaacgataatgcccctcgctttggagtagaggaactggagctaaaaatcagtgaaaccactacgccaggattccggattcctcttaagaatgcgcatgatgcagacgtaggtgagaacgcccttcagaagtacgcactcaacccaaatgaccacttctccctggacgtgcgaaggggagctgatgggaacaagtacccagaactggtgctggagcgctctctggaccgcgaggaagaggctgttcaccacctcgttctcgtggcttctgatgggggtgacccagtgctatctggcacctcccgcatctgcgtgaaggtcctggatgcgaacgacaatgcgcctgtttttacacagcccgagtaccgcataagcattccggagaatacgctcgtgggcacccggatactcacggtgaccgccactgacgcagatgagggctactacgctcaagtggtatattttctagagaaaagccctggagaaacctcagaggtatttgagcttaagtcaacatctggagaactgacaatcataaaagatctagattatgaggatgctacattccatgaaattgatattgaagctcaggatggtccgggccttctaaccagagcgaaggttatcgtcacggttctggatgtgaatgacaatgccccagaattttacatgacatctgctactagctcagtttctgaagactctcttccaggaaccataattgggctttttaatgtacatgatagagactctgggcagaacgcattcaccacctgttcactccccgaggatcttccttttaagttagaaaagtcagtagacaattactaccgactggttacaaccagagcccttgacagggaacagttttccttttacaacatcactctaaccgctaaagatggagggaacccctccctgtccacggatgctcacattttgctccaggtggcagacatcaacgacaacgcacccgccttctcccgcacatcctactccacctacattcccgaaaacaaccccagaggagcctctgtcttctcagtgacggcccatgaccccgacagcaacgacaatgctcatgtaacttactctttcgcggaggacactgttcagggggcacccttatcctcttacatctctatcaactccgacactggagtactctatgcactgcgctcctttgattatgagcagttgcgagacttgcaagtgtgggtgatagcgcgggacagcgggaaccctccactcagtagcaatgtatcattaagcctgttcgtgctggaccagaacgacaacgcgcccgagatcctgtaccctgccttccccacagacggttccactggcgtggagctggcgccccgctccgcagagcccggctacctggtgaccaaggtggtggcggtggacagagactcgggccagaacgcctggctgtcttaccacctgctcaaggccagcgagccgggactcttctcggtgggtctgcacacgggcgaggtgcgcacggcgcgagccctgctggacagagacgcgctcaagcagagcctcgtggtggccatccaggaccacggccagccccctctctccgccactgtcacgctcaccgtggccgtggccgacaggatccccgacatcctggccgacctgggcagcctcgagccctccgccatacccaacgattcggacctcactctgtacctggtggtggcggtggccgcggtctcctgcgtcttcctggccttcgtcatcgtgttgctggcgcacaggctgcggcgctggcacaagtcacgcctgctgcaggcttcaggaggcagcttgacaggcatgcagagctcgcactttgtgggcgtggacggggttcgggctttcctgcagacctattcccacgaggtctccctcactgcggactcgcggaagagccacctgattttcccccagcccaactatgcggacacgctcatcagccaggagagctgtgagaaaaaggattttttatcagcgcctcaatctctactcgaagaagaaagagaagaaacgttttctcagcaagccccgcccaacacggactggcgtttctctcaggcccagagacccggcaccagcggctcccaaaatggcgatgacaccggcacctggcccaacaaccagtttgacacagagatgctgcaagccatgatcttggcgtccgccagtgaagctgctgatgggagctccaccctgggagggggtgccggcaccatgggattgagcgcccgctacggaccccagttcaccctgcagcacgtgcccgactaccgccagaatgtctacatcccaggcagcaatgccacactgaccaacgcagctggcaagcgggatggcaaggccccagcaggtggcaatggcaacaagaagaagtcgggcaagaaggagaagaagtaacatggaggccaggccaagagccacagggcggcctctccccaaccagcccagcttctccttacctgcacccaggcctcagagtttcagggctaacccccagaatactggtaggggccaaggccatgctccccttgggaaacagaaacaagtgcccagtcagcacctaccccttcccccccagggggttgaatatgcaaaagcagttccgctgggaacccccatccaatcaactgctgtacccatgggggtagtggggttactgtagacaccaagaaccatttgccacaccccgtttagttacagctgaactcctccatcttccaaatcaatcaggcccatccatcccatgcctccctcctccccaccccactccaacagttcctctttcccgagtaaggtggttggggtgttgaagtaccaagtaacctacaagcctcctagttctgaaaagttggaagggcatcatgacctcttggcctctcctttgattctcaatcttcccccaaagcatggtttggtgccagccccttcacctccttccagagcccaagatcaatgctcaagttttggaggacatgatcaccatccccatggtactgatgcttgctggatttagggagggcattttgctaccaagcctcttcccaacgccctggggaccagtcttctgttttgtttttcattgtttgacgtttccactgcatgccttgacttcccccacctcctcctcaaacaagagactccactgcatgttccaagacagtatggggtggtaagataaggaagggaagtgtgtggatgtggatggtgggggcatggacaaagcttgacacatcaagttatcaaggccttggaggaggctctgtatgtcctcaggggactgacaacatcctccagattccagccataaaccaataactaggctggacccttcccactacataatagggctcagcccaggcagccagctttgggctgagctaacaggaccaatggattaaactggcatttcagtccaaggaagctcgaagcaggtttaggaccaggtccccttgagaggtcagaggggcctctgtgggtgctgggtactccagaggtgccactggtggaagggtcagcggagccccagcaggaagggtgggccagccaggccattcttagtccctgggttggggaggcagggagctagggcagggaccaaatgaacagaaagtctcagcccaggatggggcttcttcaacagggcccctgccctcctgaagcctcagtccttcaccttgccaggtgccgtttctcttccgtgaaggccactgcccaggtccccagtgcgccccctagtggccatagcctggttaaagttccccagtgcctccttgtgcatagaccttcttctcccacccccttctgcccctgggtccccggccatccagcggggctgccagagaaccccagacctgcccttacagtagtgtagcgccccctccctctttcggctggtgtagaatagccagtagtgtagtgcggtgtgcttttacgtgatggcgggtgggcagcgggcggcgggctccgcgcagccgtctgtccttgatctgcccgcggcggcccgtgttgtgttttgtgctgtgtccacgcgctaaggcgaccccctcccccgtactgacttctcctataagcgcttctcttcgcatagtcacgtagctcccaccccaccctcttcctgtgtctcacgcaagttttatactctaatatttatatggctttttttcttcgacaaaaaaataataaaacgtttcttctgaaaagctg

SEQ ID NO: 24902 - DNA, 4605 bp, Homo sapiens
  source 1..4605: mol_type = unassigned DNA
atgaccaattgcctgagtttccgaaatggcagaggactggccctgctgtgcgcgctcctggggacgctgtgcgaaacaggatccggtcagatccgctactcggtgtctgaggagctagataaaggttccttcgtgggcaacatcgctaacgacctggggctagagccccgggagctggcggagcgcggagtccgcatcgtctccagaggtaggacgcagcttttctctctgaatccgcaaagcggcagcttggtcaccgcggagaggatagaccgggaggagctctgcgctcagatcccgctgtgtctggtaaaaattaacattctggttgaggataaattgaaaatttttgaagtagaaatagaaattaaagatattaatgataatgctcctaatttcccaacagaggaattggaaataaaaattggtgaactaacggttcctggaacccgatttccaattaaaactgcttttgacccagatgtaggcattaactccctgcagaactacaagcttagccccaatgactacttctctctggctgtgaatagcgtctctgagggggccaagtatccagagctggtgctggagcgggccctggaccgtgagaaaaaagaaattcaccagcttgtcctggttgcctctgatggtggcgaccctgtccactctggcaacttgcacatccaagtgatagtcctggatgcaaatgacaacccaccaatgtttactcagcctgagtaccgtgtgagtgtttgggagaacgtgcctgtgggtacccggctgctcacggtgaatgccactgaccctgacgagggattcaatgctcaagtgtcttatattctagataaaatgcctgggaaaatcgctgagattttccatcttaactcagtgagtggagaagtatcaatattaaaaagtctagattatgaggatgccatgttctatgaaattaaaattgaagcacaggatggaccaggtcttctttcaagagccaagattctagtcacggttctggatgtgaatgacaatgctccagaaattacaatcacgtctctcacaagctcagtcccagaagagggcaccgttggaagagaaattgctcttatcgacgtgcatgaccgagattctgggcagaatgggcaggttgaagtttttgtcctgggaaatctgccatttaagttagaaaaatcaatagatcaatattaccgcttagtgacggccacatccctggaccgcgaacaaatatcagaatataacattagtctgagagcctcagatgggggaagcccgccactgtccacagaaactcacatcaccctgcatgtgattgacatcaatgacaacccacccaccttccctcatttatcctactccgcctacattccagaaaacaaccccagaggagcctccatcttctcagtgacagcccaggacccagatagcaacaacaacgcccgcatcacttatgcattgaccgaggacactctccagggggcgcccctgtcctccttcgtctctatcaactccaacactggcgtcctatacgcgctgagatccttcgactacgagcaatttagagacttaaagctactggtgacagccagcgacagcgggaaccctccactcagcagcaacgtgtcgctgaacctgttcgtgctggaccagaacgacaacgcgcccgagatcctgtaccccgccctccccacagacggttccactggcgtggagctggcgcctcgctccgcagagcccggctacctggtgaccaaggtggtggcggtggacagagactcgggccagaacgcctggctgtcctaccgcctgctcaaggccagcgagccgggactcttctcggtgggtctgcacacgggcgaggtgcgcacggcgcgagccctgctggacagagacgcgctcaagcagagcctcgtggtggccgtccaggaccacggccagccccctctctccgccactgtcacgctcaccgtggccgtggccgacaggatccccgacatcctggccgacctgggcagcctcgagccctccgccaaacccaacgattcggacctcactctgtacctggtggtggcggtggccgcggtctcctgcgtcttcctggccttcgtcatcgtgctgctggcgctcaggctgcggcgctggcacaagtcacgcctgctgcaggcttcgggaggcggcttggcgagtacgcccggctcgcactttgtgggcgcggacggggttcgggctttcctgcagacctattcccacgaggtctccctcactgcggactcgcggaagagccacctgattttcccccagcccaactatgcggacacgctcatcagccaggagagctgtgagaaaagcgagcctcttctgataactcaggatttacttgaaatgaaaggagattccaacctacttcagcaagccccgcccaacacggactggcgtttctctcaggcccagagacccggcaccagcggctcccaaaatggcgatgacaccggcacctggcccaacaaccagtttgacacagagatgctgcaagccatgatcttggcgtccgccagtgaagctgctgatgggagctccaccctgggagggggtgccggcaccatgggattgagcgcccgctacggaccccagttcaccctgcagcacgtgcccgactaccgccagaatgtctacatcccaggcagcaatgccacactgaccaacgcagctggcaagcgggatggcaaggccccagcaggtggcaatggcaacaagaagaagtcgggcaagaaggagaagaagtaacatggaggccaggccaagagccacagggcggcctctccccaaccagcccagcttctccttacctgcacccaggcctcagagtttcagggctaacccccagaatactggtaggggccaaggccatgctccccttgggaaacagaaacaagtgcccagtcagcacctaccccttcccccccagggggttgaatatgcaaaagcagttccgctgggaacccccatccaatcaactgctgtacccatgggggtagtggggttactgtagacaccaagaaccatttgccacaccccgtttagttacagctgaactcctccatcttccaaatcaatcaggcccatccatcccatgcctccctcctccccaccccactccaacagttcctctttcccgagtaaggtggttggggtgttgaagtaccaagtaacctacaagcctcctagttctgaaaagttggaagggcatcatgacctcttggcctctcctttgattctcaatcttcccccaaagcatggtttggtgccagccccttcacctccttccagagcccaagatcaatgctcaagttttggaggacatgatcaccatccccatggtactgatgcttgctggatttagggagggcattttgctaccaagcctcttcccaacgccctggggaccagtcttctgttttgtttttcattgtttgacgtttccactgcatgccttgacttcccccacctcctcctcaaacaagagactccactgcatgttccaagacagtatggggtggtaagataaggaagggaagtgtgtggatgtggatggtgggggcatggacaaagcttgacacatcaagttatcaaggccttggaggaggctctgtatgtcctcaggggactgacaacatcctccagattccagccataaaccaataactaggctggacccttcccactacataatagggctcagcccaggcagccagctttgggctgagctaacaggaccaatggattaaactggcatttcagtccaaggaagctcgaagcaggtttaggaccaggtccccttgagaggtcagaggggcctctgtgggtgctgggtactccagaggtgccactggtggaagggtcagcggagccccagcaggaagggtgggccagccaggccattcttagtccctgggttggggaggcagggagctagggcagggaccaaatgaacagaaagtctcagcccaggatggggcttcttcaacagggcccctgccctcctgaagcctcagtccttcaccttgccaggtgccgtttctcttccgtgaaggccactgcccaggtccccagtgcgccccctagtggccatagcctggttaaagttccccagtgcctccttgtgcatagaccttcttctcccacccccttctgcccctgggtccccggccatccagcggggctgccagagaaccccagacctgcccttacagtagtgtagcgccccctccctctttcggctggtgtagaatagccagtagtgtagtgcggtgtgcttttacgtgatggcgggtgggcagcgggcggcgggctccgcgcagccgtctgtccttgatctgcccgcggcggcccgtgttgtgttttgtgctgtgtccacgcgctaaggcgaccccctcccccgtactgacttctcctataagcgcttctcttcgcatagtcacgtagctcccaccccaccctcttcctgtgtctcacgcaagttttatactctaatatttatatggctttttttcttcgacaaaaaaataataaaacgtttcttctgaaaagctg

SEQ ID NO: 24903 - DNA, 4602 bp, Homo sapiens
  source 1..4602: mol_type = unassigned DNA
atggcgagtccacctaggggctggggctgcggagagctgctgctgcccttcatgctcctggggacgctgtgcgagccaggatccgggcagatccgctactcgatgccggaggagctggacaaaggctccttcgtcggcaacatagccaaggaccttgggctggagccccaggagctggcggagcgcggagtccgcatcgtctccagaggtaggacgcagctttttgccctgaacccgcgaagcggcagcttggtcaccgcgggcaggatagaccgggaggagctctgcgctcagagcccactgtgtgtggtgaactttaacatcttggttgagaacaaaatgaaaatttatggagtagaagtagaaataatcgatattaatgataacttcccgcgtttccgggatgaagagttaaaagtaaaagttaatgaaaatgcggctgcagggacacggttagtgcttcccttcgcgcgggatgcggatgtgggtgtgaactctctccggagttaccagctcagctccaatctgcacttctctctggatgtggtaagcggaactgatggacaaaagtatccggagctggtgttggaacagcccctagaccgcgagaaagagactgttcacgacctcctcctcacagctttagatggcggagacccggtactctccggcaccacgcacatccgtgttacggtcctcgacgcaaacgacaatgcgcccctgttcaccccatccgagtacagcgtgagtgttccagagaacatacctgtgggcactcggctgctcatgctaaccgccacggatccagatgagggaataaacgggaaattgacctactcttttcgcaatgaagaagaaaaaatttcggagactttccaacttgattccaacctgggggaaatctcaactctacaatcactggactatgaagaatccagattctacctcatggaagtggtagctcaggatggaggcgctcttgttgccagcgctaaggtggtggtcacagtacaggacgtgaatgacaatgcccccgaagtgatcctcacctctctgaccagttcgatctctgaagactgtcttcccggaactgtaatcgcgctgtttagcgtacatgatggtgattctggagaaaatggtgagattgcatgctctattcctaggaatttgccttttaaattggagaagtcagttgataattactatcacctattaacaactagggacctggacagagaagagacttcagattataatatcactttaaccgtcatggaccatggaaccccgcccctctctacagaaagccacatccccttgaaagtagcagacgttaatgacaacccacccaatttccctcaagcctcctactccacctctgtcacagaaaacaatcccagaggtgtctctatcttctctgtgacagcccatgaccccgacagcggcgacaacgctcgagtcacctactccctggctgaagacacatttcagggggcgcccttgtcctcctatgtatccattaactctgacaccggtgtcctgtatgctctgagatccttcgactatgagcagttgagagacctacagttgtgggtgacagccagcgacagtgggaaccctccacttagcagcaacgtgtcgctgagcctgtttgtgctggaccagaacgacaatacgcctgagatcctgtaccccgccctccccacagacggttccacgggcgtggagctggcgcctcgctccgcagaacctggctacctggtgaccaaggtggtagcggtggacaaagattcaggccagaacgcctggctgtcctaccgcctgcttaaggccagcgagccaggactctttgcggttgggctgcacacgggcgaggtgcgcacagcgcgagccctgctggacagagacgcgctcaagcagagcctcgtggtggccgtcgaagaccatggccagccccctctgtcagccaccttcacggtcaccgttgccgtggccgacaggatccctgacatcctggctgacctaggcagtatcaagacccccattgaccctgaggatctggacctcacactctatcttgtggtggcagtggctgcagtctcctgcgtcttcctggccttcgtcatcgtgctgctggtgctcagactgaggcgctggcacaagtcacgcctgcttcaggctgaaggcagcaggttggcgggtgtgcccgcctcgcactttgtgggcgtggatggggttcgggctttcctgcagacctattcccacgaggtctccctcaccgcggactcgaggaagagtcacctgatctttccccagcccaactacgcagacacgctccttagtgaagagagctgtgagaaaagcgagcctcttctgatgtctgataaggtagatgcaaacaaagaagaacggcgagttcagcaagccccgcccaacacggactggcgtttctctcaggcccagagacccggcaccagcggctcccaaaatggcgatgacaccggcacctggcccaacaaccagtttgacacagagatgctgcaagccatgatcttggcgtccgccagtgaagctgctgatgggagctccaccctgggagggggtgccggcaccatgggattgagcgcccgctacggaccccagttcaccctgcagcacgtgcccgactaccgccagaatgtctacatcccaggcagcaatgccacactgaccaacgcagctggcaagcgggatggcaaggccccagcaggtggcaatggcaacaagaagaagtcgggcaagaaggagaagaagtaacatggaggccaggccaagagccacagggcggcctctccccaaccagcccagcttctccttacctgcacccaggcctcagagtttcagggctaacccccagaatactggtaggggccaaggccatgctccccttgggaaacagaaacaagtgcccagtcagcacctaccccttcccccccagggggttgaatatgcaaaagcagttccgctgggaacccccatccaatcaactgctgtacccatgggggtagtggggttactgtagacaccaagaaccatttgccacaccccgtttagttacagctgaactcctccatcttccaaatcaatcaggcccatccatcccatgcctccctcctccccaccccactccaacagttcctctttcccgagtaaggtggttggggtgttgaagtaccaagtaacctacaagcctcctagttctgaaaagttggaagggcatcatgacctcttggcctctcctttgattctcaatcttcccccaaagcatggtttggtgccagccccttcacctccttccagagcccaagatcaatgctcaagttttggaggacatgatcaccatccccatggtactgatgcttgctggatttagggagggcattttgctaccaagcctcttcccaacgccctggggaccagtcttctgttttgtttttcattgtttgacgtttccactgcatgccttgacttcccccacctcctcctcaaacaagagactccactgcatgttccaagacagtatggggtggtaagataaggaagggaagtgtgtggatgtggatggtgggggcatggacaaagcttgacacatcaagttatcaaggccttggaggaggctctgtatgtcctcaggggactgacaacatcctccagattccagccataaaccaataactaggctggacccttcccactacataatagggctcagcccaggcagccagctttgggctgagctaacaggaccaatggattaaactggcatttcagtccaaggaagctcgaagcaggtttaggaccaggtccccttgagaggtcagaggggcctctgtgggtgctgggtactccagaggtgccactggtggaagggtcagcggagccccagcaggaagggtgggccagccaggccattcttagtccctgggttggggaggcagggagctagggcagggaccaaatgaacagaaagtctcagcccaggatggggcttcttcaacagggcccctgccctcctgaagcctcagtccttcaccttgccaggtgccgtttctcttccgtgaaggccactgcccaggtccccagtgcgccccctagtggccatagcctggttaaagttccccagtgcctccttgtgcatagaccttcttctcccacccccttctgcccctgggtccccggccatccagcggggctgccagagaaccccagacctgcccttacagtagtgtagcgccccctccctctttcggctggtgtagaatagccagtagtgtagtgcggtgtgcttttacgtgatggcgggtgggcagcgggcggcgggctccgcgcagccgtctgtccttgatctgcccgcggcggcccgtgttgtgttttgtgctgtgtccacgcgctaaggcgaccccctcccccgtactgacttctcctataagcgcttctcttcgcatagtcacgtagctcccaccccaccctcttcctgtgtctcacgcaagttttatactctaatatttatatggctttttttcttcgacaaaaaaataataaaacgtttcttctgaaaagctg

SEQ ID NO: 24904 - DNA, 4605 bp, Homo sapiens
  source 1..4605: mol_type = unassigned DNA
atggcgcctccgcagaggcatccgcagcgcagcgagcaggtcctgctcctcacgctcctggggacgctgtggggggccgcggcagcgcagatccgctactctattcccgaggagctggagaaaggctccttcgtaggcaacatcgtcaaggatctgggactggagccccaggagttggcggagcacggagtccgcatcgtctccagaggtaggatgcagcttttctctctgaatccgcgaaacggcagcttggtcaccgcgggtaggatagaccgcgaggagctctgtgctcagagcccgcggtgtctggtgagttttaacatccttgtcgaggataaactgaatctttatcccgtggaagtggaaatagtggacattaatgacaatacaccccgattcttaaaggaagaattggaagtgaaaattctcgaaaacgcagctccatcctctcgttttccactaatggaggtctatgaccctgatgtgggaatgaactcccttcagggatttaagctcagtggtaatagtcacttctcagtggacgtgcaaagcgaagcccatgggcccaagtacccggagctggtgctggagggcacactggaccgggaaggagaagccgtttaccgcctggtccttactgccatggatggcggcgaccctgtccgctcaagcgtcgcccaaattctggtaacagttctagatgtgaatgacaacactccaatgtttactcagcctgtctaccgtgtaagtgttcctgaaaacctgccagtaggcacaccagtgttggcagtgactgccaccgaccaggatgaaggagtccacggggaagtaacttattcctttgtgaagattacagaaaagatctcacaaattttctgtttgaatgttttgactggagaaatttcaacttctgcaaatctagactatgaggactcgagtttttatgagctgggtgttgaagcccgggatgggccaggtcttcgagacagagcgaaagtcttaataactatcttggatgtcaatgataatgtaccagaagtggttgttacatctggaagcagaacaattgctgaaagtgcacctccaggaacagtaatcgccctttttcaagtgttcgatcgagactctggcctgaatggcctggtaacctgttccatcccgagaagtctcccatttgaattggaaaaatcagttggcaattattatcgattagtgacaaatgcagctctagaccgggaagaggtattcttgtacaacatcactgtgacagccacggacaaaggaacaccacctctgtctacagaaacaatcatctctctaaatgtggcagacaccaacgacaacccgcccaccttcccccattcatcctactcagtctatgtccttgaaaacaaccccaggggtgcctccatcttctctgtgaatgcactggaccctgacgtggaccagaacgcccaagtctcctactcactggcagaagacaccctccagggggcgcccctgtcctcctacgtgtccatcaactccgacactgggattctgtacgccctgcgctccttcgactatgagcagttgagagacctacagctgtgggtgacagccagcgacagcggggacccgcctcttagcagcaacgtgtcactgagcctgtttgtgctggaccagaatgacaatgcgcccgagatcctgtaccccgccctccccacagacggttccactggcgtggagctggcgccccgctccgcagagcccggctacctggtgaccaaggtggtggcggtggacagagactcgggccagaacgcctggctgtcctaccgcctgctcaaggccagcgagccaggacttttctcagtgggcctgcacacgggcgaggtgcgcacggcgcgcgccctgctggacagagacgcgctcaagcagagcctagtggtggccgtccaggaccacggccagccccctctctccgccactgtcacgctcaccgtggccgtggccgacaggatccccgacatcctggccgacctgggcagcctcgagccctccgccaaacccaacgattcggacctcactctgtacctggtggtggcggtggccgcggtctcctgcgtcttcctggccttcgtcatcgtgctgctggcgctcagactgcagcgctggcacaagtcacgcctgctgcaggcttcgggaggtggcttagcgagcatgcccggctcgcactttgtgggcgtggaaggggttcgggctttcctgcagacctattcccacgaggtctcactcactgcagactcgcgtaagagtcatctgattttcccccagcccaactatgccgacacgcttatcaaccaggagagctatgagaaaagcgagcctcttctgataactcaggatttacttgaaacgaaaggagaacccaggcaacttcagcaagccccgcccaacacggactggcgtttctctcaggcccagagacccggcaccagcggctcccaaaatggcgatgacaccggcacctggcccaacaaccagtttgacacagagatgctgcaagccatgatcttggcgtccgccagtgaagctgctgatgggagctccaccctgggagggggtgccggcaccatgggattgagcgcccgctacggaccccagttcaccctgcagcacgtgcccgactaccgccagaatgtctacatcccaggcagcaatgccacactgaccaacgcagctggcaagcgggatggcaaggccccagcaggtggcaatggcaacaagaagaagtcgggcaagaaggagaagaagtaacatggaggccaggccaagagccacagggcggcctctccccaaccagcccagcttctccttacctgcacccaggcctcagagtttcagggctaacccccagaatactggtaggggccaaggccatgctccccttgggaaacagaaacaagtgcccagtcagcacctaccccttcccccccagggggttgaatatgcaaaagcagttccgctgggaacccccatccaatcaactgctgtacccatgggggtagtggggttactgtagacaccaagaaccatttgccacaccccgtttagttacagctgaactcctccatcttccaaatcaatcaggcccatccatcccatgcctccctcctccccaccccactccaacagttcctctttcccgagtaaggtggttggggtgttgaagtaccaagtaacctacaagcctcctagttctgaaaagttggaagggcatcatgacctcttggcctctcctttgattctcaatcttcccccaaagcatggtttggtgccagccccttcacctccttccagagcccaagatcaatgctcaagttttggaggacatgatcaccatccccatggtactgatgcttgctggatttagggagggcattttgctaccaagcctcttcccaacgccctggggaccagtcttctgttttgtttttcattgtttgacgtttccactgcatgccttgacttcccccacctcctcctcaaacaagagactccactgcatgttccaagacagtatggggtggtaagataaggaagggaagtgtgtggatgtggatggtgggggcatggacaaagcttgacacatcaagttatcaaggccttggaggaggctctgtatgtcctcaggggactgacaacatcctccagattccagccataaaccaataactaggctggacccttcccactacataatagggctcagcccaggcagccagctttgggctgagctaacaggaccaatggattaaactggcatttcagtccaaggaagctcgaagcaggtttaggaccaggtccccttgagaggtcagaggggcctctgtgggtgctgggtactccagaggtgccactggtggaagggtcagcggagccccagcaggaagggtgggccagccaggccattcttagtccctgggttggggaggcagggagctagggcagggaccaaatgaacagaaagtctcagcccaggatggggcttcttcaacagggcccctgccctcctgaagcctcagtccttcaccttgccaggtgccgtttctcttccgtgaaggccactgcccaggtccccagtgcgccccctagtggccatagcctggttaaagttccccagtgcctccttgtgcatagaccttcttctcccacccccttctgcccctgggtccccggccatccagcggggctgccagagaaccccagacctgcccttacagtagtgtagcgccccctccctctttcggctggtgtagaatagccagtagtgtagtgcggtgtgcttttacgtgatggcgggtgggcagcgggcggcgggctccgcgcagccgtctgtccttgatctgcccgcggcggcccgtgttgtgttttgtgctgtgtccacgcgctaaggcgaccccctcccccgtactgacttctcctataagcgcttctcttcgcatagtcacgtagctcccaccccaccctcttcctgtgtctcacgcaagttttatactctaatatttatatggctttttttcttcgacaaaaaaataataaaacgtttcttctgaaaagctg

SEQ ID NO: 24905 - DNA, 4605 bp, Homo sapiens
  source 1..4605: mol_type = unassigned DNA
atggcggctcagccgaggggcggggactacagaggattcttcctgctctccatcctcctggggaccccctgggaagcctgggcaggacgtattctctactccgtgtcggaggagacggacaaagggtcctttgtgggagacatcgccaaggacctggggctggagccccgggagctggcggagcgcggagtccgcatcatctccagaggtaggacgcagcttttcgccctgaaccagcgcagcggcagcttggtcactgcgggcaggatagaccgggaagagatctgcgctcagagtgcgcggtgtctggtaaactttaacatcctgatggaagataaaatgaatctttaccctatagacgtggaaataatagatattaatgacaacgttccaagattcttgacggaagaaataaatgtaaaaataatggagaatacagctcctggggttcggtttccgttaagcgaggctggggatccagatgtgggcacgaactccctccagagttaccagctcagccccaatcgccacttctccctggctgtgcaaagtggagacgatgaaactaagtacccggaactggtgctggagcgggtgctggaccgggaggaagagcgggttcaccacctggtcctcacagcctctgatggcggcgacccgccccgatccagcaccgcccacatccaggtgacagtggtggatgtgaatgaccacacgcctgtcttctctctgcctcagtaccaagtaactgtccccgagaatgtgccagtgggtacaagactgctcacggtacatgctatcgacctggacgagggagtcaatggggaagtgacatattcttttcggaaaataactcctaaacttccaaagatgtttcatctgaactcgcttacaggagaaatatcaactttagaaggattagattatgaagaaactgccttctatgaaatggaggttcaggctcaagatggtcctggtagtctgacaaaggcaaaagtactgatcacagttttagatgtaaatgataatgctccagaagtgactatgacgtctttaagtagctcaatccctgaagacacacctcttgggacagtcattgctcttttctacctacaagacagagattctggaaagaatggtgaggtgacctgcaccattccagaaaacctaccttttaaattagaaaaatcaatagataattattatagattggtcacaaccaaaaacttggaccgggaaacactctctttgtataacatcacactgaaagccacagatggtggaactcctcccttgtccagggaaactcacatattcatgcaggtggcagacaccaacgataacccacccaccttcccccactcatcctactcagtctacatcgctgagaacaaccccagaggggcctccattttcttagtgactgcacaggaccacgacagtgaggataatgcccagatcacttattccttggccgaagacaccatccagggggctccagtgtcctcctatgtctccataaactctgacactggagtcctgtacgcgctgcaatcctttgattatgagcagttgagagaactacaactaagagtgactgcacatgacagcggggacccgcctctcagcagcaacatgtcactgagcctgttcgtgctggaccagaatgacaacccgcccgagatcctgtacccggccctccccacagatggttctactggcatggagctggcaccccgctccgcagagcccggctacctggtgaccaaggtggtggcggtggacaaagattcaggccagaacgcctggctgtcatacctcctgcttaaggccagcgagccaggactctttgcggttgggctgtacacgggcgaggtgcgcacggctcgggccctgctggacagagatgccctcaagcagagcctcgtggtggccgtccaggaccacggtcagcctcctctgtcagccaccgtcacactcaccgtggctgtggctgacagcatccccgaagtcttggccgacctgggcagccttgagccctccgacggtccttacaactatgacctcacgttgtacctggtggtggcggtggccacagtctcctgcgtcttcctagccttcgtcctcgtactgctggcgctcaggctgcggcgctggcacaagtcacgcctgctgcaggcttcagaaggtggcttggcgaacgtgcccacctcgcactttgtgggcatggacggggtgcaggctttcctgcagacctattcccatgaggtctccctcaccgcggactctcggaagagtcacctgatcttcccccagcccaactatgtagacatgctcatcagccaggagagctgtgagaaaaatgattctttgctaacatccgtagattttcaggaatgtaaagaaaacctgccaagtattcagcaagccccgcccaacacggactggcgtttctctcaggcccagagacccggcaccagcggctcccaaaatggcgatgacaccggcacctggcccaacaaccagtttgacacagagatgctgcaagccatgatcttggcgtccgccagtgaagctgctgatgggagctccaccctgggagggggtgccggcaccatgggattgagcgcccgctacggaccccagttcaccctgcagcacgtgcccgactaccgccagaatgtctacatcccaggcagcaatgccacactgaccaacgcagctggcaagcgggatggcaaggccccagcaggtggcaatggcaacaagaagaagtcgggcaagaaggagaagaagtaacatggaggccaggccaagagccacagggcggcctctccccaaccagcccagcttctccttacctgcacccaggcctcagagtttcagggctaacccccagaatactggtaggggccaaggccatgctccccttgggaaacagaaacaagtgcccagtcagcacctaccccttcccccccagggggttgaatatgcaaaagcagttccgctgggaacccccatccaatcaactgctgtacccatgggggtagtggggttactgtagacaccaagaaccatttgccacaccccgtttagttacagctgaactcctccatcttccaaatcaatcaggcccatccatcccatgcctccctcctccccaccccactccaacagttcctctttcccgagtaaggtggttggggtgttgaagtaccaagtaacctacaagcctcctagttctgaaaagttggaagggcatcatgacctcttggcctctcctttgattctcaatcttcccccaaagcatggtttggtgccagccccttcacctccttccagagcccaagatcaatgctcaagttttggaggacatgatcaccatccccatggtactgatgcttgctggatttagggagggcattttgctaccaagcctcttcccaacgccctggggaccagtcttctgttttgtttttcattgtttgacgtttccactgcatgccttgacttcccccacctcctcctcaaacaagagactccactgcatgttccaagacagtatggggtggtaagataaggaagggaagtgtgtggatgtggatggtgggggcatggacaaagcttgacacatcaagttatcaaggccttggaggaggctctgtatgtcctcaggggactgacaacatcctccagattccagccataaaccaataactaggctggacccttcccactacataatagggctcagcccaggcagccagctttgggctgagctaacaggaccaatggattaaactggcatttcagtccaaggaagctcgaagcaggtttaggaccaggtccccttgagaggtcagaggggcctctgtgggtgctgggtactccagaggtgccactggtggaagggtcagcggagccccagcaggaagggtgggccagccaggccattcttagtccctgggttggggaggcagggagctagggcagggaccaaatgaacagaaagtctcagcccaggatggggcttcttcaacagggcccctgccctcctgaagcctcagtccttcaccttgccaggtgccgtttctcttccgtgaaggccactgcccaggtccccagtgcgccccctagtggccatagcctggttaaagttccccagtgcctccttgtgcatagaccttcttctcccacccccttctgcccctgggtccccggccatccagcggggctgccagagaaccccagacctgcccttacagtagtgtagcgccccctccctctttcggctggtgtagaatagccagtagtgtagtgcggtgtgcttttacgtgatggcgggtgggcagcgggcggcgggctccgcgcagccgtctgtccttgatctgcccgcggcggcccgtgttgtgttttgtgctgtgtccacgcgctaaggcgaccccctcccccgtactgacttctcctataagcgcttctcttcgcatagtcacgtagctcccaccccaccctcttcctgtgtctcacgcaagttttatactctaatatttatatggctttttttcttcgacaaaaaaataataaaacgtttcttctgaaaagctg

SEQ ID NO: 24906 - DNA, 4605 bp, Homo sapiens
  source 1..4605: mol_type = unassigned DNA
atggccgctccacagagtcgccccagacgcggcgagctgatcctgctgtgcgcgctgctgggaacgctgtgggaaatcgggaggggacagattcgctactctgtgccagaagagacggacaaaggctccttcgtgggtaatatctccaaggacctggggctggacccccggaagctggcgaagcacggagtccgtatcgtctccagaggtaggacgcagctctttgctctgaacccgcgcagcggcagcttgatcaccgcgggcaggatagatcgggaggagctctgcgctcagagcccgcggtgtctgataaatattaacaccctggttgaggataaaggaaaactctttggggtagaaatagaaataattgatattaacgataataacccaaaattccaggtcgaagatctagaagtaaaaattaacgaaatcgcggttcctggagcacgttatccactcccagaagctgttgacccggatgtgggcgtgaactccctccagagctaccagctcagccccaatcaccacttctccctggacgtgcagactggagacaatggagccataaacccagagctggtgctggagcgcgccctggacagggaggaagaggctgctcaccacctggtcctcacggcctcggatggcggcaagccgcctcgctctagcacagtgcgcatccacgtgacagtgttggatacaaatgacaatgccccggtttttcctcacccgatttaccgagtgaaagtccttgagaacatgcccccaggcacgcggctgcttactgtaacagccagcgacccggatgagggaatcaacggaaaagtggcatacaaattccggaaaattaatgaaaaacaaactccgttattccagcttaatgaaaatactggggaaatatcaatagcaaaaagtctagattatgaagaatgttcattttatgaaatggaaatacaagccgaagatgtgggggcacttctggggaggaccaaattgctcatttcggtggaagatgtaaatgacaatagaccagaagtgatcattacgtctttgtttagcccagtgttagaaaattctcttcccgggacagtaattgccttcttgagtgtgcatgaccaagactctggaaagaatggtcaagttgtctgttacacacgtgataatttaccttttaaattagaaaagtcaataggtaattattatagattagtgacaaggaaatatttggaccgagaaaatgtctctatctacaatatcacagtgatggcctcagatctaggaacaccacctctgtccactgaaactcaaatcgctctgcacgtggcagacattaacgacaaccctcctactttccctcatgcctcctactcagcgtatatcctagagaacaacctgagaggagcctccatcttttccttgactgcacacgaccccgacagccaggagaatgcccaggtcacttactctgtgaccgaggacacgctgcagggggcgcccctgtcctcgtatatctccatcaactctgacaccggtgtcctgtatgcgctgcaatctttcgactatgagcagatccgagacctgcagctactggtaacagccagcgacagcggggacccgcccctcagcagcaacatgtcactgagcctgttcgtgctggaccagaatgacaacgcgcccgagatcctgtaccccgccctccccacagacggttccactggcgtggagctggcgccccgctccgcagagcgtggctacctggtgaccaaggtggtggcggtggacagagactcgggccagaacgcctggctgtcctaccgcctgctcaaggccagcgagccgggactcttctcggtgggtctgcacacgggcgaggtgcgcacggcgcgagccctgctggacagagatgcgctcaagcagagcctcgtggtggccgtccaggaccatggccagccccctctctccgccactgtcacgctcaccgtagccgtggctgacagcatccccgaagtcctgaccgagttgggcagtctgaagccttcggtcgacccgaacgattcgagccttacactctatctcgtggtggcagtggctgccatctcctgtgtcttcctcgcctttgtcgctgtgcttctggggctcaggctgaggcgctggcacaagtcacgcctgctccaggattccggtggcagattggtaggcgtgcctgcctcacattttgtgggtgttgaggaggtacaggctttcctgcagacctattcccaggaagtctccctcaccgccgactcgcggaagagtcacctgatctttccccagcccaactacgcagacatgctcatcagtcaggagggctgtgagaaaaatgattctttgttaacatccgtagattttcatgaatataagaatgaagctgatcatggtcagcaagccccgcccaacacggactggcgtttctctcaggcccagagacccggcaccagcggctcccaaaatggcgatgacaccggcacctggcccaacaaccagtttgacacagagatgctgcaagccatgatcttggcgtccgccagtgaagctgctgatgggagctccaccctgggagggggtgccggcaccatgggattgagcgcccgctacggaccccagttcaccctgcagcacgtgcccgactaccgccagaatgtctacatcccaggcagcaatgccacactgaccaacgcagctggcaagcgggatggcaaggccccagcaggtggcaatggcaacaagaagaagtcgggcaagaaggagaagaagtaacatggaggccaggccaagagccacagggcggcctctccccaaccagcccagcttctccttacctgcacccaggcctcagagtttcagggctaacccccagaatactggtaggggccaaggccatgctccccttgggaaacagaaacaagtgcccagtcagcacctaccccttcccccccagggggttgaatatgcaaaagcagttccgctgggaacccccatccaatcaactgctgtacccatgggggtagtggggttactgtagacaccaagaaccatttgccacaccccgtttagttacagctgaactcctccatcttccaaatcaatcaggcccatccatcccatgcctccctcctccccaccccactccaacagttcctctttcccgagtaaggtggttggggtgttgaagtaccaagtaacctacaagcctcctagttctgaaaagttggaagggcatcatgacctcttggcctctcctttgattctcaatcttcccccaaagcatggtttggtgccagccccttcacctccttccagagcccaagatcaatgctcaagttttggaggacatgatcaccatccccatggtactgatgcttgctggatttagggagggcattttgctaccaagcctcttcccaacgccctggggaccagtcttctgttttgtttttcattgtttgacgtttccactgcatgccttgacttcccccacctcctcctcaaacaagagactccactgcatgttccaagacagtatggggtggtaagataaggaagggaagtgtgtggatgtggatggtgggggcatggacaaagcttgacacatcaagttatcaaggccttggaggaggctctgtatgtcctcaggggactgacaacatcctccagattccagccataaaccaataactaggctggacccttcccactacataatagggctcagcccaggcagccagctttgggctgagctaacaggaccaatggattaaactggcatttcagtccaaggaagctcgaagcaggtttaggaccaggtccccttgagaggtcagaggggcctctgtgggtgctgggtactccagaggtgccactggtggaagggtcagcggagccccagcaggaagggtgggccagccaggccattcttagtccctgggttggggaggcagggagctagggcagggaccaaatgaacagaaagtctcagcccaggatggggcttcttcaacagggcccctgccctcctgaagcctcagtccttcaccttgccaggtgccgtttctcttccgtgaaggccactgcccaggtccccagtgcgccccctagtggccatagcctggttaaagttccccagtgcctccttgtgcatagaccttcttctcccacccccttctgcccctgggtccccggccatccagcggggctgccagagaaccccagacctgcccttacagtagtgtagcgccccctccctctttcggctggtgtagaatagccagtagtgtagtgcggtgtgcttttacgtgatggcgggtgggcagcgggcggcgggctccgcgcagccgtctgtccttgatctgcccgcggcggcccgtgttgtgttttgtgctgtgtccacgcgctaaggcgaccccctcccccgtactgacttctcctataagcgcttctcttcgcatagtcacgtagctcccaccccaccctcttcctgtgtctcacgcaagttttatactctaatatttatatggctttttttcttcgacaaaaaaataataaaacgtttcttctgaaaagctg

SEQ ID NO: 24907 - DNA, 4590 bp, Homo sapiens
  source 1..4590: mol_type = unassigned DNA
atgcagagagccagagaagccgaaatgatgaaaagtcaggtactgtttcccttcctgctgtctttgttctgcggggccatctcccagcagatccgatacacgattccagaggagctagccaacggctcacgggtggggaaacttgccaaggatctggggctcagtgtccgggagttgccaactcgaaaactgcgggttagtgcagaggattatttcaacgttagtttggagagcggggatttgttagtgaacggtaggatagatcgagagaagatttgcggaaggaaacttgagtgtgcactagaattcgaaacggtcgctgaaaacccaatgaatgttttccacgtggttgttgtaatccaagatattaatgacaatgcaccacgtttcgttgcaaaaggcattgacttagaaatttgtgagtcagccttacccggggtaaaattctctctggattctgctcaagatgcagatgtggaaggcaattcactgaagttatacaccatcaaccccaatcaatacttctctctgtcaacgaaggaaagtcctgatggaagtaaatatccggtattactgctggaaaaacctctagacagggaacatcagagctctcatcgcttaatcctgactgccatggatggcggggacccgcctctaagcggcaccacccatatctggatccgagttacggatgccaatgataatgctcccgtgtttagccaggaggtatacagggttagcctccaagaaaacgtaccgtggggaacctccgtgctgcgggtgatggccacagaccaggatgagggcattaatgcagagatcacctatgccttcctcaattccccaataagtaccagcctcttcaatctcaatccaaatactggcgacatcacaaccaatggcacattggattttgaagagacaagtagatatgtgttgagtgtggaagctaaggatggaggagtacacacagctcactgtaatgttcaaatagaaattgttgacgagaatgacaatgccccagaggtgacattcatgtccttctctaaccagattccagaggattcagaccttggaactgtaatagccctcataaaagtgcgagacaaggattctgggcaaaatggcatggtgacatgctatactcaggaagaagttcctttcaaattagaatccacctcgaagaattattacaagctggtgattgctggagccctaaaccgggagcagacagcagactacaacgtcacaatcatagccaccgacaagggcaaaccagccctttcctccaggacaagcatcaccctgcacatctccgacatcaacgacaatgcacctgttttccatcaggcctcctatgtggtccacgtgtctgagaacaacccacctggcgcctccattgcacaagtaagcgcctccgacccggatttgggacccaacggcagagtctcctactctattctggccagtgacctggagccgcgggagctgttgtcctacgtgtccgtgagcccgcagagcggggtggtgttcgcgcagcgcgccttcgaccacgagcagctgcgcgccttcgagctcacactgcaggccagggaccagggctcccccgcgctcagcgccaacgtgagcctgcgcgtgttggtgggcgacctcaatgacaatgcgccacgggtgctgtaccccgcgctggggcctgatggctccgccctcttcgatatggtgccacgcgccgcagagcccggctacctggtgaccaaggtggtggcggtggacgcagactcaggacacaacgcttggctgtcctaccacgtgctgcaggccagcgagcccgggctcttcagcctggggttgcgcacgggtgaggtgcgcacagcgcgtgccttgggcgacagggacgcggcccgccagcgcctgctggtcgctgtgcgtgatggaggacagccgccactctccgccaccgccacgctgcacctaatcttcgcggatagcctgcaagaggtattgccagacctcagcgaccgccctgagccctctgacccccagacggaactgcagttttacctggttgtggccttggccttgatctcagtgctctttctcctcgcggtgattctagcgatcgccctgcgcctgcgacgttcctccagcctcgacactgagggctgctttcaaaccggtctctgctccaagtctgggcccggggttcctcccaaccacagcgaggggactttgccctattcctacaatctatgtattgcctctcattctgcaaagacagagtttaattctctcaacctgacaccggaaatggctccccctcaggatctgctgtgtgatgatccttctatggttgtatgtgccagtaatgaagatcacaaaatcgcttatgacccttctttgtcttcgcaccaagccccgcccaacacggactggcgtttctctcaggcccagagacccggcaccagcggctcccaaaatggcgatgacaccggcacctggcccaacaaccagtttgacacagagatgctgcaagccatgatcttggcgtccgccagtgaagctgctgatgggagctccaccctgggagggggtgccggcaccatgggattgagcgcccgctacggaccccagttcaccctgcagcacgtgcccgactaccgccagaatgtctacatcccaggcagcaatgccacactgaccaacgcagctggcaagcgggatggcaaggccccagcaggtggcaatggcaacaagaagaagtcgggcaagaaggagaagaagtaacatggaggccaggccaagagccacagggcggcctctccccaaccagcccagcttctccttacctgcacccaggcctcagagtttcagggctaacccccagaatactggtaggggccaaggccatgctccccttgggaaacagaaacaagtgcccagtcagcacctaccccttcccccccagggggttgaatatgcaaaagcagttccgctgggaacccccatccaatcaactgctgtacccatgggggtagtggggttactgtagacaccaagaaccatttgccacaccccgtttagttacagctgaactcctccatcttccaaatcaatcaggcccatccatcccatgcctccctcctccccaccccactccaacagttcctctttcccgagtaaggtggttggggtgttgaagtaccaagtaacctacaagcctcctagttctgaaaagttggaagggcatcatgacctcttggcctctcctttgattctcaatcttcccccaaagcatggtttggtgccagccccttcacctccttccagagcccaagatcaatgctcaagttttggaggacatgatcaccatccccatggtactgatgcttgctggatttagggagggcattttgctaccaagcctcttcccaacgccctggggaccagtcttctgttttgtttttcattgtttgacgtttccactgcatgccttgacttcccccacctcctcctcaaacaagagactccactgcatgttccaagacagtatggggtggtaagataaggaagggaagtgtgtggatgtggatggtgggggcatggacaaagcttgacacatcaagttatcaaggccttggaggaggctctgtatgtcctcaggggactgacaacatcctccagattccagccataaaccaataactaggctggacccttcccactacataatagggctcagcccaggcagccagctttgggctgagctaacaggaccaatggattaaactggcatttcagtccaaggaagctcgaagcaggtttaggaccaggtccccttgagaggtcagaggggcctctgtgggtgctgggtactccagaggtgccactggtggaagggtcagcggagccccagcaggaagggtgggccagccaggccattcttagtccctgggttggggaggcagggagctagggcagggaccaaatgaacagaaagtctcagcccaggatggggcttcttcaacagggcccctgccctcctgaagcctcagtccttcaccttgccaggtgccgtttctcttccgtgaaggccactgcccaggtccccagtgcgccccctagtggccatagcctggttaaagttccccagtgcctccttgtgcatagaccttcttctcccacccccttctgcccctgggtccccggccatccagcggggctgccagagaaccccagacctgcccttacagtagtgtagcgccccctccctctttcggctggtgtagaatagccagtagtgtagtgcggtgtgcttttacgtgatggcgggtgggcagcgggcggcgggctccgcgcagccgtctgtccttgatctgcccgcggcggcccgtgttgtgttttgtgctgtgtccacgcgctaaggcgaccccctcccccgtactgacttctcctataagcgcttctcttcgcatagtcacgtagctcccaccccaccctcttcctgtgtctcacgcaagttttatactctaatatttatatggctttttttcttcgacaaaaaaataataaaacgtttcttctgaaaagctg

SEQ ID NO: 24908 - DNA, 4602 bp, Homo sapiens
  source 1..4602: mol_type = unassigned DNA
atgaaagcgagctcagggaggtgcgggctggtgcggtggctgcaggtactgttgcccttcctgttgtctttgttccccggggctctcccagtccagatccgctattcaattccagaggagctggccaaaaactcggtcgtaggaaacctcgccaaggatctggggctcagcgtccgggacttgccagcccggaagctgcgggttagcgcggagaaggaatatttcacagtaaacccagaaagcggagacttacttgtgagtgacagaatagaccgagaacagatatgcgggaagcagcctctgtgtgttctggatttcgatactgtcgctgaaaatccactaaatattttctacatagcagtaattgtgcaggatataaatgataataccccgctattcaaacagactaagattaatttaaaaattggcgaatccactaagccaggtacaacatttccacttgacccagccctggattcagatgttggtcctaactcactacaaagataccaccttaatgacaacgagtactttgatctcgctgagaaacagactccagatggtcgtaaatatcctgagttgattctaaaacactctctggacagagaagagcacagtttacatcaattggtcctcacagctgtggatggcggagacccacctcaaagtggcacgacccaaatccgaatcaaagtcacggatgccaacgataaccctccagtgttcagccaggacgtgtacagggtcaccctgagggaggacgtgccgccgggcttctttgtgcttcaagtgacagccaccgaccgggatgaaggcataaacgcagagatcacctactcctttcataatgtggacgaacaagtgaaacactttttcaacttaaatgaaaaaacaggagaaatcacgacaaaggatgatttggattttgagattgcaagtagttacactctgagtatcgaagcaaaagatcctggagatctagcagcccactgcagtatccaagttgaaattcttgatgacaacgattgtgcacctgaagttattgtgacttcagtatctactcccctaccggaggattcgccaccaggaacagtgatcgccttgataaaaacgagagacagagactctggagaaaatggagaagtttactgccaagtgttgggaaatgccaagtttattttgaaatcttcctcaaagaactattacaaactagtgacagacggcgctctggaccgggaggagatcccagaatacaatctcaccatcacagccaccgacgggggcaagccgcccctctcctccagcataattgtcaccctgcacatctccgacgtcaacgataatgccccagttttccaacagacttcctacatggttcacgtggcagagaacaatcctcctggcgcctctatcgctcaaatcagtgcctctgaccctgacttgggccccagtggccaagtttcctactccatcgtagcgagcgacctgaagccgcgggagattttatcctacgtgtccgtgagcgcgcagagcggggtggtgttcgcgcagcgcgccttcgatcatgagcagctgcgcgccttcgagctcacactgcaggcccgcgaccagggctcgcccgcgctcagcgccaacgtgagcctgcgcgtgttagtgggcgacctcaatgacaatgcgccacgggtgctgtaccccgcgctggggcctgatggctccgccctcttcgatatggtgccacgcgccgcagagcccggctacctggtgaccaaggtggtggcggtggacgcagactcaggacacaacgcttggctgtcctaccacgtgctgcaggccagcgagcccgggctcttcagcctggggttgcgcacgggtgaggtgcgcacagcgcgtgccttgggcgacagggacgcggcccgccagcgcctgctggtcgctgtgcgtgatggaggacagccgccactctccgctacggccacgctgcacctaatcttcgcggatagcctgcaagaggtattgccagacctcagcgaccgccgggagccctctgacccccaggcaaaactgcagttttacctggttgtggccttggccttgatctcagtgctcttcttcctcgcggtgattctggcaatctccctgcgcctgcgactctcttccaggtcagatgcttgggactgttttcagcctggtctcagctccaagcctggacctggggttctccccaattacagtgagggtacattgccctattcctacaacctgtgtgttgcctcacaatcagccaagacagagttcaattttctgaacataaccccggaattggttcccgcgcaagatctcgtctgtgacaatgcctcttgggaacaaaatacaaatcatggagccgctggggtcccttttgcctcagatactattttgaagcaagccccgcccaacacggactggcgtttctctcaggcccagagacccggcaccagcggctcccaaaatggcgatgacaccggcacctggcccaacaaccagtttgacacagagatgctgcaagccatgatcttggcgtccgccagtgaagctgctgatgggagctccaccctgggagggggtgccggcaccatgggattgagcgcccgctacggaccccagttcaccctgcagcacgtgcccgactaccgccagaatgtctacatcccaggcagcaatgccacactgaccaacgcagctggcaagcgggatggcaaggccccagcaggtggcaatggcaacaagaagaagtcgggcaagaaggagaagaagtaacatggaggccaggccaagagccacagggcggcctctccccaaccagcccagcttctccttacctgcacccaggcctcagagtttcagggctaacccccagaatactggtaggggccaaggccatgctccccttgggaaacagaaacaagtgcccagtcagcacctaccccttcccccccagggggttgaatatgcaaaagcagttccgctgggaacccccatccaatcaactgctgtacccatgggggtagtggggttactgtagacaccaagaaccatttgccacaccccgtttagttacagctgaactcctccatcttccaaatcaatcaggcccatccatcccatgcctccctcctccccaccccactccaacagttcctctttcccgagtaaggtggttggggtgttgaagtaccaagtaacctacaagcctcctagttctgaaaagttggaagggcatcatgacctcttggcctctcctttgattctcaatcttcccccaaagcatggtttggtgccagccccttcacctccttccagagcccaagatcaatgctcaagttttggaggacatgatcaccatccccatggtactgatgcttgctggatttagggagggcattttgctaccaagcctcttcccaacgccctggggaccagtcttctgttttgtttttcattgtttgacgtttccactgcatgccttgacttcccccacctcctcctcaaacaagagactccactgcatgttccaagacagtatggggtggtaagataaggaagggaagtgtgtggatgtggatggtgggggcatggacaaagcttgacacatcaagttatcaaggccttggaggaggctctgtatgtcctcaggggactgacaacatcctccagattccagccataaaccaataactaggctggacccttcccactacataatagggctcagcccaggcagccagctttgggctgagctaacaggaccaatggattaaactggcatttcagtccaaggaagctcgaagcaggtttaggaccaggtccccttgagaggtcagaggggcctctgtgggtgctgggtactccagaggtgccactggtggaagggtcagcggagccccagcaggaagggtgggccagccaggccattcttagtccctgggttggggaggcagggagctagggcagggaccaaatgaacagaaagtctcagcccaggatggggcttcttcaacagggcccctgccctcctgaagcctcagtccttcaccttgccaggtgccgtttctcttccgtgaaggccactgcccaggtccccagtgcgccccctagtggccatagcctggttaaagttccccagtgcctccttgtgcatagaccttcttctcccacccccttctgcccctgggtccccggccatccagcggggctgccagagaaccccagacctgcccttacagtagtgtagcgccccctccctctttcggctggtgtagaatagccagtagtgtagtgcggtgtgcttttacgtgatggcgggtgggcagcgggcggcgggctccgcgcagccgtctgtccttgatctgcccgcggcggcccgtgttgtgttttgtgctgtgtccacgcgctaaggcgaccccctcccccgtactgacttctcctataagcgcttctcttcgcatagtcacgtagctcccaccccaccctcttcctgtgtctcacgcaagttttatactctaatatttatatggctttttttcttcgacaaaaaaataataaaacgtttcttctgaaaagctg

SEQ ID NO: 24909 - DNA, 4578 bp, Homo sapiens
  source 1..4578: mol_type = unassigned DNA
atggggagcggcgccggggagctgggccgggctgagaggctgccagtgctctttctcttcctgctgtctttgttctgcccggcgctctgtgagcagatccgctacaggattcccgaggaaatgcccaagggctccgtagtggggaacctcgccacggacctggggttcagcgtccaggagttaccgactcgaaaactgcgcgtcagttcggagaagccttacttcaccgtgagcgcagagagcggggagttgcttgtgagcagcaggctagacagggaggagatatgcgggaagaagccagcttgtgctctggaatttgaggctgttgctgaaaatccactgaacttttatcacgtgaatgtggagatcgaggacattaatgaccacacgccaaaattcacgcaaaattcctttgagctgcaaataagtgagtctgcacagcctggcacacgatttatattaggatctgcccatgatgcggatattggtagcaacacactgcagaattaccaactcagtcccagtgatcatttctcactgataaataaagagaaatcagatggcagtaaataccctgagatggtattgaagacacctttggacagagaaaagcagaaatcctaccacttgactttgactgccttggactttggagctccacccctaagcagcactgcacagatacacgttctagtgactgatgccaatgataatgctccagtgttcagtcaagacgtatacagggtgagcctttcagaaaacgtgtacccggggaccacggtgctacaggtgactgccacggaccaggatgagggtgtcaatgccgagattactttctctttcagtgaagctagccagatcacccaatttgacctgaactctaacaccggggaaattactgttttaaatacattagattttgaagaagtcaaagaatattccatagttttggaagcaagggacggtggaggaatgattgcgcaatgcacagtggaggtagaagtcatagatgaaaatgacaacgccccagaagtgatattccagtctctacccaacctaattatggaggacgccgagctgggaacacatattgctttgctcaaagtccgtgacaaggattccagacacaatggagaagtgacttgtaaattggaaggtgatgttccatttaaaatattaacttcttcaagaaacacgtataaattagtgacagatgctgttctagaccgcgagcagaatccagagtacaatataaccgttacggcaacagatcggggcaagcctcccctctcctccagttccagcatcaccctgcacattggtgatgtaaatgacaacgctccggttttctcacagtcttcctatatagtccacgtggccgagaacaacccgcctggagcctctatttcacaagtcagggcttctgatccggacttggggcccaacggccaagtctcttactgcatcatggccagtgacctggagcagcgggagctgtcatcctacgtgtccataagcgcggagagcggggtggtgttcgcgcagcgcgccttcgaccacgagcagctgcgcgccttcgaactcacactgcaggcccgcgaccagggctcgccagcgctcagcgcgaacgtgagcctgcgcgtgttagtggacgaccgcaacgacaatgcgccacgggtgctgtaccccgcgctgggtcccgacggctctgcgctcttcgatatggtgccgcacgctgcagagcctggctacttggtgaccaaggtagtggcggtggacgcagactcaggacacaacgcctggctgtcctaccacgtgctgcaggctagcgagcccgggctcttcagcctggggctgcgcacgggcgaagtgcgcacagcgcgtgccttaggcgacagggacgccgtccgccagcgccttctggtcgccgtgcgtgacggtggacagccaccactctcggccactgccacgttgcacctggtcttcgccgacagcttgcaggaggtgctgccggatatcactgaccgccccgacccctctgacctccaggctgagctgcagttttacctagtggtggccttggccttgatctcagtgctcttcctcgtggccatgattctggccattgccttgcgcctgcgacgctcctccagccccgcctcctggagctgcttccagcctggtctctgtgttaaatccgaatccgtggttccccccaactacagcgaggggactttgccttattcctacaatctatgtgttgcacatacaggaaagacggagtttaatttcctaaaatgtagtgagcagttgagttcaggacaagacatactttgcggtgattcatctggggccttatttccactttgtaattccagtgaattgacttcccatcagcaagccccgcccaacacggactggcgtttctctcaggcccagagacccggcaccagcggctcccaaaatggcgatgacaccggcacctggcccaacaaccagtttgacacagagatgctgcaagccatgatcttggcgtccgccagtgaagctgctgatgggagctccaccctgggagggggtgccggcaccatgggattgagcgcccgctacggaccccagttcaccctgcagcacgtgcccgactaccgccagaatgtctacatcccaggcagcaatgccacactgaccaacgcagctggcaagcgggatggcaaggccccagcaggtggcaatggcaacaagaagaagtcgggcaagaaggagaagaagtaacatggaggccaggccaagagccacagggcggcctctccccaaccagcccagcttctccttacctgcacccaggcctcagagtttcagggctaacccccagaatactggtaggggccaaggccatgctccccttgggaaacagaaacaagtgcccagtcagcacctaccccttcccccccagggggttgaatatgcaaaagcagttccgctgggaacccccatccaatcaactgctgtacccatgggggtagtggggttactgtagacaccaagaaccatttgccacaccccgtttagttacagctgaactcctccatcttccaaatcaatcaggcccatccatcccatgcctccctcctccccaccccactccaacagttcctctttcccgagtaaggtggttggggtgttgaagtaccaagtaacctacaagcctcctagttctgaaaagttggaagggcatcatgacctcttggcctctcctttgattctcaatcttcccccaaagcatggtttggtgccagccccttcacctccttccagagcccaagatcaatgctcaagttttggaggacatgatcaccatccccatggtactgatgcttgctggatttagggagggcattttgctaccaagcctcttcccaacgccctggggaccagtcttctgttttgtttttcattgtttgacgtttccactgcatgccttgacttcccccacctcctcctcaaacaagagactccactgcatgttccaagacagtatggggtggtaagataaggaagggaagtgtgtggatgtggatggtgggggcatggacaaagcttgacacatcaagttatcaaggccttggaggaggctctgtatgtcctcaggggactgacaacatcctccagattccagccataaaccaataactaggctggacccttcccactacataatagggctcagcccaggcagccagctttgggctgagctaacaggaccaatggattaaactggcatttcagtccaaggaagctcgaagcaggtttaggaccaggtccccttgagaggtcagaggggcctctgtgggtgctgggtactccagaggtgccactggtggaagggtcagcggagccccagcaggaagggtgggccagccaggccattcttagtccctgggttggggaggcagggagctagggcagggaccaaatgaacagaaagtctcagcccaggatggggcttcttcaacagggcccctgccctcctgaagcctcagtccttcaccttgccaggtgccgtttctcttccgtgaaggccactgcccaggtccccagtgcgccccctagtggccatagcctggttaaagttccccagtgcctccttgtgcatagaccttcttctcccacccccttctgcccctgggtccccggccatccagcggggctgccagagaaccccagacctgcccttacagtagtgtagcgccccctccctctttcggctggtgtagaatagccagtagtgtagtgcggtgtgcttttacgtgatggcgggtgggcagcgggcggcgggctccgcgcagccgtctgtccttgatctgcccgcggcggcccgtgttgtgttttgtgctgtgtccacgcgctaaggcgaccccctcccccgtactgacttctcctataagcgcttctcttcgcatagtcacgtagctcccaccccaccctcttcctgtgtctcacgcaagttttatactctaatatttatatggctttttttcttcgacaaaaaaataataaaacgtttcttctgaaaagctg

SEQ ID NO: 24910 - DNA, 4599 bp, Homo sapiens
  source 1..4599: mol_type = unassigned DNA
atgggagggagctgcgcgcagaggcgccgggccggcccgcggcaggtgctatttcctttgctgctgcctttgttctaccccaccctgagtgagccgatccgctactcgattccggaggagctggccaagggctcggtggtggggaacctcgctaaggatctagggctcagtgtcctggatgtgtcggctcgcaagctgcgagtgagcgcggagaagctgcacttcagcgtagacgcggagagcggggacttacttgtgaagaaccgaatagaccgtgagcaaatatgcaaagagagaagaagatgtgagttgcaattggaagctgtggtggaaaatcctttaaatatttttcatgtcattgtggtgattgaggatgttaatgaccacgcccctcaatttgataaaaaggaaatacatttagaaattttcgaatctgcatccgctggtacacgactatcgcttgaccctgccacggatcctgatataaacataaactcaattaaagattataagataaactctaatccttatttttcattaatggttagagttaattccgatggtggcaaatacccagagttatctctggagaaactcctagaccgggaagaacagagatctcatagcttgatattgactgccttggacggaggggacccaccaagaagtgccaccgctcacatagaaatttctgtcaaggataccaatgataaccccccggttttcagcagagacgaatatagaattagtcttagtgaaaatctgccccctgggtcccctgtgttgcaagtgacagccactgaccaggatgagggggtcaatgctgagataaactactacttccgaagcactgcccagagcacaaaacatatgttctcattggatgagaaaacaggtatgattaagaataaccagtcatttgattttgaagatgtagaaaggtacaccatggaagtggaagcgaaggacggaggtggtctctctacccagtgtaaagtaatcatagaaatccttgatgaaaacgacaacagcccagaaataatcatcacttctctctctgatcagattttggagaattcacctccaggaatggttgttgccctcttcaaaacacgggatctggatttcggaggaaatggagaagtcaggtgtaatatagaaacagacattccattcaagatttattcttcttccaataactactacaaactggtgacagatggagccctggaccgagagcagacaccagaatacaatgtcaccatcgtagccactgacaggggcaagccgcctctttcttccagtagaagcatcaccttgtatgtcgctgacatcaacgacaacgccccagttttcgaccagacgtcctacgtggtccacgtggccgagaacaacccgccaggagcctccattgcgcaagtgagcgcctctgacccggatttggggctcaatggccacatctcctactctatagtggcgagtgacctagagcccctggcggtgtcgtcatacgtgtcagtgagcgcgcagagcggggtggtgttcgcgcagcgcgcctttgatcacgagcagctgcgcgccttcgcgctcacgctgcaggcccgcgaccacggctcgcccacgctcagcgccaacgtgagcctgcgcgtgttggtgggagaccgcaatgacaacgcaccgcgggtgctgtacccagctctgggtcctgacggctccgcgttcttcgatatggtacctcgctctgcagagcccggctacctagtgactaaggtggtagcggtggacgccgactcgggacacaacgcctggctgtcctaccacgtgctgcaggccagtgagcccggactcttcagcctggggctgcgcactggggaggtgcgcacggctcgagccttaggcgacagggacgcagcccgccagcgcctgctggtcgctgtgcgtgacggtggacagccgccactctctgccaccgccacgcttcatctggtcttcgcagacaacttgcaagagatactgccagacctcagcgaccgccctgtactctctgacccccaggctgaactgcagttttacctggtggtggccttggccttaatctcagtgctcttcctcctcgccgtgattctggccattgccttgcgcctgcgacgctctctcagccctgctacttgggactgcttccatcctggtctctgtgtcaagtctggacctgtagttccccccaactacagtgaggggactttgccttattcttataatctgtgcattgcacatacgggtacaaaagagtttaatttcctaaaatgcagtgtgcccctacattccaatgaagacatggtttgcagtgtttctcctggagccttaattccacctcatggtggggaggatttgacttcacatcctgagactctgacttcgcaagccccgcccaacacggactggcgtttctctcaggcccagagacccggcaccagcggctcccaaaatggcgatgacaccggcacctggcccaacaaccagtttgacacagagatgctgcaagccatgatcttggcgtccgccagtgaagctgctgatgggagctccaccctgggagggggtgccggcaccatgggattgagcgcccgctacggaccccagttcaccctgcagcacgtgcccgactaccgccagaatgtctacatcccaggcagcaatgccacactgaccaacgcagctggcaagcgggatggcaaggccccagcaggtggcaatggcaacaagaagaagtcgggcaagaaggagaagaagtaacatggaggccaggccaagagccacagggcggcctctccccaaccagcccagcttctccttacctgcacccaggcctcagagtttcagggctaacccccagaatactggtaggggccaaggccatgctccccttgggaaacagaaacaagtgcccagtcagcacctaccccttcccccccagggggttgaatatgcaaaagcagttccgctgggaacccccatccaatcaactgctgtacccatgggggtagtggggttactgtagacaccaagaaccatttgccacaccccgtttagttacagctgaactcctccatcttccaaatcaatcaggcccatccatcccatgcctccctcctccccaccccactccaacagttcctctttcccgagtaaggtggttggggtgttgaagtaccaagtaacctacaagcctcctagttctgaaaagttggaagggcatcatgacctcttggcctctcctttgattctcaatcttcccccaaagcatggtttggtgccagccccttcacctccttccagagcccaagatcaatgctcaagttttggaggacatgatcaccatccccatggtactgatgcttgctggatttagggagggcattttgctaccaagcctcttcccaacgccctggggaccagtcttctgttttgtttttcattgtttgacgtttccactgcatgccttgacttcccccacctcctcctcaaacaagagactccactgcatgttccaagacagtatggggtggtaagataaggaagggaagtgtgtggatgtggatggtgggggcatggacaaagcttgacacatcaagttatcaaggccttggaggaggctctgtatgtcctcaggggactgacaacatcctccagattccagccataaaccaataactaggctggacccttcccactacataatagggctcagcccaggcagccagctttgggctgagctaacaggaccaatggattaaactggcatttcagtccaaggaagctcgaagcaggtttaggaccaggtccccttgagaggtcagaggggcctctgtgggtgctgggtactccagaggtgccactggtggaagggtcagcggagccccagcaggaagggtgggccagccaggccattcttagtccctgggttggggaggcagggagctagggcagggaccaaatgaacagaaagtctcagcccaggatggggcttcttcaacagggcccctgccctcctgaagcctcagtccttcaccttgccaggtgccgtttctcttccgtgaaggccactgcccaggtccccagtgcgccccctagtggccatagcctggttaaagttccccagtgcctccttgtgcatagaccttcttctcccacccccttctgcccctgggtccccggccatccagcggggctgccagagaaccccagacctgcccttacagtagtgtagcgccccctccctctttcggctggtgtagaatagccagtagtgtagtgcggtgtgcttttacgtgatggcgggtgggcagcgggcggcgggctccgcgcagccgtctgtccttgatctgcccgcggcggcccgtgttgtgttttgtgctgtgtccacgcgctaaggcgaccccctcccccgtactgacttctcctataagcgcttctcttcgcatagtcacgtagctcccaccccaccctcttcctgtgtctcacgcaagttttatactctaatatttatatggctttttttcttcgacaaaaaaataataaaacgtttcttctgaaaagctg

SEQ ID NO: 24911 - DNA, 4596 bp, Homo sapiens
  source 1..4596: mol_type = unassigned DNA
atgggagggagctgcgcgcagaggcgccgggccggcccgcggcaggtactatttcctttgctgctgcctttgttctaccccacgctgtgtgagccgatccgctactcgattccggaggagctggccaagggctcggtggtggggaacctcgctaaggatctagggcttagtgtcctggatgtgtcggctcgcgagctgcgagtgagcgcggagaagctgcacttcagcgtagacgcgcagagcggggacttacttgtgaaggaccgaatagaccgtgagcaaatatgcaaagagagaagaagatgtgagttgcaattggaagctgtggtggaaaatcctttaaatatttttcatgtcattgtggtgattgaggatgttaatgaccacgcccctcaattccggaaagatgaaataaacttagaaatcagtgaatccgtcagcctggggatgggaacaattcttgagtctgcagaagatcctgatattagtatgaattcgctgagcaaataccaactaagtcctaacgagtatttctcattggtggagaaagacaatcctgatggtggcaaatatccagaattagtattgcagaagactctggaccgagaaacgcagagcgctcaccacttggtactgaccgccttagatggtggggaccctccccgaagcggtactgctcagataagaatcctggtaatagatgccaatgacaaccccccagtgttcagccaggacgtgtacagggttagccttcgggaagacgtgcctccaggcacctccatcctgagagtgaaggccactgaccaggacgagggcatcaactcagagatcacttattccttctttggtgtggctgacaaagctcagcacgtgttctctctggattacactacaggaaacattctaactcagcagcctttggattttgaagaagtagaaagatatacgataaacatagaagcaaaagaccgaggatctctctcaacacggtgtaaagtaattgtagaagttgtagacgaaaacgacaacagcccagaaataatcatcacgtcactctctgatcagattatggaggattcccctccaggagtggttgttgccctcttcaaaacacgggaccaagactcaggggaaaatggggaagtcaggtgtagcttaagtagaggtgttccatttaagattcattcttcttctaataattactacaagctagtaacagatgaggccctggatcgggagcagaccccagagtacaacgtcaccatcgcagccacagacaggggcaagcctccgttatcctccagcaaaaccataaccctgcacattactgacgtcaatgacaacgcgccggttttcggacagtcagcctacctggtccacgtgccagaaaacaaccagccgggtgcctccatagcgcaagtcagtgcctctgacccagacttcgggctcaacggccgtgtctcctactctctcattgccagcgacctggagtcacgaacgctgtcgtcctacgtgtccgtgagcgcgcagagcggggtggtgttcgcgcagcgcgccttcgaccacgagcagctgcgcaccttcgagctcacgctgcaggcccgcgaccagggctcgcccgcgctcagcgccaatgtgagcctgcgcgtgttggtgggcgaccgtaacgacaacgcaccgcgggtgctgtaccctgcgctgggtcccgacggctccgcgctcttcgacacagtgccgcgggccgcgcagccaggctacctggtgaccaaggtggtggccgtggacgcggactcggggcacaatgcctggctgtcctaccacgtggtgcaggccagtgagcccgggctcttcagcctggggctgcgaacaggcgaggtgcgcatggtgcgtgctttgggtgacaaggactcggtccgccagcgcctgctagtcgctgtaagagatggaggacagccacccctttcagccactgccacgctgcacctggtgttcgcagatagcttgcaagaggtactgccggatttcagcgaccatcccacaccctctgactcccaggctgagatgcagttttacctggtggtggccttggccttgatttctgtgctctttctcctcgcggtgattctagctattgctctacgcctgcgacagtctttcagccctactgcaggagactgctttgagtcagttctctgctccaagtccggacctgtgggtccccccaactacagtgagggaacgttgccctatgcctataatttttgtgtgcctggggatcaaatgaatccagaatttaattttttcacatctgttgatcattgtccagccacacaagataacctcaacaaagatagcatgctactggctagcattttaactcccagcgttgaagcagataagaagattcttaaacagcaagccccgcccaacacggactggcgtttctctcaggcccagagacccggcaccagcggctcccaaaatggcgatgacaccggcacctggcccaacaaccagtttgacacagagatgctgcaagccatgatcttggcgtccgccagtgaagctgctgatgggagctccaccctgggagggggtgccggcaccatgggattgagcgcccgctacggaccccagttcaccctgcagcacgtgcccgactaccgccagaatgtctacatcccaggcagcaatgccacactgaccaacgcagctggcaagcgggatggcaaggccccagcaggtggcaatggcaacaagaagaagtcgggcaagaaggagaagaagtaacatggaggccaggccaagagccacagggcggcctctccccaaccagcccagcttctccttacctgcacccaggcctcagagtttcagggctaacccccagaatactggtaggggccaaggccatgctccccttgggaaacagaaacaagtgcccagtcagcacctaccccttcccccccagggggttgaatatgcaaaagcagttccgctgggaacccccatccaatcaactgctgtacccatgggggtagtggggttactgtagacaccaagaaccatttgccacaccccgtttagttacagctgaactcctccatcttccaaatcaatcaggcccatccatcccatgcctccctcctccccaccccactccaacagttcctctttcccgagtaaggtggttggggtgttgaagtaccaagtaacctacaagcctcctagttctgaaaagttggaagggcatcatgacctcttggcctctcctttgattctcaatcttcccccaaagcatggtttggtgccagccccttcacctccttccagagcccaagatcaatgctcaagttttggaggacatgatcaccatccccatggtactgatgcttgctggatttagggagggcattttgctaccaagcctcttcccaacgccctggggaccagtcttctgttttgtttttcattgtttgacgtttccactgcatgccttgacttcccccacctcctcctcaaacaagagactccactgcatgttccaagacagtatggggtggtaagataaggaagggaagtgtgtggatgtggatggtgggggcatggacaaagcttgacacatcaagttatcaaggccttggaggaggctctgtatgtcctcaggggactgacaacatcctccagattccagccataaaccaataactaggctggacccttcccactacataatagggctcagcccaggcagccagctttgggctgagctaacaggaccaatggattaaactggcatttcagtccaaggaagctcgaagcaggtttaggaccaggtccccttgagaggtcagaggggcctctgtgggtgctgggtactccagaggtgccactggtggaagggtcagcggagccccagcaggaagggtgggccagccaggccattcttagtccctgggttggggaggcagggagctagggcagggaccaaatgaacagaaagtctcagcccaggatggggcttcttcaacagggcccctgccctcctgaagcctcagtccttcaccttgccaggtgccgtttctcttccgtgaaggccactgcccaggtccccagtgcgccccctagtggccatagcctggttaaagttccccagtgcctccttgtgcatagaccttcttctcccacccccttctgcccctgggtccccggccatccagcggggctgccagagaaccccagacctgcccttacagtagtgtagcgccccctccctctttcggctggtgtagaatagccagtagtgtagtgcggtgtgcttttacgtgatggcgggtgggcagcgggcggcgggctccgcgcagccgtctgtccttgatctgcccgcggcggcccgtgttgtgttttgtgctgtgtccacgcgctaaggcgaccccctcccccgtactgacttctcctataagcgcttctcttcgcatagtcacgtagctcccaccccaccctcttcctgtgtctcacgcaagttttatactctaatatttatatggctttttttcttcgacaaaaaaataataaaacgtttcttctgaaaagctg

SEQ ID NO: 24912 - DNA, 4711 bp, Homo sapiens
  source 1..4711: mol_type = unassigned DNA
gtcggactcggcgcccagcgcccaagcgctaacccgctgaaagtttctcagcgaaatctcagggacgatctggaccccgctgagaggaactgcttttgagtgagatggtcccagaggcctggaggagcggactggtaagcaccgggagggtagtgggagttttgcttctgcttggtgccttgaacaaggcttccacggtcattcactatgagatcccggaggaaagagagaagggtttcgctgtgggcaacgtggtcgcgaaccttggtttggatctcggtagcctctcagcccgcaggttccgggtggtgtctggagctagccgaagattctttgaggtgaaccgggagaccggagagatgtttgtgaacgaccgtctggatcgagaggagctgtgtgggacactgccctcttgcactgtaactctggagttggtagtggagaacccgctggagctgttcagcgtggaagtggtgatccaggacatcaacgacaacaatcctgctttccctacccaggaaatgaaattggagattagcgaggccgtggctccggggacgcgctttccgctcgagagcgcgcacgatcccgatgtgggaagcaactctttacaaacctatgagctgagccgaaatgaatactttgcgcttcgcgtgcagacgcgggaggacagcaccaagtacgcggagctggtgttggagcgcgccctggaccgagaacgggagcctagtctccagttagtgctgacggcgttggacggagggaccccagctctctccgccagcctgcctattcacatcaaggtgctggacgcgaatgacaatgcgcctgtcttcaaccagtccttgtaccgggcgcgcgtcctggaggatgcaccctccggcacgcgcgtggtacaagtccttgcaacggatctggatgaaggccccaacggtgaaattatttactccttcggcagccacaaccgcgccggcgtgcggcaactattcgccttagaccttgtaaccgggatgctgacaatcaagggtcggctggacttcgaggacaccaaactccatgagatttacatccaggccaaagacaagggcgccaatcccgaaggagcacattgcaaagtgttggtggaggttgtggatgtgaatgacaacgccccggagatcacagtcacctccgtgtacagcccagtacccgaggatgcccctctggggactgtcatcgctttgctcagtgtgactgacctggatgctggcgagaacgggctggtgacctgcgaagttccaccgggtctccctttcagccttacttcttccctcaagaattacttcactttgaaaaccagtgcagacctggatcgggagactgtgccagaatacaacctcagcatcaccgcccgagacgccggaaccccttccctctcagcccttacaatagtgcgtgttcaagtgtccgacatcaatgacaaccctccacaatcttctcaatcttcctacgacgtttacattgaagaaaacaacctccccggggctccaatactaaacctaagtgtctgggaccccgacgccccgcagaatgctcggctttctttctttctcttggagcaaggagctgaaaccgggctagtgggtcgctatttcacaataaatcgtgacaatggcatagtgtcatccttagtgcccctagactatgaggatcggcgggaatttgaattaacagctcatatcagcgatgggggcaccccggtcctagccaccaacatcagcgtgaacatatttgtcactgatcgcaatgacaatgccccccaggtcctatatcctcggccaggtgggagctcggtggagatgctgcctcgaggtacctcagctggccacctagtgtcacgggtggtaggctgggacgcggatgcagggcacaatgcctggctctcctacagtctcttgggatcccctaaccagagcctttttgccatagggctgcacactggtcaaatcagtactgcccgtccagtccaagacacagattcacccaggcagactctcacggtcttgatcaaagacaatggggagccttcgctctccaccactgctaccctcactgtgtcagtaaccgaggactctcctgaagcccgagccgagttcccctctggctctgccccccgggagcagaaaaaaaatctcaccttttatctacttctttctctaatcctggtttctgtggggtttgtggtcacagtgttcggagtaatcatattcaaagtttacaagtggaagcagtctagagacctataccgagccccggtgagctcactgtaccgaacaccagggccctccttgcacgcggacgccgtgcggggaggcctgatgtcgccgcacctttaccatcaggtgtatctcaccacggactcccgccgcagcgacccgctgctgaagaaacctggtgcagccagtccactggccagccgccagaacacgctgcggagctgtgatccggtgttctataggcaggtgttgggtgcagagagcgcccctcccggacagcaagccccgcccaacacggactggcgtttctctcaggcccagagacccggcaccagcggctcccaaaatggcgatgacaccggcacctggcccaacaaccagtttgacacagagatgctgcaagccatgatcttggcgtccgccagtgaagctgctgatgggagctccaccctgggagggggtgccggcaccatgggattgagcgcccgctacggaccccagttcaccctgcagcacgtgcccgactaccgccagaatgtctacatcccaggcagcaatgccacactgaccaacgcagctggcaagcgggatggcaaggccccagcaggtggcaatggcaacaagaagaagtcgggcaagaaggagaagaagtaacatggaggccaggccaagagccacagggcggcctctccccaaccagcccagcttctccttacctgcacccaggcctcagagtttcagggctaacccccagaatactggtaggggccaaggccatgctccccttgggaaacagaaacaagtgcccagtcagcacctaccccttcccccccagggggttgaatatgcaaaagcagttccgctgggaacccccatccaatcaactgctgtacccatgggggtagtggggttactgtagacaccaagaaccatttgccacaccccgtttagttacagctgaactcctccatcttccaaatcaatcaggcccatccatcccatgcctccctcctccccaccccactccaacagttcctctttcccgagtaaggtggttggggtgttgaagtaccaagtaacctacaagcctcctagttctgaaaagttggaagggcatcatgacctcttggcctctcctttgattctcaatcttcccccaaagcatggtttggtgccagccccttcacctccttccagagcccaagatcaatgctcaagttttggaggacatgatcaccatccccatggtactgatgcttgctggatttagggagggcattttgctaccaagcctcttcccaacgccctggggaccagtcttctgttttgtttttcattgtttgacgtttccactgcatgccttgacttcccccacctcctcctcaaacaagagactccactgcatgttccaagacagtatggggtggtaagataaggaagggaagtgtgtggatgtggatggtgggggcatggacaaagcttgacacatcaagttatcaaggccttggaggaggctctgtatgtcctcaggggactgacaacatcctccagattccagccataaaccaataactaggctggacccttcccactacataatagggctcagcccaggcagccagctttgggctgagctaacaggaccaatggattaaactggcatttcagtccaaggaagctcgaagcaggtttaggaccaggtccccttgagaggtcagaggggcctctgtgggtgctgggtactccagaggtgccactggtggaagggtcagcggagccccagcaggaagggtgggccagccaggccattcttagtccctgggttggggaggcagggagctagggcagggaccaaatgaacagaaagtctcagcccaggatggggcttcttcaacagggcccctgccctcctgaagcctcagtccttcaccttgccaggtgccgtttctcttccgtgaaggccactgcccaggtccccagtgcgccccctagtggccatagcctggttaaagttccccagtgcctccttgtgcatagaccttcttctcccacccccttctgcccctgggtccccggccatccagcggggctgccagagaaccccagacctgcccttacagtagtgtagcgccccctccctctttcggctggtgtagaatagccagtagtgtagtgcggtgtgcttttacgtgatggcgggtgggcagcgggcggcgggctccgcgcagccgtctgtccttgatctgcccgcggcggcccgtgttgtgttttgtgctgtgtccacgcgctaaggcgaccccctcccccgtactgacttctcctataagcgcttctcttcgcatagtcacgtagctcccaccccaccctcttcctgtgtctcacgcaagttttatactctaatatttatatggctttttttcttcgacaaaaaaataataaaacgtttcttctgaaaa

SEQ ID NO: 24913 - DNA, 4623 bp, Homo sapiens
  source 1..4623: mol_type = unassigned DNA
atgctccgcaaggtgagaagctggacagaaatctggcggtgggctacccttttgttcctcttttaccacctgggttacgtttgtgggcagatccgctacccggtcccagaggagtcacaggaagggacttttgtagggaatgtcgctcaagatttcctgctggatacggacagtctgtcagctcgcaggctgcaggtcgctggagaggtgaaccaaagacacttccgtgtggatttggacagcggagccctgctcatcaagaacccaatcgaccgagaggcactgtgtgggctcagtgccagctgcatcgtgcccctggagtttgtcaccgaaggtcctttggaaatgtaccgagcagaggtagagatcgtagatgtgaatgatcacgccccccgttttccgcggcagcagctggacttggaaattggggaggcagctcctccaggacagcgtttcccgttggaaaaggctcaggatgcagatgtggggagcaattcgattagcagctataggctgagctccaatgaacactttgcactggatgtgaagaagcgcagcgacggcagcctggtcccagagctgctcctggagaagcctttggatcgagagaagcaatcggactaccgcctggtgctgactgctgtcgatggagggaacccgccgagatctggcaccgcagagctccgggtatccgtgctggacgtaaacgacaacgccccagccttccagcaatccagctacaggattagtgtgttggagagcgcaccagcgggcatggtgctcatccagctcaatgcctcagacccggacctgggtcccagtggtaacgtcaccttttatttcagtggtcatacccctgatcgtgtaagaaacctctttagcctgcaccccactactggaaagcttactcttttggggcccctagactttgagagtgagaattactatgaatttgatgtgcgggctcgcgatgggggttctccagccatggagcaacattgcagccttcgagtggatctgctggacgtaaatgacaatgccccttacatcacagtgacctcagagcttggaaccctccccgagagtgcagaacctggcactgtggtggcacttatcagtgtgcaggatccagactcagggtcaaacggagatgtgagcctccgcattcctgaccacttgccatttgccctcaagtctgccttcaggaaccagttctccctggtgactgctggacccttggatcgagaggccaaatctagctatgacatcatggtcactgcttctgatgctgggaaccctcctctcagtacccacagaactattttcctcaatatttcagatgtgaatgataatccaccctctttctttcagaggtcacatgaggtgtttgttcctgagaacaatcgcccaggggacctgctttgctcccttgcagcctctgacccagactctggcttgaatgcgcttatctcctactcactcctggagcccaggaatcgagatgtatcagcttcctctttcatctctctgaacccccagacaggagctgttcatgctactcgatcctttgactatgagcaaacccagacactgcagtttgaggtgcaggcccgggatcggggcaacccaccccttagcagcactgtaacagttcgtctatttgtgctggacctcaatgacaatgctccagctgtgctccgtcctcgggcccggcctggttccttatgtccccaagcactgcctccatcagttggtgctggccacctaatcacaaaggtgactgctgtggacttggattcaggttacaatgcttgggtttcctatcagctcctggaggccccagatcccagcctgtttgcagtctctcgatatgctggggaggtgcggacggctgttcctatcccagctgacctcccaccacagaagctggtcattgtggtaaaggatagtggtagtccaccactctctacctctgttactctcttagtgtccttagaggaagacactcatccagttgtcccagatcttcgagaatcttcagctccaagggaaggagaatctcgtctaaccctctacttggctgtgtccctagtggcaatttgctttgtctcctttggctcattcgtggcactactctctaagtgtcttcgtggggcagcctgtggagtcacatgctttcctgctggcacctgtgcctgtctcaccagatctcgaaggagggaggggcttcccccttccaatgggatcctccgaatccagctagggtcagatgaccctatcaagtttgttgatgtgggaggccactctcatggctgtacacccttggcttctgcacccactcggagtgatagcttcatgatggtgaagtcacccagtgcacctatggcaggggagcctgttcgcccaagctgcccaccctctgatcttctctatgggctagagcaagccccgcccaacacggactggcgtttctctcaggcccagagacccggcaccagcggctcccaaaatggcgatgacaccggcacctggcccaacaaccagtttgacacagagatgctgcaagccatgatcttggcgtccgccagtgaagctgctgatgggagctccaccctgggagggggtgccggcaccatgggattgagcgcccgctacggaccccagttcaccctgcagcacgtgcccgactaccgccagaatgtctacatcccaggcagcaatgccacactgaccaacgcagctggcaagcgggatggcaaggccccagcaggtggcaatggcaacaagaagaagtcgggcaagaaggagaagaagtaacatggaggccaggccaagagccacagggcggcctctccccaaccagcccagcttctccttacctgcacccaggcctcagagtttcagggctaacccccagaatactggtaggggccaaggccatgctccccttgggaaacagaaacaagtgcccagtcagcacctaccccttcccccccagggggttgaatatgcaaaagcagttccgctgggaacccccatccaatcaactgctgtacccatgggggtagtggggttactgtagacaccaagaaccatttgccacaccccgtttagttacagctgaactcctccatcttccaaatcaatcaggcccatccatcccatgcctccctcctccccaccccactccaacagttcctctttcccgagtaaggtggttggggtgttgaagtaccaagtaacctacaagcctcctagttctgaaaagttggaagggcatcatgacctcttggcctctcctttgattctcaatcttcccccaaagcatggtttggtgccagccccttcacctccttccagagcccaagatcaatgctcaagttttggaggacatgatcaccatccccatggtactgatgcttgctggatttagggagggcattttgctaccaagcctcttcccaacgccctggggaccagtcttctgttttgtttttcattgtttgacgtttccactgcatgccttgacttcccccacctcctcctcaaacaagagactccactgcatgttccaagacagtatggggtggtaagataaggaagggaagtgtgtggatgtggatggtgggggcatggacaaagcttgacacatcaagttatcaaggccttggaggaggctctgtatgtcctcaggggactgacaacatcctccagattccagccataaaccaataactaggctggacccttcccactacataatagggctcagcccaggcagccagctttgggctgagctaacaggaccaatggattaaactggcatttcagtccaaggaagctcgaagcaggtttaggaccaggtccccttgagaggtcagaggggcctctgtgggtgctgggtactccagaggtgccactggtggaagggtcagcggagccccagcaggaagggtgggccagccaggccattcttagtccctgggttggggaggcagggagctagggcagggaccaaatgaacagaaagtctcagcccaggatggggcttcttcaacagggcccctgccctcctgaagcctcagtccttcaccttgccaggtgccgtttctcttccgtgaaggccactgcccaggtccccagtgcgccccctagtggccatagcctggttaaagttccccagtgcctccttgtgcatagaccttcttctcccacccccttctgcccctgggtccccggccatccagcggggctgccagagaaccccagacctgcccttacagtagtgtagcgccccctccctctttcggctggtgtagaatagccagtagtgtagtgcggtgtgcttttacgtgatggcgggtgggcagcgggcggcgggctccgcgcagccgtctgtccttgatctgcccgcggcggcccgtgttgtgttttgtgctgtgtccacgcgctaaggcgaccccctcccccgtactgacttctcctataagcgcttctcttcgcatagtcacgtagctcccaccccaccctcttcctgtgtctcacgcaagttttatactctaatatttatatggctttttttcttcgacaaaaaaataataaaacgtttcttctgaaaagctg

SEQ ID NO: 24914 - DNA, 4641 bp, Homo sapiens
  source 1..4641: mol_type = unassigned DNA
atggggcccaagacactcccacagctcgctgggaaatggcaagtgctgtgcatgttgtccttgtgctgctggggctgggtgtctgggcagcttcgttactcagtggtggaggagtctgagccggggacgctggtggggaatgttgctcaggatctgggcttaaagatgacagatctgttgagccggcggctgcaattgggctctgaggagaatgggcgctatttttccctgagcttgatgagtggtgccctggcagtgaatcaaaagattgaccgagaaagcctatgtggagccagcaccagctgcctgctgccagtgcaggtggtgactgaacaccccctggagctaatccgtgtagaggtagagatcctggatctcaatgacaactctcctagctttgccacccctgagcgagagatgcgcatctcagaatcagcagcatctggggcacgattcccactggacagtgcccaggatccggatgtgggcaccaatactgtgagcttttacactctaagccccaacagccacttctctctgaatgtgaagaccctaaaagatgggaagccattcccagagctggtgctagagcagcagctggatcgtgaagcccaggcaagacatcagctggtgcttactgctgtggatggggggaccccagcccgctcagggaccacccttatctctgtcatcgtgctggacatcaatgataatgctccaaccttccaatcctcagttctacgtgtgggaatcccagagaatgcacccattggtactctgctgctccgcctcaatgccactgatccagacgagggcaccaacggccaactagactattcttttggagaccacacatctgaggcagtgcggaacctctttggcctagaccctagcagtggggcaatccatgtgttgggtcccatagactttgaggagtcacgtttctatgaaattcatgcaagagcccgtgaccagggacagcctgccatggagggccactgtgtgattcaagtggatgtgggggatgtcaatgacaatgccccagaggtgctattggcctctttggccaaccctgtcctagagagcacaccagtgggcacagtagtggggttgtttaatgtgcgagaccgggactcaggtagaaatggtgaagtgagccttgatatctctccggacctgccatttcagattaagccttctgagaaccactactcgctgctaaccagccagcctttggaccgggaggccacatcccactatatcatcgagctgctggccagcgatgctggttcaccttccctacacaaacatctcaccatcaggctcaacatttcagatgtcaatgacaatgcaccccgcttcaaccagcagctttacactgcttacatcctagaaaaccggcctccgggctcccttctttgcactgtggctgcctcagatccagacactggggataatgcccgcctcacctactccattgtaggaaatcaggttcagggagccccagcctcctcctttgtgtatgtcaacccagaggatggacggatctttgcccagcgtacctttgactatgaattgctgcagatgctgcagattgtggtgggggttcgagactccggctctcccccattgcatgccaacacatctctgcatgtgtttgtcctagacgagaatgataatgccccagctgtgctgcacccacggccagactgggaacactcagccccccagcgtctccctcgctctgctcctcctggctccttggtcaccaaggtgacagccgtggatgctgatgcaggccacaatgcgtggctctcctactcactgttgccacagtccacagccccaggactgttcctcgtgtctacacacactggtgaggtgcgcacagcccgggccttactggaggatgactctgacacccagcaggtggtggtcctggtgagggacaatggtgacccttcactctcctccacagccacagtgctgctggttctggaggatgaggaccctgaggaaatgcccaaatccagtgacttcctcatacaccctcctgagcgttcagaccttaccctttacctcattgtggctctagcgaccgtcagtctcttatccctagtcaccttcacctttctgtcagcgaagtgccttcagggaaacgcagacggggacgggggtggagggcagtgctgcaggcgccaggactcaccctccccggacttctataagcagtccagccccaacctgcaggtgagctcggacggcacgctcaagtacatggaggtgacgctgcggcccacagactcgcagagccactgctacaggacgtgcttttcaccggcctcggacggcagtgacttcacttttctaagacccctcagcgttcagcagcccacagctctggcgctggagcctgacgccatccggtcccgctctaatacgctgcgggagcggagccagcaagccccgcccaacacggactggcgtttctctcaggcccagagacccggcaccagcggctcccaaaatggcgatgacaccggcacctggcccaacaaccagtttgacacagagatgctgcaagccatgatcttggcgtccgccagtgaagctgctgatgggagctccaccctgggagggggtgccggcaccatgggattgagcgcccgctacggaccccagttcaccctgcagcacgtgcccgactaccgccagaatgtctacatcccaggcagcaatgccacactgaccaacgcagctggcaagcgggatggcaaggccccagcaggtggcaatggcaacaagaagaagtcgggcaagaaggagaagaagtaacatggaggccaggccaagagccacagggcggcctctccccaaccagcccagcttctccttacctgcacccaggcctcagagtttcagggctaacccccagaatactggtaggggccaaggccatgctccccttgggaaacagaaacaagtgcccagtcagcacctaccccttcccccccagggggttgaatatgcaaaagcagttccgctgggaacccccatccaatcaactgctgtacccatgggggtagtggggttactgtagacaccaagaaccatttgccacaccccgtttagttacagctgaactcctccatcttccaaatcaatcaggcccatccatcccatgcctccctcctccccaccccactccaacagttcctctttcccgagtaaggtggttggggtgttgaagtaccaagtaacctacaagcctcctagttctgaaaagttggaagggcatcatgacctcttggcctctcctttgattctcaatcttcccccaaagcatggtttggtgccagccccttcacctccttccagagcccaagatcaatgctcaagttttggaggacatgatcaccatccccatggtactgatgcttgctggatttagggagggcattttgctaccaagcctcttcccaacgccctggggaccagtcttctgttttgtttttcattgtttgacgtttccactgcatgccttgacttcccccacctcctcctcaaacaagagactccactgcatgttccaagacagtatggggtggtaagataaggaagggaagtgtgtggatgtggatggtgggggcatggacaaagcttgacacatcaagttatcaaggccttggaggaggctctgtatgtcctcaggggactgacaacatcctccagattccagccataaaccaataactaggctggacccttcccactacataatagggctcagcccaggcagccagctttgggctgagctaacaggaccaatggattaaactggcatttcagtccaaggaagctcgaagcaggtttaggaccaggtccccttgagaggtcagaggggcctctgtgggtgctgggtactccagaggtgccactggtggaagggtcagcggagccccagcaggaagggtgggccagccaggccattcttagtccctgggttggggaggcagggagctagggcagggaccaaatgaacagaaagtctcagcccaggatggggcttcttcaacagggcccctgccctcctgaagcctcagtccttcaccttgccaggtgccgtttctcttccgtgaaggccactgcccaggtccccagtgcgccccctagtggccatagcctggttaaagttccccagtgcctccttgtgcatagaccttcttctcccacccccttctgcccctgggtccccggccatccagcggggctgccagagaaccccagacctgcccttacagtagtgtagcgccccctccctctttcggctggtgtagaatagccagtagtgtagtgcggtgtgcttttacgtgatggcgggtgggcagcgggcggcgggctccgcgcagccgtctgtccttgatctgcccgcggcggcccgtgttgtgttttgtgctgtgtccacgcgctaaggcgaccccctcccccgtactgacttctcctataagcgcttctcttcgcatagtcacgtagctcccaccccaccctcttcctgtgtctcacgcaagttttatactctaatatttatatggctttttttcttcgacaaaaaaataataaaacgtttcttctgaaaagctg

SEQ ID NO: 24915 - DNA, 6845 bp, Homo sapiens
  source 1..6845: mol_type = unassigned DNA
caacgtgctgagctaatagcgacagatagagggcagacagattcctgctagcagcttagtgttagttgcttgtggtaactaaggcaggtggcatacatctcagaacgtggagaatgatggtatgctttctgagttaacatgttgaactgttttgcttttctaaaaattttcctagtaacattttcttgatgatatgagagtggatatcaatgcctcacagaaacaagaggtggaacatgtgaatgaatcgtcttggaactagattatgagcactggttctttttaaagggatgtgcaagaggcagccttggcaagaaaacttgctgcataatcttacatggactaaagatgaaactttaaaccgcaaatcagctttgagtgaactttgacagaagatgtttcgacagttttatctctggacatgtttagcttcagggatcatcctgggctctctctttgaaatctgcttgggccagtatgatgatgattgcaaactagctaggggaggaccaccagctaccatagttgctattgatgaagaaagtcggaatggtacaattctggtggacaacatgctgatcaaagggactgctggaggaccagaccccaccatagaactttctttaaaggataatgtggattactgggtgttgatggatcctgttaagcaaatgcttttcctgaacagcaccggaagagttctggatagagatccaccgatgaacatacactccattgtggtgcaggtccagtgcatcaacaaaaaagtgggcactattatctaccatgaagtgcgaatagtggtgagagacaggaatgacaactcacccactttcaagcatgaaagctactatgccacagtgaatgagctcactccagttggtaccacaatattcacaggattttcaggagacaatggagctacagatatagatgatggaccaaatggacagatagagtatgttattcagtataatccagatgatccgacatccaatgacacctttgaaattcccctaatgttgactggaaatatagtgttaaggaagaggctcaactatgaagataagactcgctactttgtcataatccaagctaatgaccgtgcccaaaatctgaatgagaggcgaaccaccaccaccactctcacagtggatgttctggatggagatgacttgggtccaatgtttcttccttgtgtccttgtgccaaacactcgtgattgccgtccactcacttatcaagctgccatacctgagttgagaactccggaagaactgaaccccattattgttacgccaccaatccaagccattgatcaggaccggaatattcaaccgccatcagataggccaggaatcctctattccatccttgttgggactcctgaggattacccacgatttttccatatgcatcctaggacagcagaacttagtctcctggagccagtaaacagagactttcaccagaaatttgatttggttattaaggctgaacaagacaatggtcatcctcttcctgcctttgccggtctacacattgaaatactggatgaaaacaatcaaagtccatattttacaatgcccagttatcaaggctatatcctggaatctgccccagtgggagcaaccatttcggacagtctcaatttgacttcacctttaagaatagtagctctggacaaggacatagaagatacaaaagacccagagcttcacctttttctgaatgactacacctcagtcttcaccgtcacacagactggtattactcgctacctcaccttacttcaaccagtggacagggaagaacagcaaacttacaccttttcgataacagcatttgatggtgtacaagaaagtgagccagtcatcgtcaatattcaagtgatggatgcaaatgataacacgccaaccttccctgaaatatcctatgatgtgtatgtttatacagacatgagacctggggacagtgtcatacagctcactgcagtcgacgcagacgaagggtcaaatggggagatcacatatgaaatccttgttggggctcagggagacttcatcatcaataaaacaacagggcttatcaccatcgctccaggggtggaaatgatagtcgggcggacttacgcactcacggtccaagcagcggataatgctcctcctgcagagcgaaggaactccatctgcactgtgtatattgaagtgcttccaccaaataatcaaagccctcctcgcttcccacagctgatgtatagccttgaaattagtgaagccatgagggttggtgctgttttattaaatctacaggcaactgatcgagagggagactcaataacatatgccattgagaatggagatcctcagagagtttttaatctttcagaaaccacggggattctaaccttagggaaagcactggacagggaaagcactgatcgctacattctgatcatcacagcttcagatggcaggccagatgggacctcaactgccacagtaaacatagtggtgacagatgtcaatgacaatgctccagtgtttgatccttatctgccaagaaatttatctgtggtggaagaagaagccaatgcctttgtgggtcaagtaaaagcaacagaccctgatgctggaataaatggtcaagtgcactacagtttgggtaactttaataatctttttcgtatcacatccaatgggagcatttacacagcagtgaagcttaacagagaagtcagggactactatgaacttgttgttgtggcaacagatggagcagtacaccctcgtcattcaactctaaccttggccatcaaggttttggacattgatgataacagtcctgtgttcaccaattcaacatacactgtccttgttgaagagaatttgccagctgggactaccatccttcaaatagaggccaaagatgtcgaccttggagcaaatgtgtcttaccggataagaagcccagaagtgaagcacttttttgcactacatccatttacaggagaactatcgcttttaaggagtttagattatgaggcatttccagaccaagaagcaagtatcacttttctggtagaggcctttgatatttatggaacaatgccacctggtattgctactgtcacagtgattgtaaaggatatgaatgattatcctcctgtctttagtaaacgaatatacaaagggatggtggctccggatgcagtcaagggtacacctatcacaacagtttatgctgaagatgcagaccctcctggattacctgcaagtcgtgtgaggtatagagtagatgatgtacagtttccttaccctgccagtatttttgaagtggaagaagattctggaagagtaataacacgagtcaatcttaatgaagaacctacaacaatttttaagttggtggtggttgcttttgatgatggggagcctgtgatgtccagcagtgccacagtgaagattcttgtcttacatcctggtgagatcccacgcttcacacaggaggaatatagacctcctccagtaagtgaacttgccaccaaagggaccatggttggtgtaatttctgctgctgccattaatcaaagtattgtgtactccattgtttcaggaaatgaagaagatacatttggaattaataacatcacaggtgttatctatgtgaatggacctctggattatgagaccaggacaagctatgtacttcgagtccaagctgattccctggaagtggtccttgccaatctccgagttccttcaaaaagcaatacagctaaagtatacattgagattcaggatgaaaataatcatcccccagtgtttcagaaaaaattctacatcggaggtgtatctgaagatgcaagaatgtttacttctgtactcagagtgaaggctactgataaagatactggcaattatagtgtcatggcctacagactcataataccaccaattaaagagggaaaagaaggatttgtagtggaaacatatacagggcttatcaaaactgctatgctcttccataatatgaggagatcctacttcaagtttcaagttattgcaactgacgactatgggaagggactgagcggcaaagccgatgtactcgtctccgtggtcaatcagctggatatgcaagtcattgtttccaatgtgcctcctactctagtggaaaaaaagatagaagatcttacagagatcttggatcgctatgttcaggaacaaattcctggtgccaaggtcgtagtggagtccattggagctcgccggcatggagatgccttttccctagaagattacaccaaatgtgacttgactgtctatgcaattgacccccaaaccaacagagccatcgatagaaatgagctttttaaatttttggatggcaaactacttgatatcaataaagactttcagccgtattatggggaaggaggacgcattctggagatccggactccagaggcagtgaccagcattaaaaagagaggagaaagtctaggatacacagaaggggccttgttggctctggccttcatcatcatcctctgctgcattcctgccatcttggtggttttggtcagctacagacagtttaaagtacgtcaagctgagtgtacaaagactgcacgaattcaggccgcattacccgcggctaaaccagcagtgccggctcctgcaccagtggcagcgcccccgccgccgccgccgcctccgccaggtgcgcatctctatgaagaacttggagacagctcaattcttttccttctctaccattttcaacaaagcaggggaaataactcagtctcagaagacaggaaacatcaacaagttgtgatgcccttttcttccaatactattgaggctcacaagtcagctcatgtagacggatcacttaagagcaacaaactgaagtctgcaagaaaattcacatttctatctgatgaggatgacttaagtgcccataatcccctttataaggaaaacataagtcaagtatcaacaaattcagacatttcacagagaacagattttgtagacccattttcacccaaaatacaagccaagagtaagtctctgaggggcccaagagaaaagattcagaggctgtggagtcagtcagtcagcttacccaggaggctgatgaggaaagttccaaatagaccagagatcatagatctgcagcagtggcaaggcaccaggcagaaagctgaaaatgaaaacactggaatctgtacaaacaaaagaggtagcagcaatccattgcttacaactgaagaggcaaatttgacagagaaagaggaaataaggcaaggtgaaacactgatgatagaaggaacagaacagttgaaatctctctcttcagactcttcattttgctttcccaggcctcacttctcattctccactttgccaactgtttcaagaactgtggaactcaaatcagaacctaatgtcatcagttctcctgctgagtgttccttggaactttctccttcaaggccttgtgttttacattcttcactctctaggagagagacacctatttgtatgttacctattgaaaccgaaagaaatatttttgaaaattttgcccatccaccaaacatctctccttctgcctgtccccttccccctcctcctcctatttctcctccttctcctcctcctgctcctgctcctcttgctcctcctcctgacatttctcctttttctcttttttgtcctcctccctctcctccttctatccctcttcctcttcctcctcctacattttttccactttccgtttcaacgtctggtcccccaacaccacctcttctacctccatttccaactcctcttcctccaccacctccttctattccttgccctccacctccttcagcttcatttctgtccacagagtgtgtctgtataacaggtgttaaatgcacgaccaacttgatgcctgccgagaaaattaagtcctctatgacacagctatcaacaacgacagtgtgtaaaacagaccctcagagagaaccaaaaggcatcctcagacacgttaaaaacttagcagaacttgaaaaatcagtagctaacatgtacagtcaaatagaaaaaaactatctacgcacaaatgtttcagaacttcaaactatgtgcccttcagaagtaacaaatatggaaatcacatctgaacaaaacaaggggagtttgaacaatattgtcgagggaactgaaaaacaatctcacagtcaatctacttcactgtaatgttgcttttcttattttagtcgggcaaacctcttgttgatcatagtcttcaagttgaacatcaaatttgaacgtcaaagaagactctattattttaccccaaattcaatgaaatgcagttttttttctcgtttttaatttaaaaagatattaacctcatcactactaactcactcatataatagatttaccttactttttaaaaactacaaagtagcataatttgttctacatttatttgaaaagtaagtaattttaatctcttttttagtgggaatatgtgggcatgaaaattagatacccaacttaaaccaaaggcatgtctatcatgtggatgcagtaacatttacatttagtttttgatcgtagttttatatgaatgttccaagaaaaaagcagactgttacaaataagttaaaactgatatgattgataggttctgttttttcttgaagcctatgtatttggtaagaagaaatactaccgaagtaaaatataatgtacctagattgtaggagatgacagacataaggtatttcaaaataaatctcaggtgctataacatgtagtcatctgttttct

SEQ ID NO: 24916 - DNA, 6957 bp, Homo sapiens
  source 1..6957: mol_type = unassigned DNA
caacgtgctgagctaatagcgacagatagagggcagacagattcctgctagcagcttagtgttagttgcttgtggtaactaaggcaggtggcatacatctcagaacgtggagaatgatggtatgctttctgagttaacatgttgaactgttttgcttttctaaaaattttcctagtaacattttcttgatgatatgagagtggatatcaatgcctcacagaaacaagaggtggaacatgtgaatgaatcgtcttggaactagattatgagcactggttctttttaaagggatgtgcaagaggcagccttggcaagaaaacttgctgcataatcttacatggactaaagatgaaactttaaaccgcaaatcagctttgagtgaactttgacagaagatgtttcgacagttttatctctggacatgtttagcttcagggatcatcctgggctctctctttgaaatctgcttgggccagtatgatgatgattgcaaactagctaggggaggaccaccagctaccatagttgctattgatgaagaaagtcggaatggtacaattctggtggacaacatgctgatcaaagggactgctggaggaccagaccccaccatagaactttctttaaaggataatgtggattactgggtgttgatggatcctgttaagcaaatgcttttcctgaacagcaccggaagagttctggatagagatccaccgatgaacatacactccattgtggtgcaggtccagtgcatcaacaaaaaagtgggcactattatctaccatgaagtgcgaatagtggtgagagacaggaatgacaactcacccactttcaagcatgaaagctactatgccacagtgaatgagctcactccagttggtaccacaatattcacaggattttcaggagacaatggagctacagatatagatgatggaccaaatggacagatagagtatgttattcagtataatccagatgatccgacatccaatgacacctttgaaattcccctaatgttgactggaaatatagtgttaaggaagaggctcaactatgaagataagactcgctactttgtcataatccaagctaatgaccgtgcccaaaatctgaatgagaggcgaaccaccaccaccactctcacagtggatgttctggatggagatgacttgggtccaatgtttcttccttgtgtccttgtgccaaacactcgtgattgccgtccactcacttatcaagctgccatacctgagttgagaactccggaagaactgaaccccattattgttacgccaccaatccaagccattgatcaggaccggaatattcaaccgccatcagataggccaggaatcctctattccatccttgttgggactcctgaggattacccacgatttttccatatgcatcctaggacagcagaacttagtctcctggagccagtaaacagagactttcaccagaaatttgatttggttattaaggctgaacaagacaatggtcatcctcttcctgcctttgccggtctacacattgaaatactggatgaaaacaatcaaagtccatattttacaatgcccagttatcaaggctatatcctggaatctgccccagtgggagcaaccatttcggacagtctcaatttgacttcacctttaagaatagtagctctggacaaggacatagaagatacaaaagacccagagcttcacctttttctgaatgactacacctcagtcttcaccgtcacacagactggtattactcgctacctcaccttacttcaaccagtggacagggaagaacagcaaacttacaccttttcgataacagcatttgatggtgtacaagaaagtgagccagtcatcgtcaatattcaagtgatggatgcaaatgataacacgccaaccttccctgaaatatcctatgatgtgtatgtttatacagacatgagacctggggacagtgtcatacagctcactgcagtcgacgcagacgaagggtcaaatggggagatcacatatgaaatccttgttggggctcagggagacttcatcatcaataaaacaacagggcttatcaccatcgctccaggggtggaaatgatagtcgggcggacttacgcactcacggtccaagcagcggataatgctcctcctgcagagcgaaggaactccatctgcactgtgtatattgaagtgcttccaccaaataatcaaagccctcctcgcttcccacagctgatgtatagccttgaaattagtgaagccatgagggttggtgctgttttattaaatctacaggcaactgatcgagagggagactcaataacatatgccattgagaatggagatcctcagagagtttttaatctttcagaaaccacggggattctaaccttagggaaagcactggacagggaaagcactgatcgctacattctgatcatcacagcttcagatggcaggccagatgggacctcaactgccacagtaaacatagtggtgacagatgtcaatgacaatgctccagtgtttgatccttatctgccaagaaatttatctgtggtggaagaagaagccaatgcctttgtgggtcaagtaaaagcaacagaccctgatgctggaataaatggtcaagtgcactacagtttgggtaactttaataatctttttcgtatcacatccaatgggagcatttacacagcagtgaagcttaacagagaagtcagggactactatgaacttgttgttgtggcaacagatggagcagtacaccctcgtcattcaactctaaccttggccatcaaggttttggacattgatgataacagtcctgtgttcaccaattcaacatacactgtccttgttgaagagaatttgccagctgggactaccatccttcaaatagaggccaaagatgtcgaccttggagcaaatgtgtcttaccggataagaagcccagaagtgaagcacttttttgcactacatccatttacaggagaactatcgcttttaaggagtttagattatgaggcatttccagaccaagaagcaagtatcacttttctggtagaggcctttgatatttatggaacaatgccacctggtattgctactgtcacagtgattgtaaaggatatgaatgattatcctcctgtctttagtaaacgaatatacaaagggatggtggctccggatgcagtcaagggtacacctatcacaacagtttatgctgaagatgcagaccctcctggattacctgcaagtcgtgtgaggtatagagtagatgatgtacagtttccttaccctgccagtatttttgaagtggaagaagattctggaagagtaataacacgagtcaatcttaatgaagaacctacaacaatttttaagttggtggtggttgcttttgatgatggggagcctgtgatgtccagcagtgccacagtgaagattcttgtcttacatcctggtgagatcccacgcttcacacaggaggaatatagacctcctccagtaagtgaacttgccaccaaagggaccatggttggtgtaatttctgctgctgccattaatcaaagtattgtgtactccattgtttcaggaaatgaagaagatacatttggaattaataacatcacaggtgttatctatgtgaatggacctctggattatgagaccaggacaagctatgtacttcgagtccaagctgattccctggaagtggtccttgccaatctccgagttccttcaaaaagcaatacagctaaagtatacattgagattcaggatgaaaataatcatcccccagtgtttcagaaaaaattctacatcggaggtgtatctgaagatgcaagaatgtttacttctgtactcagagtgaaggctactgataaagatactggcaattatagtgtcatggcctacagactcataataccaccaattaaagagggaaaagaaggatttgtagtggaaacatatacagggcttatcaaaactgctatgctcttccataatatgaggagatcctacttcaagtttcaagttattgcaactgacgactatgggaagggactgagcggcaaagccgatgtactcgtctccgtggtcaatcagctggatatgcaagtcattgtttccaatgtgcctcctactctagtggaaaaaaagatagaagatcttacagagatcttggatcgctatgttcaggaacaaattcctggtgccaaggtcgtagtggagtccattggagctcgccggcatggagatgccttttccctagaagattacaccaaatgtgacttgactgtctatgcaattgacccccaaaccaacagagccatcgatagaaatgagctttttaaatttttggatggcaaactacttgatatcaataaagactttcagccgtattatggggaaggaggacgcattctggagatccggactccagaggcagtgaccagcattaaaaagagaggagaaagtctaggatacacagaaggggccttgttggctctggccttcatcatcatcctctgctgcattcctgccatcttggtggttttggtcagctacagacagtttaaagtacgtcaagctgagtgtacaaagactgcacgaattcaggccgcattacccgcggctaaaccagcagtgccggctcctgcaccagtggcagcgcccccgccgccgccgccgcctccgccaggtgcgcatctctatgaagaacttggagacagctcaatgcataatcttttccttctctaccattttcaacaaagcaggggaaataactcagtctcagaagacaggaaacatcaacaagttgtgatgcccttttcttccaatactattgaggctcacaagtcagctcatgtagacggatcacttaagagcaacaaactgaagtctgcaagaaaattcacatttctatctgatgaggatgacttaagtgcccataatcccctttataaggaaaacataagtcaagtatcaacaaattcagacatttcacagagaacagattttgtagacccattttcacccaaaatacaagccaagagtaagtctctgaggggcccaagagaaaagattcagaggctgtggagtcagtcagtcagcttacccaggaggctgatgaggaaagttccaaatagaccagagatcatagatctgcagcagtggcaaggcaccaggcagaaagctgaaaatgaaaacactggaatctgtacaaacaaaagaggtagcagcaatccattgcttacaactgaagaggcaaatttgacagagaaagaggaaataaggcaaggtgaaacactgatgatagaaggaacagaacagttgaaatctctctcttcagactcttcattttgctttcccaggcctcacttctcattctccactttgccaactgtttcaagaactgtggaactcaaatcagaacctaatgtcatcagttctcctgctgagtgttccttggaactttctccttcaaggccttgtgttttacattcttcactctctaggagagagacacctatttgtatgttacctattgaaaccgaaagaaatatttttgaaaattttgcccatccaccaaacatctctccttctgcctgtccccttccccctcctcctcctatttctcctccttctcctcctcctgctcctgctcctcttgctcctcctcctgacatttctcctttttctcttttttgtcctcctccctctcctccttctatccctcttcctcttcctcctcctacattttttccactttccgtttcaacgtctggtcccccaacaccacctcttctacctccatttccaactcctcttcctccaccacctccttctattccttgccctccacctccttcagcttcatttctgtccacagagtgtgtctgtataacaggtgttaaatgcacgaccaacttgatgcctgccgagaaaattaagtcctctatgacacagctatcaacaacgacagtgtgtaaaacagaccctcagagagaaccaaaaggcatcctcagacacgttaaaaacttagcagaacttgaaaaatcagtagctaacatgtacagtcaaatagaaaaaaactatctacgcacaaatgtttcagaacttcaaactatgtgcccttcagaagtaacaaatatggaaatcacatctgaacaaaacaaggggagtttgaacaatattgtcgagggaactgaaaaacaatctcacagtcaatctacttcactgtaatgttgcttttcttattttagtcgggcaaacctcttgttgatcatagtcttcaagttgaacatcaaatttgaacgtcaaagaagactctattattttaccccaaattcaatgaaatgcagttttttttctcgtttttaatttaaaaagatattaacctcatcactactaactcactcatataatagatttaccttactttttaaaaactacaaagtagcataatttgttctacatttatttgaaaagtaagtaattttaatctcttttttagtgggaatatgtgggcatgaaaattagatacccaacttaaaccaaaggcatgtctatcatgtggatgcagtaacatttacatttagtttttgatcgtagttttatatgaatgttccaagaaaaaagcagactgttacaaataagttaaaactgatatgattgataggttctgttttttcttgaagcctatgtatttggtaagaagaaatactaccgaagtaaaatataatgtacctagattgtaggagatgacagacataaggtatttcaaaataaatctcaggtgctataacatgtagtcatctgttttctgataagaacatcttttactctgacttgcttttatcttagtagtatgcttatggatttagtagtatgcttatggatttgataaatcttatactttttcagttgctgt

SEQ ID NO: 24917 - DNA, 4230 bp, Homo sapiens
  source 1..4230: mol_type = unassigned DNA
aacgtggagaatgatggtatgctttctgagttaacatgttgaactgttttgcttttctaaaaattttcctagtaacattttcttgatgatatgagagtggatatcaatgcctcacagaaacaagaggtggaacatgtgaatgaatcgtcttggaactagattatgagcactggttctttttaaagggatgtgcaagaggcagccttggcaagaaaacttgctgcataatcttacatggactaaagatgaaactttaaaccgcaaatcagctttgagtgaactttgacagaagatgtttcgacagttttatctctggacatgtttagcttcagggatcatcctgggctctctctttgaaatctgcttgggccagtatgatgatgattgcaaactagctaggggaggaccaccagctaccatagttgctattgatgaagaaagtcggaatggtacaattctggtggacaacatgctgatcaaagggactgctggaggaccagaccccaccatagaactttctttaaaggataatgtggattactgggtgttgatggatcctgttaagcaaatgcttttcctgaacagcaccggaagagttctggatagagatccaccgatgaacatacactccattgtggtgcaggtccagtgcatcaacaaaaaagtgggcactattatctaccatgaagtgcgaatagtggtgagagacaggaatgacaactcacccactttcaagcatgaaagctactatgccacagtgaatgagctcactccagttggtaccacaatattcacaggattttcaggagacaatggagctacagatatagatgatggaccaaatggacagatagagtatgttattcagtataatccagatgatccgacatccaatgacacctttgaaattcccctaatgttgactggaaatatagtgttaaggaagaggctcaactatgaagataagactcgctactttgtcataatccaagctaatgaccgtgcccaaaatctgaatgagaggcgaaccaccaccaccactctcacagtggatgttctggatggagatgacttgggtccaatgtttcttccttgtgtccttgtgccaaacactcgtgattgccgtccactcacttatcaagctgccatacctgagttgagaactccggaagaactgaaccccattattgttacgccaccaatccaagccattgatcaggaccggaatattcaaccgccatcagataggccaggaatcctctattccatccttgttgggactcctgaggattacccacgatttttccatatgcatcctaggacagcagaacttagtctcctggagccagtaaacagagactttcaccagaaatttgatttggttattaaggctgaacaagacaatggtcatcctcttcctgcctttgccggtctacacattgaaatactggatgaaaacaatcaaagtccatattttacaatgcccagttatcaaggctatatcctggaatctgccccagtgggagcaaccatttcggacagtctcaatttgacttcacctttaagaatagtagctctggacaaggacatagaagatacaaaagacccagagcttcacctttttctgaatgactacacctcagtcttcaccgtcacacagactggtattactcgctacctcaccttacttcaaccagtggacagggaagaacagcaaacttacaccttttcgataacagcatttgatggtgtacaagaaagtgagccagtcatcgtcaatattcaagtgatggatgcaaatgataacacgccaaccttccctgaaatatcctatgatgtgtatgtttatacagacatgagacctggggacagtgtcatacagctcactgcagtcgacgcagacgaagggtcaaatggggagatcacatatgaaatccttgttggggctcagggagacttcatcatcaataaaacaacagggcttatcaccatcgctccaggggtggaaatgatagtcgggcggacttacgcactcacggtccaagcagcggataatgctcctcctgcagagcgaaggaactccatctgcactgtgtatattgaagtgcttccaccaaataatcaaagccctcctcgcttcccacagctgatgtatagccttgaaattagtgaagccatgagggttggtgctgttttattaaatctacaggcaactgatcgagagggagactcaataacatatgccattgagaatggagatcctcagagagtttttaatctttcagaaaccacggggattctaaccttagggaaagcactggacagggaaagcactgatcgctacattctgatcatcacagcttcagatggcaggccagatgggacctcaactgccacagtaaacatagtggtgacagatgtcaatgacaatgctccagtgtttgatccttatctgccaagaaatttatctgtggtggaagaagaagccaatgcctttgtgggtcaagtaaaagcaacagaccctgatgctggaataaatggtcaagtgcactacagtttgggtaactttaataatctttttcgtatcacatccaatgggagcatttacacagcagtgaagcttaacagagaagtcagggactactatgaacttgttgttgtggcaacagatggagcagtacaccctcgtcattcaactctaaccttggccatcaaggttttggacattgatgataacagtcctgtgttcaccaattcaacatacactgtccttgttgaagagaatttgccagctgggactaccatccttcaaatagaggccaaagatgtcgaccttggagcaaatgtgtcttaccggataagaagcccagaagtgaagcacttttttgcactacatccatttacaggagaactatcgcttttaaggagtttagattatgaggcatttccagaccaagaagcaagtatcacttttctggtagaggcctttgatatttatggaacaatgccacctggtattgctactgtcacagtgattgtaaaggatatgaatgattatcctcctgtctttagtaaacgaatatacaaagggatggtggctccggatgcagtcaagggtacacctatcacaacagtttatgctgaagatgcagaccctcctgtaagtagaaggcattgattaatattctgaactgtactgagaaaaatccttaacactcataaatgaccgaatcacaagacagcaaaagtagtctctgtaaatttcaccctatttattcatacattttatgttcttttacttatttcatccacaggtacagagcatatttcagatgactattattgaacctagacaaagaatatgctttttgtttttctagaatgcacaatgtactaattactaatttatctaacaatgataaatatatatgaattgtctccatttgtaagcttcacttaatctggatatgttttaaatttatgtattttccactgtatgcatatatgactattttgttagcaaactccaaatcaacatatcacatgaaacttatattgaatgtgtttattttggtaaattaaaaagcttaagattgcttacagaaaatagttaacattcttttatcatatagaactttacttttttgagatatcccaaattatctttcaaggcaaggttttaattaaaatattattatagtgagagtgataaaataccatgtataattaatagtatacatataaaaaagctttctataaataccttgttttataaatattaattattatcctgatgatttaaatttttctctgagtgggctcacactgtaagttggtggctgataaattttagaaaaatacaaataaaagttaaatgaactattttagaagagtaagaaaataaaatcctgaatcttataagtgatttagaagttctgttttctattgctaatataaatagtatttcttttaatgcttgtatttaattaaaagtgaatggccatcataacatttttcagcttcgatttggacaagtcttataaactctattgtgactatatggaatcaaaatgtattaatgttaatatgaaagtggtgggctttaattcagaagctccttttcttaagtgtgttaaaatgtctttgaaactgctttattgtgctttgggatatatgataggcaaaaatttcatagacttgaacccatcaataaagatagtgaatgtgaaa

SEQ ID NO: 24918 - DNA, 3471 bp, Homo sapiens
  source 1..3471: mol_type = unassigned DNA
gctatcaggaggagcaaaagggaaggatctgctgctgggggctcgctgggtgaccctttgccagacgaaaagagctggtcgagagagaagcgcttggcaggagctctctgcgggacctaagctccgtggctgctcgggatccctacgtccgctgctgctgaaggagcagaggggaggacgccagcggttgcttactggagcctggaggaaaatggaaacatcattccctagaaacagttgaagttgacagacctagaggttgacaaaaggacacgacactagggaatttgcattgtcatgtttcgaaataccattccaaagacctgcaaataagatcagctttgagtgaactttgacagaagatgtttcgacagttttatctctggacatgtttagcttcagggatcatcctgggctctctctttgaaatctgcttgggccagtatgatgatggtacaattctggtggacaacatgctgatcaaagggactgctggaggaccagaccccaccatagaactttctttaaaggataatgtggattactgggtgttgatggatcctgttaagcaaatgcttttcctgaacagcaccggaagagttctggatagagatccaccgatgaacatacactccattgtggtgcaggtccagtgcatcaacaaaaaagtgggcactattatctaccatgaagtgcgaatagtggtgagagacaggaatgacaactcacccactttcaagcatgaaagctactatgccacagtgaatgagctcactccagttggtaccacaatattcacaggattttcaggagacaatggagctacagatatagatgatggaccaaatggacagatagagtatgttattcagtataatccagatgatccgacatccaatgacacctttgaaattcccctaatgttgactggaaatatagtgttaaggaagaggctcaactatgaagataagactcgctactttgtcataatccaagctaatgaccgtgcccaaaatctgaatgagaggcgaaccaccaccaccactctcacagtggatgttctggatggagatgacttgggtccaatgtttcttccttgtgtccttgtgccaaacactcgtgattgccgtccactcacttatcaagctgccatacctgagttgagaactccggaagaactgaaccccattattgttacgccaccaatccaagccattgatcaggaccggaatattcaaccgccatcagataggccaggaatcctctattccatccttgttgggactcctgaggattacccacgatttttccatatgcatcctaggacagcagaacttagtctcctggagccagtaaacagagactttcaccagaaatttgatttggttattaaggctgaacaagacaatggtcatcctcttcctgcctttgccggtctacacattgaaatactggatgaaaacaatcaaagtccatattttacaatgcccagttatcaaggctatatcctggaatctgccccagtgggagcaaccatttcggacagtctcaatttgacttcacctttaagaatagtagctctggacaaggacatagaagatacaaaagacccagagcttcacctttttctgaatgactacacctcagtcttcaccgtcacacagactggtattactcgctacctcaccttacttcaaccagtggacagggaagaacagcaaacttacaccttttcgataacagcatttgatggtgtacaagaaagtgagccagtcatcgtcaatattcaagtgatggatgcaaatgataacacgccaaccttccctgaaatatcctatgatgtgtatgtttatacagacatgagacctggggacagtgtcatacagctcactgcagtcgacgcagacgaagggtcaaatggggagatcacatatgaaatccttgttggggctcagggagacttcatcatcaataaaacaacagggcttatcaccatcgctccaggggtggaaatgatagtcgggcggacttacgcactcacggtccaagcagcggataatgctcctcctgcagagcgaaggaactccatctgcactgtgtatattgaagtgcttccaccaaataatcaaagccctcctcgcttcccacagctgatgtatagccttgaaattagtgaagccatgagggttggtgctgttttattaaatctacaggcaactgatcgagagggagactcaataacatatgccattgagaatggagatcctcagagagtttttaatctttcagaaaccacggggattctaaccttagggaaagcactggacagggaaagcactgatcgctacattctgatcatcacagcttcagatggcaggccagatgggacctcaactgccacagtaaacatagtggtgacagatgtcaatgacaatgctccagtgtttgatccttatctgccaagaaatttatctgtggtggaagaagaagccaatgcctttgtgggtcaagtaaaactatcaacaacgacagtgtgtaaaacagaccctcagagagaaccaaaaggcatcctcagacacgttaaaaacttagcagaacttgaaaaatcagtagctaacatgtacagtcaaatagaaaaaaactatctacgcacaaatgtttcagaacttcaaactatgtgcccttcagaagtaacaaatatggaaatcacatctgaacaaaacaaggggagtttgaacaatattgtcgagggaactgaaaaacaatctcacagtcaatctacttcactgtaatgttgcttttcttattttagtcgggcaaacctcttgttgatcatagtcttcaagttgaacatcaaatttgaacgtcaaagaagactctattattttaccccaaattcaatgaaatgcagttttttttctcgtttttaatttaaaaagatattaacctcatcactactaactcactcatataatagatttaccttactttttaaaaactacaaagtagcataatttgttctacatttatttgaaaagtaagtaattttaatctcttttttagtgggaatatgtgggcatgaaaattagatacccaacttaaaccaaaggcatgtctatcatgtggatgcagtaacatttacatttagtttttgatcgtagttttatatgaatgttccaagaaaaaagcagactgttacaaataagttaaaactgatatgattgataggttctgttttttcttgaagcctatgtatttggtaagaagaaatactaccgaagtaaaatataatgtacctagattgtaggagatgacagacataaggtatttcaaaataaatctcaggtgctataacatgtagtcatctgttttctgataagaacatcttttactctgacttgcttttatcttagtagtatgcttatggatttagtagtatgcttatggatttgataaatcttatactttttc

SEQ ID NO: 24919 - DNA, 9258 bp, Homo sapiens
  source 1..9258: mol_type = unassigned DNA
caacgtgctgagctaatagcgacagatagagggcagacagattcctgctagcagcttagtgttagttgcttgtggtaactaaggcaggtggcatacatctcagaacgtggagaatgatggtatgctttctgagttaacatgttgaactgttttgcttttctaaaaattttcctagtaacattttcttgatgatatgagagtggatatcaatgcctcacagaaacaagaggtggaacatgtgaatgaatcgtcttggaactagattatgagcactggttctttttaaagggatgtgcaagaggcagccttggcaagaaaacttgctgcataatcttacatggactaaagatgaaactttaaaccgcaaatcagctttgagtgaactttgacagaagatgtttcgacagttttatctctggacatgtttagcttcagggatcatcctgggctctctctttgaaatctgcttgggccagtatgatgatgattgcaaactagctaggggaggaccaccagctaccatagttgctattgatgaagaaagtcggaatggtacaattctggtggacaacatgctgatcaaagggactgctggaggaccagaccccaccatagaactttctttaaaggataatgtggattactgggtgttgatggatcctgttaagcaaatgcttttcctgaacagcaccggaagagttctggatagagatccaccgatgaacatacactccattgtggtgcaggtccagtgcatcaacaaaaaagtgggcactattatctaccatgaagtgcgaatagtggtgagagacaggaatgacaactcacccactttcaagcatgaaagctactatgccacagtgaatgagctcactccagttggtaccacaatattcacaggattttcaggagacaatggagctacagatatagatgatggaccaaatggacagatagagtatgttattcagtataatccagatgatccgacatccaatgacacctttgaaattcccctaatgttgactggaaatatagtgttaaggaagaggctcaactatgaagataagactcgctactttgtcataatccaagctaatgaccgtgcccaaaatctgaatgagaggcgaaccaccaccaccactctcacagtggatgttctggatggagatgacttgggtccaatgtttcttccttgtgtccttgtgccaaacactcgtgattgccgtccactcacttatcaagctgccatacctgagttgagaactccggaagaactgaaccccattattgttacgccaccaatccaagccattgatcaggaccggaatattcaaccgccatcagataggccaggaatcctctattccatccttgttgggactcctgaggattacccacgatttttccatatgcatcctaggacagcagaacttagtctcctggagccagtaaacagagactttcaccagaaatttgatttggttattaaggctgaacaagacaatggtcatcctcttcctgcctttgccggtctacacattgaaatactggatgaaaacaatcaaagtccatattttacaatgcccagttatcaaggctatatcctggaatctgccccagtgggagcaaccatttcggacagtctcaatttgacttcacctttaagaatagtagctctggacaaggacatagaagatgttccacccagtggagttcctacaaaagacccagagcttcacctttttctgaatgactacacctcagtcttcaccgtcacacagactggtattactcgctacctcaccttacttcaaccagtggacagggaagaacagcaaacttacaccttttcgataacagcatttgatggtgtacaagaaagtgagccagtcatcgtcaatattcaagtgatggatgcaaatgataacacgccaaccttccctgaaatatcctatgatgtgtatgtttatacagacatgagacctggggacagtgtcatacagctcactgcagtcgacgcagacgaagggtcaaatggggagatcacatatgaaatccttgttggggctcagggagacttcatcatcaataaaacaacagggcttatcaccatcgctccaggggtggaaatgatagtcgggcggacttacgcactcacggtccaagcagcggataatgctcctcctgcagagcgaaggaactccatctgcactgtgtatattgaagtgcttccaccaaataatcaaagccctcctcgcttcccacagctgatgtatagccttgaaattagtgaagccatgagggttggtgctgttttattaaatctacaggcaactgatcgagagggagactcaataacatatgccattgagaatggagatcctcagagagtttttaatctttcagaaaccacggggattctaaccttagggaaagcactggacagggaaagcactgatcgctacattctgatcatcacagcttcagatggcaggccagatgggacctcaactgccacagtaaacatagtggtgacagatgtcaatgacaatgctccagtgtttgatccttatctgccaagaaatttatctgtggtggaagaagaagccaatgcctttgtgggtcaagtaaaagcaacagaccctgatgctggaataaatggtcaagtgcactacagtttgggtaactttaataatctttttcgtatcacatccaatgggagcatttacacagcagtgaagcttaacagagaagtcagggactactatgaacttgttgttgtggcaacagatggagcagtacaccctcgtcattcaactctaaccttggccatcaaggttttggacattgatgataacagtcctgtgttcaccaattcaacatacactgtccttgttgaagagaatttgccagctgggactaccatccttcaaatagaggccaaagatgtcgaccttggagcaaatgtgtcttaccggataagaagcccagaagtgaagcacttttttgcactacatccatttacaggagaactatcgcttttaaggagtttagattatgaggcatttccagaccaagaagcaagtatcacttttctggtagaggcctttgatatttatggaacaatgccacctggtattgctactgtcacagtgattgtaaaggatatgaatgattatcctcctgtctttagtaaacgaatatacaaagggatggtggctccggatgcagtcaagggtacacctatcacaacagtttatgctgaagatgcagaccctcctggattacctgcaagtcgtgtgaggtatagagtagatgatgtacagtttccttaccctgccagtatttttgaagtggaagaagattctggaagagtaataacacgagtcaatcttaatgaagaacctacaacaatttttaagttggtggtggttgcttttgatgatggggagcctgtgatgtccagcagtgccacagtgaagattcttgtcttacatcctggtgagatcccacgcttcacacaggaggaatatagacctcctccagtaagtgaacttgccaccaaagggaccatggttggtgtaatttctgctgctgccattaatcaaagtattgtgtactccattgtttcaggaaatgaagaagatacatttggaattaataacatcacaggtgttatctatgtgaatggacctctggattatgagaccaggacaagctatgtacttcgagtccaagctgattccctggaagtggtccttgccaatctccgagttccttcaaaaagcaatacagctaaagtatacattgagattcaggatgaaaataatcatcccccagtgtttcagaaaaaattctacatcggaggtgtatctgaagatgcaagaatgtttacttctgtactcagagtgaaggctactgataaagatactggcaattatagtgtcatggcctacagactcataataccaccaattaaagagggaaaagaaggatttgtagtggaaacatatacagggcttatcaaaactgctatgctcttccataatatgaggagatcctacttcaagtttcaagttattgcaactgacgactatgggaagggactgagcggcaaagccgatgtactcgtctccgtggtcaatcagctggatatgcaagtcattgtttccaatgtgcctcctactctagtggaaaaaaagatagaagatcttacagagatcttggatcgctatgttcaggaacaaattcctggtgccaaggtcgtagtggagtccattggagctcgccggcatggagatgccttttccctagaagattacaccaaatgtgacttgactgtctatgcaattgacccccaaaccaacagagccatcgatagaaatgagctttttaaatttttggatggcaaactacttgatatcaataaagactttcagccgtattatggggaaggaggacgcattctggagatccggactccagaggcagtgaccagcattaaaaagagaggagaaagtctaggatacacagaaggggccttgttggctctggccttcatcatcatcctctgctgcattcctgccatcttggtggttttggtcagctacagacagtttaaagtacgtcaagctgagtgtacaaagactgcacgaattcaggccgcattacccgcggctaaaccagcagtgccggctcctgcaccagtggcagcgcccccgccgccgccgccgcctccgccaggtgcgcatctctatgaagaacttggagacagctcaatgcataagtatgaaatgcctcaatatgggagtcgccgtcgattgttaccaccagctggacaggaggaatatggtgaggtggttggtgaagctgaggaagaatatgaggaggaagagtgggcaagaaaaagaatgatcaagttagttgttgatcgagagtatgaaaccagctcaactggagaagacagtgctcctgaatgtcagagaaaccgtcttcaccatcctagtatccacagtaatatcaacggcaatatatatattgcacagaatggttctgtggtgagaacccgccgtgcctgcctcacggacaacttaaaagttgcttcccctgttcgactgggagggccctttaagaaactagacaagttggcagtgacacatgaggagaatgtacctctgaacacattatcaaaggggccattttctactgaaaaaatgaatgcaagaccaactctggttacatttgccccttgccctgtggggactgacaatacagcggtgaagccactaaggaacaggctgaaaagcacagttgaacaggagtccatgattgacagtaagaacatcaaggaggctttggaatttcatagtgaccacacacagtctgatgatgaagagctttggatgggcccctggaacaacctccatataccaatgacaaaactgtgaccaattttttaaaagatattttaattaatttttacttacatttttaataaactgtgctttttattgtcactgagaaaacaatgtatggaatttatatcatgcacacaagctaaaactttgaacaatatgctttaaaattttaagagacagatttgcactcacattgttatcaattaatcgtttttcccagaaaatccttttggacatactttcactaaataacctatcgtttaaacatttagctgttttgttgggtcttgaatttttgttcattttaataaacaagaaataattactaaataatcatttatattttattgattaacatagattatgctttatttctagctccacaaaacatttttagtacatgtaattttattttccatagccaaaagggcaaaaaagaagtaagaggatatttacaggcaatgagtttatacagctgctgtctatactgccctaatttttaaaatgaaagctagaattgcaaagtaaagtaaatgagggaatcacctgtaaataattaattattttaaatcatgagcttgttttctttctttattgtcctgtataaaggttttcacattttaccataaatacatttatatcttgaccctttaggaaaccacttgaagtcgtatgtctttttatcaatattatttacaatattctcttgtcccttcatctcatatcaaatatggtagatactttagtttagtttaatcacttgaggttaaataattgtttggagcaacatggaaatctcacccttagcaaaagcttttagggaagtgagaaaggttcgagtaagcagtaatgcatctagaacgacaatttcataatggaagacatggtgaggttagggaagtctcacattaatgtcactagactttaatagtttgtaaacccagcatatcagagtaaaggaatttggcagggttgaaatgtatataatatataaagcttataaaggctatgaattcataacttcaaatgttgtgtttaacttcttccattttcaggttatttatagaatattttaatgcacatatttatgtgcctaaaatccagaaccaggaaatcattgcctgggcattttttaaaatcaaagaacatggtcttgattttttaccattgaacaaagcacagtgtttcatcataagtagaaatgaaaacagaatatcctttaaaaaacttgccttgtgtgttgcttattttccagatgatgtaaaaagaatgaaacaatatagattaagagaattcagaattctattgaatattacttagtatgatatagatgtagctcacttcaaattttgcacagtattgaccaagttcaggttttaatgaaatttcctcatgcatgcttaatatatggttgaaggactgaataatgcactattatttattcccctcttacatgtttcgcgtcttaaaaattgtttattattatgctatttcctcatttccaaagtgaatgaattgtactgacataaacttgccgacttgtaagagtagtatgtttttacttcagatttccaagaaaatatttgagatcaaatacagtaacatctcatctaccttattttattgagaattaatgcattccatacccttgccaaaaaaacaaaacaaaacaaacaaacaaaaaaaaacctagtggcattagctagattagaaacgtagaatcatgaccacacctcctggcctgccaaacaagcatccacattttcaaaagatcctaaggtggtttatatgcacattaaattttggaagcaatgaagtccggggcttattccttcaggcaccaaagcaatggtttttagtataggatactttgtataggaattagattaagcatatatttccctactaattcaatcagaggtcatcgaatataatttaatattatcttgatacccccagatcatctcagtcagcatcccttgatattctctctatatacagcttcatggctgcgtttttgtcctttgatttctggctgtgacatttaacttattctgttgttgtgcctttctcacatttttttctttcagtttatagcttctagtatcctgatgggaaagtttgtgttttttgtttgttttcttaatgttgaaaaatcatgaagcttaagatgggaattaggtacacggattcaaccaaatgttttgcgactcttagacgctttctttggttaccagtagatttggaaatatgatgttggcagaagtctagtggcctgacatatgagatgtcactgtattttaaactacattttttatgagaaaatatgcaaaattttacaagccacttagcagacacatttcagtaatttaaacttgatcatttcagtaaaaacaatcatgaggtcaatcatctgttacttaatggagatagtataaagagaagcagaatttacacagagcaaccaaaccaaatatttggtcagtatatttttgggtaacgtagagcagcaaaattattactaactaaataaatctggatcaattaaatagttactttcatagaactttcactagtctataaatccctgactcaggattaaaactgtggaacccagaggaaatacccaggtatgtttaatcttaagaatacttcatataaataacgtttcaatgtaaatatttataaagaaattggttgttatttttcctaggaaggtgtaggaaggttttcttgttgttctcaatcagcactagcttcaatcaggcagaagaaacagcaggtcttggctaatcgaggtgagaacagaatgatgtaatgactaatattgcaacccgttgattttagaaggtcttgtgggcattaagggaaagcagaggaagaatgagaaaatatggtcagagtgacataggacatttgtgacttaatgaccatcgaatcacaggtgttaatctccctctctcaatttgtctttctcattaattacagactctgagagttgtcatagaattgcaaccgtaggttggccaaaaccatctttttaaaatacagaagaaagtttgccttgaattttatatgtgatatgtcattcatgttattttaccacattgttcacagggatgttaaagactattatttacttaagtggttgttccaaaggtgattcagtagttaccattaaaatattatttaaaaacatttttatatcatagagccagaagtaattgaatattgactctcgagggaagacattttctgtcttttatttcatgagctttgatttttctctttctctgcttcaccttctgcactttataccttaagtgggatttatataccacttgaatttaattagcaaaataggcaaaaagtgctaataatctattctcagggcagatgcctattggtgcctgcaaattacacagcgataaggctgaaggataggttcaaaataatgttgaggacttacacattttatagatagtttctttctattcccaaatggtatgtgaaatttttgttctattttttttattggttttcaatagttaattttgatctttatcataagaagctttagttatagactggtatttttttcattgcaatctactttaaatttatggtcagttaagcacatgtatggaagattcgaacattgtctatagtttgaaaaatctatcaacaccttcactgctttcccaatttctttatccaaatacctgttcttccttaacaaatattatgttactgtataagaatctgaattagaagttttaagttaaaatgcattgttattcactacacaatgtttcaaaaataaattttcatttgaaaa

SEQ ID NO: 24920 - DNA, 6836 bp, Homo sapiens
  source 1..6836: mol_type = unassigned DNA
caacgtgctgagctaatagcgacagatagagggcagacagattcctgctagcagcttagtgttagttgcttgtggtaactaaggcaggtggcatacatctcagaacgtggagaatgatggtatgctttctgagttaacatgttgaactgttttgcttttctaaaaattttcctagtaacattttcttgatgatatgagagtggatatcaatgcctcacagaaacaagaggtggaacatgtgaatgaatcgtcttggaactagattatgagcactggttctttttaaagggatgtgcaagaggcagccttggcaagaaaacttgctgcataatcttacatggactaaagatgaaactttaaaccgcaaatcagctttgagtgaactttgacagaagatgtttcgacagttttatctctggacatgtttagcttcagggatcatcctgggctctctctttgaaatctgcttgggccagtatgatgatgattgcaaactagctaggggaggaccaccagctaccatagttgctattgatgaagaaagtcggaatggtacaattctggtggacaacatgctgatcaaagggactgctggaggaccagaccccaccatagaactttctttaaaggataatgtggattactgggtgttgatggatcctgttaagcaaatgcttttcctgaacagcaccggaagagttctggatagagatccaccgatgaacatacactccattgtggtgcaggtccagtgcatcaacaaaaaagtgggcactattatctaccatgaagtgcgaatagtggtgagagacaggaatgacaactcacccactttcaagcatgaaagctactatgccacagtgaatgagctcactccagttggtaccacaatattcacaggattttcaggagacaatggagctacagatatagatgatggaccaaatggacagatagagtatgttattcagtataatccagatgatccgacatccaatgacacctttgaaattcccctaatgttgactggaaatatagtgttaaggaagaggctcaactatgaagataagactcgctactttgtcataatccaagctaatgaccgtgcccaaaatctgaatgagaggcgaaccaccaccaccactctcacagtggatgttctggatggagatgacttgggtccaatgtttcttccttgtgtccttgtgccaaacactcgtgattgccgtccactcacttatcaagctgccatacctgagttgagaactccggaagaactgaaccccattattgttacgccaccaatccaagccattgatcaggaccggaatattcaaccgccatcagataggccaggaatcctctattccatccttgttgggactcctgaggattacccacgatttttccatatgcatcctaggacagcagaacttagtctcctggagccagtaaacagagactttcaccagaaatttgatttggttattaaggctgaacaagacaatggtcatcctcttcctgcctttgccggtctacacattgaaatactggatgaaaacaatcaaagtccatattttacaatgcccagttatcaaggctatatcctggaatctgccccagtgggagcaaccatttcggacagtctcaatttgacttcacctttaagaatagtagctctggacaaggacatagaagatacaaaagacccagagcttcacctttttctgaatgactacacctcagtcttcaccgtcacacagactggtattactcgctacctcaccttacttcaaccagtggacagggaagaacagcaaacttacaccttttcgataacagcatttgatggtgtacaagaaagtgagccagtcatcgtcaatattcaagtgatggatgcaaatgataacacgccaaccttccctgaaatatcctatgatgtgtatgtttatacagacatgagacctggggacagtgtcatacagctcactgcagtcgacgcagacgaagggtcaaatggggagatcacatatgaaatccttgttggggctcagggagacttcatcatcaataaaacaacagggcttatcaccatcgctccaggggtggaaatgatagtcgggcggacttacgcactcacggtccaagcagcggataatgctcctcctgcagagcgaaggaactccatctgcactgtgtatattgaagtgcttccaccaaataatcaaagccctcctcgcttcccacagctgatgtatagccttgaaattagtgaagccatgagggttggtgctgttttattaaatctacaggcaactgatcgagagggagactcaataacatatgccattgagaatggagatcctcagagagtttttaatctttcagaaaccacggggattctaaccttagggaaagcactggacagggaaagcactgatcgctacattctgatcatcacagcttcagatggcaggccagatgggacctcaactgccacagtaaacatagtggtgacagatgtcaatgacaatgctccagtgtttgatccttatctgccaagaaatttatctgtggtggaagaagaagccaatgcctttgtgggtcaagtaaaagcaacagaccctgatgctggaataaatggtcaagtgcactacagtttgggtaactttaataatctttttcgtatcacatccaatgggagcatttacacagcagtgaagcttaacagagaagtcagggactactatgaacttgttgttgtggcaacagatggagcagtacaccctcgtcattcaactctaaccttggccatcaaggttttggacattgatgataacagtcctgtgttcaccaattcaacatacactgtccttgttgaagagaatttgccagctgggactaccatccttcaaatagaggccaaagatgtcgaccttggagcaaatgtgtcttaccggataagaagcccagaagtgaagcacttttttgcactacatccatttacaggagaactatcgcttttaaggagtttagattatgaggcatttccagaccaagaagcaagtatcacttttctggtagaggcctttgatatttatggaacaatgccacctggtattgctactgtcacagtgattgtaaaggatatgaatgattatcctcctgtctttagtaaacgaatatacaaagggatggtggctccggatgcagtcaagggtacacctatcacaacagtttatgctgaagatgcagaccctcctggattacctgcaagtcgtgtgaggtatagagtagatgatgtacagtttccttaccctgccagtatttttgaagtggaagaagattctggaagagtaataacacgagtcaatcttaatgaagaacctacaacaatttttaagttggtggtggttgcttttgatgatggggagcctgtgatgtccagcagtgccacagtgaagattcttgtcttacatcctggtgagatcccacgcttcacacaggaggaatatagacctcctccagtaagtgaacttgccaccaaagggaccatggttggtgtaatttctgctgctgccattaatcaaagtattgtgtactccattgtttcaggaaatgaagaagatacatttggaattaataacatcacaggtgttatctatgtgaatggacctctggattatgagaccaggacaagctatgtacttcgagtccaagctgattccctggaagtggtccttgccaatctccgagttccttcaaaaagcaatacagctaaagtatacattgagattcaggatgaaaataatcatcccccagtgtttcagaaaaaattctacatcggaggtgtatctgaagatgcaagaatgtttacttctgtactcagagtgaaggctactgataaagatactggcaattatagtgtcatggcctacagactcataataccaccaattaaagagggaaaagaaggatttgtagtggaaacatatacagggcttatcaaaactgctatgctcttccataatatgaggagatcctacttcaagtttcaagttattgcaactgacgactatgggaagggactgagcggcaaagccgatgtactcgtctccgtggtcaatcagctggatatgcaagtcattgtttccaatgtgcctcctactctagtggaaaaaaagatagaagatcttacagagatcttggatcgctatgttcaggaacaaattcctggtgccaaggtcgtagtggagtccattggagctcgccggcatggagatgccttttccctagaagattacaccaaatgtgacttgactgtctatgcaattgacccccaaaccaacagagccatcgatagaaatgagctttttaaatttttggatggcaaactacttgatatcaataaagactttcagccgtattatggggaaggaggacgcattctggagatccggactccagaggcagtgaccagcattaaaaagagaggagaaagtctaggatacacagaaggggccttgttggctctggccttcatcatcatcctctgctgcattcctgccatcttggtggttttggtcagctacagacaacgtcaagctgagtgtacaaagactgcacgaattcaggccgcattacccgcggctaaaccagcagtgccggctcctgcaccagtggcagcgcccccgccgccgccgccgcctccgccaggtgcgcatctctatgaagaacttggagacagctcaattcttttccttctctaccattttcaacaaagcaggggaaataactcagtctcagaagacaggaaacatcaacaagttgtgatgcccttttcttccaatactattgaggctcacaagtcagctcatgtagacggatcacttaagagcaacaaactgaagtctgcaagaaaattcacatttctatctgatgaggatgacttaagtgcccataatcccctttataaggaaaacataagtcaagtatcaacaaattcagacatttcacagagaacagattttgtagacccattttcacccaaaatacaagccaagagtaagtctctgaggggcccaagagaaaagattcagaggctgtggagtcagtcagtcagcttacccaggaggctgatgaggaaagttccaaatagaccagagatcatagatctgcagcagtggcaaggcaccaggcagaaagctgaaaatgaaaacactggaatctgtacaaacaaaagaggtagcagcaatccattgcttacaactgaagaggcaaatttgacagagaaagaggaaataaggcaaggtgaaacactgatgatagaaggaacagaacagttgaaatctctctcttcagactcttcattttgctttcccaggcctcacttctcattctccactttgccaactgtttcaagaactgtggaactcaaatcagaacctaatgtcatcagttctcctgctgagtgttccttggaactttctccttcaaggccttgtgttttacattcttcactctctaggagagagacacctatttgtatgttacctattgaaaccgaaagaaatatttttgaaaattttgcccatccaccaaacatctctccttctgcctgtccccttccccctcctcctcctatttctcctccttctcctcctcctgctcctgctcctcttgctcctcctcctgacatttctcctttttctcttttttgtcctcctccctctcctccttctatccctcttcctcttcctcctcctacattttttccactttccgtttcaacgtctggtcccccaacaccacctcttctacctccatttccaactcctcttcctccaccacctccttctattccttgccctccacctccttcagcttcatttctgtccacagagtgtgtctgtataacaggtgttaaatgcacgaccaacttgatgcctgccgagaaaattaagtcctctatgacacagctatcaacaacgacagtgtgtaaaacagaccctcagagagaaccaaaaggcatcctcagacacgttaaaaacttagcagaacttgaaaaatcagtagctaacatgtacagtcaaatagaaaaaaactatctacgcacaaatgtttcagaacttcaaactatgtgcccttcagaagtaacaaatatggaaatcacatctgaacaaaacaaggggagtttgaacaatattgtcgagggaactgaaaaacaatctcacagtcaatctacttcactgtaatgttgcttttcttattttagtcgggcaaacctcttgttgatcatagtcttcaagttgaacatcaaatttgaacgtcaaagaagactctattattttaccccaaattcaatgaaatgcagttttttttctcgtttttaatttaaaaagatattaacctcatcactactaactcactcatataatagatttaccttactttttaaaaactacaaagtagcataatttgttctacatttatttgaaaagtaagtaattttaatctcttttttagtgggaatatgtgggcatgaaaattagatacccaacttaaaccaaaggcatgtctatcatgtggatgcagtaacatttacatttagtttttgatcgtagttttatatgaatgttccaagaaaaaagcagactgttacaaataagttaaaactgatatgattgataggttctgttttttcttgaagcctatgtatttggtaagaagaaatactaccgaagtaaaatataatgtacctagattgtaggagatgacagacataaggtatttcaaaataaatctcaggtgctataacatgtagtcatctgttttct

SEQ ID NO: 24921 - DNA, 6901 bp, Homo sapiens
  source 1..6901: mol_type = unassigned DNA
caacgtgctgagctaatagcgacagatagagggcagacagattcctgctagcagcttagtgttagttgcttgtggtaactaaggcaggtggcatacatctcagaacgtggagaatgatggtatgctttctgagttaacatgttgaactgttttgcttttctaaaaattttcctagtaacattttcttgatgatatgagagtggatatcaatgcctcacagaaacaagaggtggaacatgtgaatgaatcgtcttggaactagattatgagcactggttctttttaaagggatgtgcaagaggcagccttggcaagaaaacttgctgcataatcttacatggactaaagatgaaactttaaaccgcaaatcagctttgagtgaactttgacagaagatgtttcgacagttttatctctggacatgtttagcttcagggatcatcctgggctctctctttgaaatctgcttgggccagtatgatgatgattgcaaactagctaggggaggaccaccagctaccatagttgctattgatgaagaaagtcggaatggtacaattctggtggacaacatgctgatcaaagggactgctggaggaccagaccccaccatagaactttctttaaaggataatgtggattactgggtgttgatggatcctgttaagcaaatgcttttcctgaacagcaccggaagagttctggatagagatccaccgatgaacatacactccattgtggtgcaggtccagtgcatcaacaaaaaagtgggcactattatctaccatgaagtgcgaatagtggtgagagacaggaatgacaactcacccactttcaagcatgaaagctactatgccacagtgaatgagctcactccagttggtaccacaatattcacaggattttcaggagacaatggagctacagatatagatgatggaccaaatggacagatagagtatgttattcagtataatccagatgatccggaccgtgcccaaaatctgaatgagaggcgaaccaccaccaccactctcacagtggatgttctggatggagatgacttgggtccaatgtttcttccttgtgtccttgtgccaaacactcgtgattgccgtccactcacttatcaagctgccatacctgagttgagaactccggaagaactgaaccccattattgttacgccaccaatccaagccattgatcaggaccggaatattcaaccgccatcagataggccaggaatcctctattccatccttgttgggactcctgaggattacccacgatttttccatatgcatcctaggacagcagaacttagtctcctggagccagtaaacagagactttcaccagaaatttgatttggttattaaggctgaacaagacaatggtcatcctcttcctgcctttgccggtctacacattgaaatactggatgaaaacaatcaaagtccatattttacaatgcccagttatcaaggctatatcctggaatctgccccagtgggagcaaccatttcggacagtctcaatttgacttcacctttaagaatagtagctctggacaaggacatagaagatacaaaagacccagagcttcacctttttctgaatgactacacctcagtcttcaccgtcacacagactggtattactcgctacctcaccttacttcaaccagtggacagggaagaacagcaaacttacaccttttcgataacagcatttgatggtgtacaagaaagtgagccagtcatcgtcaatattcaagtgatggatgcaaatgataacacgccaaccttccctgaaatatcctatgatgtgtatgtttatacagacatgagacctggggacagtgtcatacagctcactgcagtcgacgcagacgaagggtcaaatggggagatcacatatgaaatccttgttggggctcagggagacttcatcatcaataaaacaacagggcttatcaccatcgctccaggggtggaaatgatagtcgggcggacttacgcactcacggtccaagcagcggataatgctcctcctgcagagcgaaggaactccatctgcactgtgtatattgaagtgcttccaccaaataatcaaagccctcctcgcttcccacagctgatgtatagccttgaaattagtgaagccatgagggttggtgctgttttattaaatctacaggcaactgatcgagagggagactcaataacatatgccattgagaatggagatcctcagagagtttttaatctttcagaaaccacggggattctaaccttagggaaagcactggacagggaaagcactgatcgctacattctgatcatcacagcttcagatggcaggccagatgggacctcaactgccacagtaaacatagtggtgacagatgtcaatgacaatgctccagtgtttgatccttatctgccaagaaatttatctgtggtggaagaagaagccaatgcctttgtgggtcaagtaaaagcaacagaccctgatgctggaataaatggtcaagtgcactacagtttgggtaactttaataatctttttcgtatcacatccaatgggagcatttacacagcagtgaagcttaacagagaagtcagggactactatgaacttgttgttgtggcaacagatggagcagtacaccctcgtcattcaactctaaccttggccatcaaggttttggacattgatgataacagtcctgtgttcaccaattcaacatacactgtccttgttgaagagaatttgccagctgggactaccatccttcaaatagaggccaaagatgtcgaccttggagcaaatgtgtcttaccggataagaagcccagaagtgaagcacttttttgcactacatccatttacaggagaactatcgcttttaaggagtttagattatgaggcatttccagaccaagaagcaagtatcacttttctggtagaggcctttgatatttatggaacaatgccacctggtattgctactgtcacagtgattgtaaaggatatgaatgattatcctcctgtctttagtaaacgaatatacaaagggatggtggctccggatgcagtcaagggtacacctatcacaacagtttatgctgaagatgcagaccctcctggattacctgcaagtcgtgtgaggtatagagtagatgatgtacagtttccttaccctgccagtatttttgaagtggaagaagattctggaagagtaataacacgagtcaatcttaatgaagaacctacaacaatttttaagttggtggtggttgcttttgatgatggggagcctgtgatgtccagcagtgccacagtgaagattcttgtcttacatcctggtgagatcccacgcttcacacaggaggaatatagacctcctccagtaagtgaacttgccaccaaagggaccatggttggtgtaatttctgctgctgccattaatcaaagtattgtgtactccattgtttcaggaaatgaagaagatacatttggaattaataacatcacaggtgttatctatgtgaatggacctctggattatgagaccaggacaagctatgtacttcgagtccaagctgattccctggaagtggtccttgccaatctccgagttccttcaaaaagcaatacagctaaagtatacattgagattcaggatgaaaataatcatcccccagtgtttcagaaaaaattctacatcggaggtgtatctgaagatgcaagaatgtttacttctgtactcagagtgaaggctactgataaagatactggcaattatagtgtcatggcctacagactcataataccaccaattaaagagggaaaagaaggatttgtagtggaaacatatacagggcttatcaaaactgctatgctcttccataatatgaggagatcctacttcaagtttcaagttattgcaactgacgactatgggaagggactgagcggcaaagccgatgtactcgtctccgtggtcaatcagctggatatgcaagtcattgtttccaatgtgcctcctactctagtggaaaaaaagatagaagatcttacagagatcttggatcgctatgttcaggaacaaattcctggtgccaaggtcgtagtggagtccattggagctcgccggcatggagatgccttttccctagaagattacaccaaatgtgacttgactgtctatgcaattgacccccaaaccaacagagccatcgatagaaatgagctttttaaatttttggatggcaaactacttgatatcaataaagactttcagccgtattatggggaaggaggacgcattctggagatccggactccagaggcagtgaccagcattaaaaagagaggagaaagtctaggatacacagaaggggccttgttggctctggccttcatcatcatcctctgctgcattcctgccatcttggtggttttggtcagctacagacaacgtcaagctgagtgtacaaagactgcacgaattcaggccgcattacccgcggctaaaccagcagtgccggctcctgcaccagtggcagcgcccccgccgccgccgccgcctccgccaggtgcgcatctctatgaagaacttggagacagctcaattcttttccttctctaccattttcaacaaagcaggggaaataactcagtctcagaagacaggaaacatcaacaagttgtgatgcccttttcttccaatactattgaggctcacaagtcagctcatgtagacggatcacttaagagcaacaaactgaagtctgcaagaaaattcacatttctatctgatgaggatgacttaagtgcccataatcccctttataaggaaaacataagtcaagtatcaacaaattcagacatttcacagagaacagattttgtagacccattttcacccaaaatacaagccaagagtaagtctctgaggggcccaagagaaaagattcagaggctgtggagtcagtcagtcagcttacccaggaggctgatgaggaaagttccaaatagaccagagatcatagatctgcagcagtggcaaggcaccaggcagaaagctgaaaatgaaaacactggaatctgtacaaacaaaagaggtagcagcaatccattgcttacaactgaagaggcaaatttgacagagaaagaggaaataaggcaaggtgaaacactgatgatagaaggaacagaacagttgaaatctctctcttcagactcttcattttgctttcccaggcctcacttctcattctccactttgccaactgtttcaagaactgtggaactcaaatcagaacctaatgtcatcagttctcctgctgagtgttccttggaactttctccttcaaggccttgtgttttacattcttcactctctaggagagagacacctatttgtatgttacctattgaaaccgaaagaaatatttttgaaaattttgcccatccaccaaacatctctccttctgcctgtccccttccccctcctcctcctatttctcctccttctcctcctcctgctcctgctcctcttgctcctcctcctgacatttctcctttttctcttttttgtcctcctccctctcctccttctatccctcttcctcttcctcctcctacattttttccactttccgtttcaacgtctggtcccccaacaccacctcttctacctccatttccaactcctcttcctccaccacctccttctattccttgccctccacctccttcagcttcatttctgtccacagagtgtgtctgtataacaggtgttaaatgcacgaccaacttgatgcctgccgagaaaattaagtcctctatgacacagctatcaacaacgacagtgtgtaaaacagaccctcagagagaaccaaaaggcatcctcagacacgttaaaaacttagcagaacttgaaaaatcagtagctaacatgtacagtcaaatagaaaaaaactatctacgcacaaatgtttcagaacttcaaactatgtgcccttcagaagtaacaaatatggaaatcacatctgaacaaaacaaggggagtttgaacaatattgtcgagggaactgaaaaacaatctcacagtcaatctacttcactgtaatgttgcttttcttattttagtcgggcaaacctcttgttgatcatagtcttcaagttgaacatcaaatttgaacgtcaaagaagactctattattttaccccaaattcaatgaaatgcagttttttttctcgtttttaatttaaaaagatattaacctcatcactactaactcactcatataatagatttaccttactttttaaaaactacaaagtagcataatttgttctacatttatttgaaaagtaagtaattttaatctcttttttagtgggaatatgtgggcatgaaaattagatacccaacttaaaccaaaggcatgtctatcatgtggatgcagtaacatttacatttagtttttgatcgtagttttatatgaatgttccaagaaaaaagcagactgttacaaataagttaaaactgatatgattgataggttctgttttttcttgaagcctatgtatttggtaagaagaaatactaccgaagtaaaatataatgtacctagattgtaggagatgacagacataaggtatttcaaaataaatctcaggtgctataacatgtagtcatctgttttctgataagaacatcttttactctgacttgcttttatcttagtagtatgcttatggatttagtagtatgcttatggatttgataaatcttatactttttcagttgctgtcttattctctttatttctcattgtgctttcccttcccttctttataatgaaaataaatcttgagtcgttg

SEQ ID NO: 24922 - DNA, 6882 bp, Homo sapiens
  source 1..6882: mol_type = unassigned DNA
caacgtgctgagctaatagcgacagatagagggcagacagattcctgctagcagcttagtgttagttgcttgtggtaactaaggcaggtggcatacatctcagaacgtggagaatgatggtatgctttctgagttaacatgttgaactgttttgcttttctaaaaattttcctagtaacattttcttgatgatatgagagtggatatcaatgcctcacagaaacaagaggtggaacatgtgaatgaatcgtcttggaactagattatgagcactggttctttttaaagggatgtgcaagaggcagccttggcaagaaaacttgctgcataatcttacatggactaaagatgaaactttaaaccgcaaatcagctttgagtgaactttgacagaagatgtttcgacagttttatctctggacatgtttagcttcagggatcatcctgggctctctctttgaaatctgcttgggccagtatgatgatggtacaattctggtggacaacatgctgatcaaagggactgctggaggaccagaccccaccatagaactttctttaaaggataatgtggattactgggtgttgatggatcctgttaagcaaatgcttttcctgaacagcaccggaagagttctggatagagatccaccgatgaacatacactccattgtggtgcaggtccagtgcatcaacaaaaaagtgggcactattatctaccatgaagtgcgaatagtggtgagagacaggaatgacaactcacccactttcaagcatgaaagctactatgccacagtgaatgagctcactccagttggtaccacaatattcacaggattttcaggagacaatggagctacagatatagatgatggaccaaatggacagatagagtatgttattcagtataatccagatgatccgacatccaatgacacctttgaaattcccctaatgttgactggaaatatagtgttaaggaagaggctcaactatgaagataagactcgctactttgtcataatccaagctaatgaccgtgcccaaaatctgaatgagaggcgaaccaccaccaccactctcacagtggatgttctggatggagatgacttgggtccaatgtttcttccttgtgtccttgtgccaaacactcgtgattgccgtccactcacttatcaagctgccatacctgagttgagaactccggaagaactgaaccccattattgttacgccaccaatccaagccattgatcaggaccggaatattcaaccgccatcagataggccaggaatcctctattccatccttgttgggactcctgaggattacccacgatttttccatatgcatcctaggacagcagaacttagtctcctggagccagtaaacagagactttcaccagaaatttgatttggttattaaggctgaacaagacaatggtcatcctcttcctgcctttgccggtctacacattgaaatactggatgaaaacaatcaaagtccatattttacaatgcccagttatcaaggctatatcctggaatctgccccagtgggagcaaccatttcggacagtctcaatttgacttcacctttaagaatagtagctctggacaaggacatagaagatacaaaagacccagagcttcacctttttctgaatgactacacctcagtcttcaccgtcacacagactggtattactcgctacctcaccttacttcaaccagtggacagggaagaacagcaaacttacaccttttcgataacagcatttgatggtgtacaagaaagtgagccagtcatcgtcaatattcaagtgatggatgcaaatgataacacgccaaccttccctgaaatatcctatgatgtgtatgtttatacagacatgagacctggggacagtgtcatacagctcactgcagtcgacgcagacgaagggtcaaatggggagatcacatatgaaatccttgttggggctcagggagacttcatcatcaataaaacaacagggcttatcaccatcgctccaggggtggaaatgatagtcgggcggacttacgcactcacggtccaagcagcggataatgctcctcctgcagagcgaaggaactccatctgcactgtgtatattgaagtgcttccaccaaataatcaaagccctcctcgcttcccacagctgatgtatagccttgaaattagtgaagccatgagggttggtgctgttttattaaatctacaggcaactgatcgagagggagactcaataacatatgccattgagaatggagatcctcagagagtttttaatctttcagaaaccacggggattctaaccttagggaaagcactggacagggaaagcactgatcgctacattctgatcatcacagcttcagatggcaggccagatgggacctcaactgccacagtaaacatagtggtgacagatgtcaatgacaatgctccagtgtttgatccttatctgccaagaaatttatctgtggtggaagaagaagccaatgcctttgtgggtcaagtaaaagcaacagaccctgatgctggaataaatggtcaagtgcactacagtttgggtaactttaataatctttttcgtatcacatccaatgggagcatttacacagcagtgaagcttaacagagaagtcagggactactatgaacttgttgttgtggcaacagatggagcagtacaccctcgtcattcaactctaaccttggccatcaaggttttggacattgatgataacagtcctgtgttcaccaattcaacatacactgtccttgttgaagagaatttgccagctgggactaccatccttcaaatagaggccaaagatgtcgaccttggagcaaatgtgtcttaccggataagaagcccagaagtgaagcacttttttgcactacatccatttacaggagaactatcgcttttaaggagtttagattatgaggcatttccagaccaagaagcaagtatcacttttctggtagaggcctttgatatttatggaacaatgccacctggtattgctactgtcacagtgattgtaaaggatatgaatgattatcctcctgtctttagtaaacgaatatacaaagggatggtggctccggatgcagtcaagggtacacctatcacaacagtttatgctgaagatgcagaccctcctggattacctgcaagtcgtgtgaggtatagagtagatgatgtacagtttccttaccctgccagtatttttgaagtggaagaagattctggaagagtaataacacgagtcaatcttaatgaagaacctacaacaatttttaagttggtggtggttgcttttgatgatggggagcctgtgatgtccagcagtgccacagtgaagattcttgtcttacatcctggtgagatcccacgcttcacacaggaggaatatagacctcctccagtaagtgaacttgccaccaaagggaccatggttggtgtaatttctgctgctgccattaatcaaagtattgtgtactccattgtttcaggaaatgaagaagatacatttggaattaataacatcacaggtgttatctatgtgaatggacctctggattatgagaccaggacaagctatgtacttcgagtccaagctgattccctggaagtggtccttgccaatctccgagttccttcaaaaagcaatacagctaaagtatacattgagattcaggatgaaaataatcatcccccagtgtttcagaaaaaattctacatcggaggtgtatctgaagatgcaagaatgtttacttctgtactcagagtgaaggctactgataaagatactggcaattatagtgtcatggcctacagactcataataccaccaattaaagagggaaaagaaggatttgtagtggaaacatatacagggcttatcaaaactgctatgctcttccataatatgaggagatcctacttcaagtttcaagttattgcaactgacgactatgggaagggactgagcggcaaagccgatgtactcgtctccgtggtcaatcagctggatatgcaagtcattgtttccaatgtgcctcctactctagtggaaaaaaagatagaagatcttacagagatcttggatcgctatgttcaggaacaaattcctggtgccaaggtcgtagtggagtccattggagctcgccggcatggagatgccttttccctagaagattacaccaaatgtgacttgactgtctatgcaattgacccccaaaccaacagagccatcgatagaaatgagctttttaaatttttggatggcaaactacttgatatcaataaagactttcagccgtattatggggaaggaggacgcattctggagatccggactccagaggcagtgaccagcattaaaaagagaggagaaagtctaggatacacagaaggggccttgttggctctggccttcatcatcatcctctgctgcattcctgccatcttggtggttttggtcagctacagacaacgtcaagctgagtgtacaaagactgcacgaattcaggccgcattacccgcggctaaaccagcagtgccggctcctgcaccagtggcagcgcccccgccgccgccgccgcctccgccaggtgcgcatctctatgaagaacttggagacagctcaatgcataatcttttccttctctaccattttcaacaaagcaggggaaataactcagtctcagaagacaggaaacatcaacaagttgtgatgcccttttcttccaatactattgaggctcacaagtcagctcatgtagacggatcacttaagagcaacaaactgaagtctgcaagaaaattcacatttctatctgatgaggatgacttaagtgcccataatcccctttataaggaaaacataagtcaagtatcaacaaattcagacatttcacagagaacagattttgtagacccattttcacccaaaatacaagccaagagtaagtctctgaggggcccaagagaaaagattcagaggctgtggagtcagtcagtcagcttacccaggaggctgatgaggaaagttccaaatagaccagagatcatagatctgcagcagtggcaaggcaccaggcagaaagctgaaaatgaaaacactggaatctgtacaaacaaaagaggtagcagcaatccattgcttacaactgaagaggcaaatttgacagagaaagaggaaataaggcaaggtgaaacactgatgatagaaggaacagaacagttgaaatctctctcttcagactcttcattttgctttcccaggcctcacttctcattctccactttgccaactgtttcaagaactgtggaactcaaatcagaacctaatgtcatcagttctcctgctgagtgttccttggaactttctccttcaaggccttgtgttttacattcttcactctctaggagagagacacctatttgtatgttacctattgaaaccgaaagaaatatttttgaaaattttgcccatccaccaaacatctctccttctgcctgtccccttccccctcctcctcctatttctcctccttctcctcctcctgctcctgctcctcttgctcctcctcctgacatttctcctttttctcttttttgtcctcctccctctcctccttctatccctcttcctcttcctcctcctacattttttccactttccgtttcaacgtctggtcccccaacaccacctcttctacctccatttccaactcctcttcctccaccacctccttctattccttgccctccacctccttcagcttcatttctgtccacagagtgtgtctgtataacaggtgttaaatgcacgaccaacttgatgcctgccgagaaaattaagtcctctatgacacagctatcaacaacgacagtgtgtaaaacagaccctcagagagaaccaaaaggcatcctcagacacgttaaaaacttagcagaacttgaaaaatcagtagctaacatgtacagtcaaatagaaaaaaactatctacgcacaaatgtttcagaacttcaaactatgtgcccttcagaagtaacaaatatggaaatcacatctgaacaaaacaaggggagtttgaacaatattgtcgagggaactgaaaaacaatctcacagtcaatctacttcactgtaatgttgcttttcttattttagtcgggcaaacctcttgttgatcatagtcttcaagttgaacatcaaatttgaacgtcaaagaagactctattattttaccccaaattcaatgaaatgcagttttttttctcgtttttaatttaaaaagatattaacctcatcactactaactcactcatataatagatttaccttactttttaaaaactacaaagtagcataatttgttctacatttatttgaaaagtaagtaattttaatctcttttttagtgggaatatgtgggcatgaaaattagatacccaacttaaaccaaaggcatgtctatcatgtggatgcagtaacatttacatttagtttttgatcgtagttttatatgaatgttccaagaaaaaagcagactgttacaaataagttaaaactgatatgattgataggttctgttttttcttgaagcctatgtatttggtaagaagaaatactaccgaagtaaaatataatgtacctagattgtaggagatgacagacataaggtatttcaaaataaatctcaggtgctataacatgtagtcatctgttttctgataagaacatcttttactctgacttgcttttatcttagtagtatgcttatggatttagtagtatgcttatggatttgataaatcttatactttttcagttgctgt

SEQ ID NO: 24923 - DNA, 6044 bp, Homo sapiens
  source 1..6044: mol_type = unassigned DNA
caacgtgctgagctaatagcgacagatagagggcagacagattcctgctagcagcttagtgttagttgcttgtggtaactaaggcaggtggcatacatctcagaacgtggagaatgatggtatgctttctgagttaacatgttgaactgttttgcttttctaaaaattttcctagtaacattttcttgatgatatgagagtggatatcaatgcctcacagaaacaagaggtggaacatgtgaatgaatcgtcttggaactagattatgagcactggttctttttaaagggatgtgcaagaggcagccttggcaagaaaacttgctgcataatcttacatggactaaagatgaaactttaaaccgcaaatcagctttgagtgaactttgacagaagatgtttcgacagttttatctctggacatgtttagcttcagggatcatcctgggctctctctttgaaatctgcttgggccagtatgatgatgattgcaaactagctaggggaggaccaccagctaccatagttgctattgatgaagaaagtcggaatggtacaattctggtggacaacatgctgatcaaagggactgctggaggaccagaccccaccatagaactttctttaaaggataatgtggattactgggtgttgatggatcctgttaagcaaatgcttttcctgaacagcaccggaagagttctggatagagatccaccgatgaacatacactccattgtggtgcaggtccagtgcatcaacaaaaaagtgggcactattatctaccatgaagtgcgaatagtggtgagagacaggaatgacaactcacccactttcaagcatgaaagctactatgccacagtgaatgagctcactccagttggtaccacaatattcacaggattttcaggagacaatggagctacagatatagatgatggaccaaatggacagatagagtatgttattcagtataatccagatgatccgacatccaatgacacctttgaaattcccctaatgttgactggaaatatagtgttaaggaagaggctcaactatgaagataagactcgctactttgtcataatccaagctaatgaccgtgcccaaaatctgaatgagaggcgaaccaccaccaccactctcacagtggatgttctggatggagatgacttgggtccaatgtttcttccttgtgtccttgtgccaaacactcgtgattgccgtccactcacttatcaagctgccatacctgagttgagaactccggaagaactgaaccccattattgttacgccaccaatccaagccattgatcaggaccggaatattcaaccgccatcagataggccaggaatcctctattccatccttgttgggactcctgaggattacccacgatttttccatatgcatcctaggacagcagaacttagtctcctggagccagtaaacagagactttcaccagaaatttgatttggttattaaggctgaacaagacaatggtcatcctcttcctgcctttgccggtctacacattgaaatactggatgaaaacaatcaaagtccatattttacaatgcccagttatcaaggctatatcctggaatctgccccagtgggagcaaccatttcggacagtctcaatttgacttcacctttaagaatagtagctctggacaaggacatagaagatacaaaagacccagagcttcacctttttctgaatgactacacctcagtcttcaccgtcacacagactggtattactcgctacctcaccttacttcaaccagtggacagggaagaacagcaaacttacaccttttcgataacagcatttgatggtgtacaagaaagtgagccagtcatcgtcaatattcaagtgatggatgcaaatgataacacgccaaccttccctgaaatatcctatgatgtgtatgtttatacagacatgagacctggggacagtgtcatacagctcactgcagtcgacgcagacgaagggtcaaatggggagatcacatatgaaatccttgttggggctcagggagacttcatcatcaataaaacaacagggcttatcaccatcgctccaggggtggaaatgatagtcgggcggacttacgcactcacggtccaagcagcggataatgctcctcctgcagagcgaaggaactccatctgcactgtgtatattgaagtgcttccaccaaataatcaaagccctcctcgcttcccacagctgatgtatagccttgaaattagtgaagccatgagggttggtgctgttttattaaatctacaggcaactgatcgagagggagactcaataacatatgccattgagaatggagatcctcagagagtttttaatctttcagaaaccacggggattctaaccttagggaaagcactggacagggaaagcactgatcgctacattctgatcatcacagcttcagatggcaggccagatgggacctcaactgccacagtaaacatagtggtgacagatgtcaatgacaatgctccagtgtttgatccttatctgccaagaaatttatctgtggtggaagaagaagccaatgcctttgtgggtcaagtaaaagcaacagaccctgatgctggaataaatggtcaagtgcactacagtttgggtaactttaataatctttttcgtatcacatccaatgggagcatttacacagcagtgaagcttaacagagaagtcagggactactatgaacttgttgttgtggcaacagatggagcagtacaccctcgtcattcaactctaaccttggccatcaaggttttggacattgatgataacagtcctgtgttcaccaattcaacatacactgtccttgttgaagagaatttgccagctgggactaccatccttcaaatagaggccaaagatgtcgaccttggagcaaatgtgtcttaccggataagaagcccagaagtgaagcacttttttgcactacatccatttacaggagaactatcgcttttaaggagtttagattatgaggcatttccagaccaagaagcaagtatcacttttctggtagaggcctttgatatttatggaacaatgccacctggtattgctactgtcacagtgattgtaaaggatatgaatgattatcctcctgtctttagtaaacgaatatacaaagggatggtggctccggatgcagtcaagggtacacctatcacaacagtttatgctgaagatgcagaccctcctggattacctgcaagtcgtgtgaggtatagagtagatgatgtacagtttccttaccctgccagtatttttgaagtggaagaagattctggaagagtaataacacgagtcaatcttaatgaagaacctacaacaatttttaagttggtggtggttgcttttgatgatggggagcctgtgatgtccagcagtgccacagtgaagattcttgtcttacatcctggtgagatcccacgcttcacacaggaggaatatagacctcctccagtaagtgaacttgccaccaaagggaccatggttggtgtaatttctgctgctgccattaatcaaagtattgtgtactccattgtttcaggaaatgaagaagatacatttggaattaataacatcacaggtgttatctatgtgaatggacctctggattatgagaccaggacaagctatgtacttcgagtccaagctgattccctggaagtggtccttgccaatctccgagttccttcaaaaagcaatacagctaaagtatacattgagattcaggatgaaaataatcatcccccagtgtttcagaaaaaattctacatcggaggtgtatctgaagatgcaagaatgtttacttctgtactcagagtgaaggctactgataaagatactggcaattatagtgtcatggcctacagactcataataccaccaattaaagagggaaaagaaggatttgtagtggaaacatatacagggcttatcaaaactgctatgctcttccataatatgaggagatcctacttcaagtttcaagttattgcaactgacgactatgggaagggactgagcggcaaagccgatgtactcgtctccgtggtcaatcagctggatatgcaagtcattgtttccaatgtgcctcctactctagtggaaaaaaagatagaagatcttacagagatcttggatcgctatgttcaggaacaaattcctggtgccaaggtcgtagtggagtccattggagctcgccggcatggagatgccttttccctagaagattacaccaaatgtgacttgactgtctatgcaattgacccccaaaccaacagagccatcgatagaaatgagctttttaaatttttggatggcaaactacttgatatcaataaagactttcagccgtattatggggaaggaggacgcattctggagatccggactccagaggcagtgaccagcattaaaaagagaggagaaagtctaggatacacagaaggggccttgttggctctggccttcatcatcatcctctgctgcattcctgccatcttggtggttttggtcagctacagacagtttaaagtacgtcaagctgagtgtacaaagactgcacgaattcaggccgcattacccgcggctaaaccagcagtgccggctcctgcaccagtggcagcgcccccgccgccgccgccgcctccgccaggtgcgcatctctatgaagaacttggagacagctcaatgcataagaattatccatggagtctggaattgatcctggccaggaatatggacaagattattacagttatgagcatgggtatgaaatgcctcaatatgggagtcgccgtcgattgttaccaccagctggacaggaggaatatggtgaggtggttggtgaagctgaggaagaatatgaggaggaagaggaagagccaaagaaaattaaaaaaccaaaggttgaaattagagagcctagtgaggaggaagaagtagttgtaactatcgaaaaaccaccagcagctgagcctacatacacaacatggaagagagccagaatattccccatgatttttaagaaagttagaggattagctgataaaagaggaatcgttgaccttgagggtgaagagtggcagagacgccttgaggaagaagataaagattatttgaaactcactctggaccaagaggaagcaacagaaagcactgtagaatcagaggaggaatcctccagcgactatactgaatacagtgaagaagagtctgagttcagtgagtctgagactacagaagaggaatctgagtcagagacaccctctgaggaggaggagagttccacccctgaatcagaagaatcggaatccacagagtcagaaggagaaaaagcaaggaaaaacattgtgcttgcaagaagaaggcccatggttgaggaggtcaaggaagtcaagggtaggaaagaggagccacaagaagaacaaaaagaacctaagatggaagaagaagaacactcagaagaagaagaaagtggaccagcccctgtggaagaaagtacagaccctgaagctcaagatatccctgaagagggcagtgcagaatcagcttcggtggaaggaggtgtggaaagtgaggaggaatcagaatcaggtagtagtagcagtagtagcgaaagtcagtctggaggtccatggggctatcaggtaccagcgtatgacagaagcaagaatgcaaaccaaaagaagtcgccaggagcaaactctgaaggttacaacacagcactttgaaagagatcacagtaggtggaagttttgctgtgatgagtgctctcgtgtgcagtgccttctgtgtgttctccaaagtgacacttgaaagggaggaaattgatcaagattttgatatgacttatgatcagaagcatgccagaaaagtgaatatatatgttgtccaaatccatttgtatattagactgtattagagtaaaactgactaatccttcctatattagtaaatcagaacacatgcaat

SEQ ID NO: 24924 - DNA, 2664 bp, Homo sapiens
  source 1..2664: mol_type = unassigned DNA
caacgtgctgagctaatagcgacagatagagggcagacagattcctgctagcagcttagtgttagttgcttgtggtaactaaggcaggtggcatacatctcagaacgtggagaatgatggtatgctttctgagttaacatgttgaactgttttgcttttctaaaaattttcctagtaacattttcttgatgatatgagagtggatatcaatgcctcacagaaacaagaggtggaacatgtgaatgaatcgtcttggaactagattatgagcactggttctttttaaagggatgtgcaagaggcagccttggcaagaaaacttgctgcataatcttacatggactaaagatgaaactttaaaccgcaaatcagctttgagtgaactttgacagaagatgtttcgacagttttatctctggacatgtttagcttcagggatcatcctgggctctctctttgaaatctgcttgggccagtatgatgatgattgcaaactagctaggggaggaccaccagctaccatagttgctattgatgaagaaagtcggaatggtacaattctggtggacaacatgctgatcaaagggactgctggaggaccagaccccaccatagaactttctttaaaggataatgtggattactgggtgttgatggatcctgttaagcaaatgcttttcctgaacagcaccggaagagttctggatagagatccaccgatgaacatacactccattgtggtgcaggtccagtgcatcaacaaaaaagtgggcactattatctaccatgaagtgcgaatagtggtgagagacaggaatgacaactcacccactttcaagcatgaaagctactatgccacagtgaatgagctcactccagttggtaccacaatattcacaggattttcaggagacaatggagctacagatatagatgatggaccaaatggacagatagagtatgttattcagtataatccagatgatccgacatccaatgacacctttgaaattcccctaatgttgactggaaatatagtgttaaggaagaggctcaactatgaagataagactcgctactttgtcataatccaagctaatgaccgtgcccaaaatctgaatgagaggcgaaccaccaccaccactctcacagtggatgttctggatggagatgacttgggtccaatgtttcttccttgtgtccttgtgccaaacactcgtgattgccgtccactcacttatcaagctgccatacctgagttgagaactccggaagaactgaaccccattattgttacgccaccaatccaagccattgatcaggaccggaatattcaaccgccatcagataggccaggaatcctctattccatccttgttgggactcctgaggattacccacgatttttccatatgcatcctaggacagcagaacttagtctcctggagccagtaaacagagactttcaccagaaatttgatttggttattaaggctgaacaagacaatggtcatcctcttcctgcctttgccggtctacacattgaaatactggatgaaaacaatcaaagtccatattttacaatgcccagttatcaaggctatatcctggaatctgccccagtgggagcaaccatttcggacagtctcaatttgacttcacctttaagaatagtagctctggacaaggacatagaagatgaagagccaaagaaaattaaaaaaccaaaggttgaaattagagagcctagtgaggaggaagaagtagttgtaactatcgaaaaaccaccagcagctgagcctacatacacaacatggaagagagccagaatattccccatgatttttaagaaagttagaggattagctgataaaagaggaatcgttgaccttgagggtgaagagtggcagagacgccttgaggaagaagataaagattatttgaaactcactctggaccaagaggaagcaacagaaagcactgtagaatcagaggaggaatcctccagcgactatactgaatacagtgaagaagagtctgagttcagtgagtctgagactacagaagaggaatctgagtcagagacaccctctgaggaggaggagagttccacccctgaatcagaagaatcggaatccacagagtcagaaggagaaaaagcaaggaaaaacattgtgcttgcaagaagaaggcccatggttgaggaggtcaaggaagtcaagggtaggaaagaggagccacaagaagaacaaaaagaacctaagatggaagaagaagaacactcagaagaagaagaaagtggaccagcccctgtggaagaaagtacagaccctgaagctcaagatatccctgaagagggcagtgcagaatcagcttcggtggaaggaggtgtggaaagtgaggaggaatcagaatcaggtagtagtagcagtagtagcgaaagtcagtctggaggtccatggggctatcaggtaccagcgtatgacagaagcaagaatgcaaaccaaaagaagtcgccaggagcaaactctgaaggttacaacacagcactttgaaagagatcacagtaggtggaagttttgctgtgatgagtgctctcgtgtgcagtgccttctgtgtgttctccaaagtgacacttgaaagggaggaaattgatcaagattt

SEQ ID NO: 24925 - DNA, 2457 bp, Homo sapiens
  source 1..2457: mol_type = unassigned DNA
caacgtgctgagctaatagcgacagatagagggcagacagattcctgctagcagcttagtgttagttgcttgtggtaactaaggcaggtggcatacatctcagaacgtggagaatgatggtatgctttctgagttaacatgttgaactgttttgcttttctaaaaattttcctagtaacattttcttgatgatatgagagtggatatcaatgcctcacagaaacaagaggtggaacatgtgaatgaatcgtcttggaactagattatgagcactggttctttttaaagggatgtgcaagaggcagccttggcaagaaaacttgctgcataatcttacatggactaaagatgaaactttaaaccgcaaatcagctttgagtgaactttgacagaagatgtttcgacagttttatctctggacatgtttagcttcagggatcatcctgggctctctctttgaaatctgcttgggccagtatgatgatgattgcaaactagctaggggaggaccaccagctaccatagttgctattgatgaagaaagtcggaatggtacaattctggtggacaacatgctgatcaaagggactgctggaggaccagaccccaccatagaactttctttaaaggataatgtggattactgggtgttgatggatcctgttaagcaaatgcttttcctgaacagcaccggaagagttctggatagagatccaccgatgaacatacactccattgtggtgcaggtccagtgcatcaacaaaaaagtgggcactattatctaccatgaagtgcgaatagtggtgagagacaggaatgacaactcacccactttcaagcatgaaagctactatgccacagtgaatgagctcactccagttggtaccacaatattcacaggattttcaggagacaatggagctacagatatagatgatggaccaaatggacagatagagtatgttattcagtataatccagatgatccgacatccaatgacacctttgaaattcccctaatgttgactggaaatatagtgttaaggaagaggctcaactatgaagataagactcgctactttgtcataatccaagctaatgaccgtgcccaaaatctgaatgagaggcgaaccaccaccaccactctcacagtggatgttctggatggagatgacttgggtccaatgtttcttccttgtgtccttgtgccaaacactcgtgattgccgtccactcacttatcaagctgccatacctgagttgagaactccggaagaactgaaccccattattgttacgccaccaatccaagccattgatcaggaccggaatattcaaccgccatcagataggccaggaatcctctattccatccttgttgggactcctgaggattacccacgatttttccatatgcatcctaggacagcagaacttagtctcctggagccagtaaacagagactttcaccagaaatttgatttggttattaaggaagagccaaagaaaattaaaaaaccaaaggttgaaattagagagcctagtgaggaggaagaagtagttgtaactatcgaaaaaccaccagcagctgagcctacatacacaacatggaagagagccagaatattccccatgatttttaagaaagttagaggattagctgataaaagaggaatcgttgaccttgagggtgaagagtggcagagacgccttgaggaagaagataaagattatttgaaactcactctggaccaagaggaagcaacagaaagcactgtagaatcagaggaggaatcctccagcgactatactgaatacagtgaagaagagtctgagttcagtgagtctgagactacagaagaggaatctgagtcagagacaccctctgaggaggaggagagttccacccctgaatcagaagaatcggaatccacagagtcagaaggagaaaaagcaaggaaaaacattgtgcttgcaagaagaaggcccatggttgaggaggtcaaggaagtcaagggtaggaaagaggagccacaagaagaacaaaaagaacctaagatggaagaagaagaacactcagaagaagaagaaagtggaccagcccctgtggaagaaagtacagaccctgaagctcaagatatccctgaagagggcagtgcagaatcagcttcggtggaaggaggtgtggaaagtgaggaggaatcagaatcaggtagtagtagcagtagtagcgaaagtcagtctggaggtccatggggctatcaggtaccagcgtatgacagaagcaagaatgcaaaccaaaagaagtcgccaggagcaaactctgaaggttacaacacagcactttgaaagagatcacagtaggtggaagttttgctgtgatgagtgctctcgtgtgcagtgccttctgtgtgttctccaaagtgacacttgaaagggaggaaattgatcaagattt

SEQ ID NO: 24926 - DNA, 5862 bp, Homo sapiens
  source 1..5862: mol_type = unassigned DNA
caacgtgctgagctaatagcgacagatagagggcagacagattcctgctagcagcttagtgttagttgcttgtggtaactaaggcaggtggcatacatctcagaacgtggagaatgatggtatgctttctgagttaacatgttgaactgttttgcttttctaaaaattttcctagtaacattttcttgatgatatgagagtggatatcaatgcctcacagaaacaagaggtggaacatgtgaatgaatcgtcttggaactagattatgagcactggttctttttaaagggatgtgcaagaggcagccttggcaagaaaacttgctgcataatcttacatggactaaagatgaaactttaaaccgcaaatcagctttgagtgaactttgacagaagatgtttcgacagttttatctctggacatgtttagcttcagggatcatcctgggctctctctttgaaatctgcttgggccagtatgatgatgattgcaaactagctaggggaggaccaccagctaccatagttgctattgatgaagaaagtcggaatggtacaattctggtggacaacatgctgatcaaagggactgctggaggaccagaccccaccatagaactttctttaaaggataatgtggattactgggtgttgatggatcctgttaagcaaatgcttttcctgaacagcaccggaagagttctggatagagatccaccgatgaacatacactccattgtggtgcaggtccagtgcatcaacaaaaaagtgggcactattatctaccatgaagtgcgaatagtggtgagagacaggaatgacaactcacccactttcaagcatgaaagctactatgccacagtgaatgagctcactccagttggtaccacaatattcacaggattttcaggagacaatggagctacagatatagatgatggaccaaatggacagatagagtatgttattcagtataatccagatgatccgacatccaatgacacctttgaaattcccctaatgttgactggaaatatagtgttaaggaagaggctcaactatgaagataagactcgctactttgtcataatccaagctaatgaccgtgcccaaaatctgaatgagaggcgaaccaccaccaccactctcacagtggatgttctggatggagatgacttgggtccaatgtttcttccttgtgtccttgtgccaaacactcgtgattgccgtccactcacttatcaagctgccatacctgagttgagaactccggaagaactgaaccccattattgttacgccaccaatccaagccattgatcaggaccggaatattcaaccgccatcagataggccaggaatcctctattccatccttgttgggactcctgaggattacccacgatttttccatatgcatcctaggacagcagaacttagtctcctggagccagtaaacagagactttcaccagaaatttgatttggttattaaggctgaacaagacaatggtcatcctcttcctgcctttgccggtctacacattgaaatactggatgaaaacaatcaaagtccatattttacaatgcccagttatcaaggctatatcctggaatctgccccagtgggagcaaccatttcggacagtctcaatttgacttcacctttaagaatagtagctctggacaaggacatagaagatgttccacccagtggagttcctacaaaagacccagagcttcacctttttctgaatgactacacctcagtcttcaccgtcacacagactggtattactcgctacctcaccttacttcaaccagtggacagggaagaacagcaaacttacaccttttcgataacagcatttgatggtgtacaagaaagtgagccagtcatcgtcaatattcaagtgatggatgcaaatgataacacgccaaccttccctgaaatatcctatgatgtgtatgtttatacagacatgagacctggggacagtgtcatacagctcactgcagtcgacgcagacgaagggtcaaatggggagatcacatatgaaatccttgttggggctcagggagacttcatcatcaataaaacaacagggcttatcaccatcgctccaggggtggaaatgatagtcgggcggacttacgcactcacggtccaagcagcggataatgctcctcctgcagagcgaaggaactccatctgcactgtgtatattgaagtgcttccaccaaataatcaaagccctcctcgcttcccacagctgatgtatagccttgaaattagtgaagccatgagggttggtgctgttttattaaatctacaggcaactgatcgagagggagactcaataacatatgccattgagaatggagatcctcagagagtttttaatctttcagaaaccacggggattctaaccttagggaaagcactggacagggaaagcactgatcgctacattctgatcatcacagcttcagatggcaggccagatgggacctcaactgccacagtaaacatagtggtgacagatgtcaatgacaatgctccagtgtttgatccttatctgccaagaaatttatctgtggtggaagaagaagccaatgcctttgtgggtcaagtaaaagcaacagaccctgatgctggaataaatggtcaagtgcactacagtttgggtaactttaataatctttttcgtatcacatccaatgggagcatttacacagcagtgaagcttaacagagaagtcagggactactatgaacttgttgttgtggcaacagatggagcagtacaccctcgtcattcaactctaaccttggccatcaaggttttggacattgatgataacagtcctgtgttcaccaattcaacatacactgtccttgttgaagagaatttgccagctgggactaccatccttcaaatagaggccaaagatgtcgaccttggagcaaatgtgtcttaccggataagaagcccagaagtgaagcacttttttgcactacatccatttacaggagaactatcgcttttaaggagtttagattatgaggcatttccagaccaagaagcaagtatcacttttctggtagaggcctttgatatttatggaacaatgccacctggtattgctactgtcacagtgattgtaaaggatatgaatgattatcctcctgtctttagtaaacgaatatacaaagggatggtggctccggatgcagtcaagggtacacctatcacaacagtttatgctgaagatgcagaccctcctggattacctgcaagtcgtgtgaggtatagagtagatgatgtacagtttccttaccctgccagtatttttgaagtggaagaagattctggaagagtaataacacgagtcaatcttaatgaagaacctacaacaatttttaagttggtggtggttgcttttgatgatggggagcctgtgatgtccagcagtgccacagtgaagattcttgtcttacatcctggtgagatcccacgcttcacacaggaggaatatagacctcctccagtaagtgaacttgccaccaaagggaccatggttggtgtaatttctgctgctgccattaatcaaagtattgtgtactccattgtttcaggaaatgaagaagatacatttggaattaataacatcacaggtgttatctatgtgaatggacctctggattatgagaccaggacaagctatgtacttcgagtccaagctgattccctggaagtggtccttgccaatctccgagttccttcaaaaagcaatacagctaaagtatacattgagattcaggatgaaaataatcatcccccagtgtttcagaaaaaattctacatcggaggtgtatctgaagatgcaagaatgtttacttctgtactcagagtgaaggctactgataaagatactggcaattatagtgtcatggcctacagactcataataccaccaattaaagagggaaaagaaggatttgtagtggaaacatatacagggcttatcaaaactgctatgctcttccataatatgaggagatcctacttcaagtttcaagttattgcaactgacgactatgggaagggactgagcggcaaagccgatgtactcgtctccgtggtcaatcagctggatatgcaagtcattgtttccaatgtgcctcctactctagtggaaaaaaagatagaagatcttacagagatcttggatcgctatgttcaggaacaaattcctggtgccaaggtcgtagtggagtccattggagctcgccggcatggagatgccttttccctagaagattacaccaaatgtgacttgactgtctatgcaattgacccccaaaccaacagagccatcgatagaaatgagctttttaaatttttggatggcaaactacttgatatcaataaagactttcagccgtattatggggaaggaggacgcattctggagatccggactccagaggcagtgaccagcattaaaaagagaggagaaagtctaggatacacagaaggggccttgttggctctggccttcatcatcatcctctgctgcattcctgccatcttggtggttttggtcagctacagacagtttaaagtacgtcaagctgagtgtacaaagactgcacgaattcaggccgcattacccgcggctaaaccagcagtgccggctcctgcaccagtggcagcgcccccgccgccgccgccgcctccgccaggtgcgcatctctatgaagaacttggagacagctcaatgcataagtatgaaatgcctcaatatgggagtcgccgtcgattgttaccaccagctggacaggaggaatatggtgaggtggttggtgaagctgaggaagaatatgaggaggaagaggaagagccaaagaaaattaaaaaaccaaaggttgaaattagagagcctagtgaggaggaagaagtagttgtaactatcgaaaaaccaccagcagctgagcctacatacacaacatggaagagagccagaatattccccatgatttttaagaaagttagaggattagctgataaaagaggaatcgttgaccttgagggtgaagagtggcagagacgccttgaggaagaagataaagattatttgaaactcactctggaccaagaggaagcaacagaaagcactgtagaatcagaggaggaatcctccagcgactatactgaatacagtgaagaagagtctgagttcagtgagtctgagactacagaagaggaatctgagtcagagacaccctctgaggaggaggagagttccacccctgaatcagaagaatcggaatccacagagtcagaaggagaaaaagcaaggaaaaacattgtgcttgcaagaagaaggcccatggttgaggaggtcaaggaagtcaagggtaggaaagaggagccacaagaagaacaaaaagaacctaagatggaagaagaagaacactcagaagaagaagaaagtggaccagcccctgtggaagaaagtacagaccctgaagctcaagatatccctgaagagggcagtgcagaatcagcttcggtggaaggaggtgtggaaagtgaggaggaatcagaatcaggtagtagtagcagtagtagcgaaagtcagtctggaggtccatggggctatcaggtaccagcgtatgacagaagcaagaatgcaaaccaaaagaagtcgccaggagcaaactctgaaggttacaacacagcactttgaaagagatcacagtaggtggaagttttgctgtgatgagtgctctcgtgtgcagtgccttctgtgtgttctccaaagtgacacttgaaagggaggaaattgatcaagattt

SEQ ID NO: 24927 - DNA, 3450 bp, Homo sapiens
  source 1..3450: mol_type = unassigned DNA
caacgtgctgagctaatagcgacagatagagggcagacagattcctgctagcagcttagtgttagttgcttgtggtaactaaggcaggtggcatacatctcagaacgtggagaatgatggtatgctttctgagttaacatgttgaactgttttgcttttctaaaaattttcctagtaacattttcttgatgatatgagagtggatatcaatgcctcacagaaacaagaggtggaacatgtgaatgaatcgtcttggaactagattatgagcactggttctttttaaagggatgtgcaagaggcagccttggcaagaaaacttgctgcataatcttacatggactaaagatgaaactttaaaccgcaaatcagctttgagtgaactttgacagaagatgtttcgacagttttatctctggacatgtttagcttcagggatcatcctgggctctctctttgaaatctgcttgggccagtatgatgatgattgcaaactagctaggggaggaccaccagctaccatagttgctattgatgaagaaagtcggaatggtacaattctggtggacaacatgctgatcaaagggactgctggaggaccagaccccaccatagaactttctttaaaggataatgtggattactgggtgttgatggatcctgttaagcaaatgcttttcctgaacagcaccggaagagttctggatagagatccaccgatgaacatacactccattgtggtgcaggtccagtgcatcaacaaaaaagtgggcactattatctaccatgaagtgcgaatagtggtgagagacaggaatgacaactcacccactttcaagcatgaaagctactatgccacagtgaatgagctcactccagttggtaccacaatattcacaggattttcaggagacaatggagctacagatatagatgatggaccaaatggacagatagagtatgttattcagtataatccagatgatccgacatccaatgacacctttgaaattcccctaatgttgactggaaatatagtgttaaggaagaggctcaactatgaagataagactcgctactttgtcataatccaagctaatgaccgtgcccaaaatctgaatgagaggcgaaccaccaccaccactctcacagtggatgttctggatggagatgacttgggtccaatgtttcttccttgtgtccttgtgccaaacactcgtgattgccgtccactcacttatcaagctgccatacctgagttgagaactccggaagaactgaaccccattattgttacgccaccaatccaagccattgatcaggaccggaatattcaaccgccatcagataggccaggaatcctctattccatccttgttgggactcctgaggattacccacgatttttccatatgcatcctaggacagcagaacttagtctcctggagccagtaaacagagactttcaccagaaatttgatttggttattaaggctgaacaagacaatggtcatcctcttcctgcctttgccggtctacacattgaaatactggatgaaaacaatcaaagtccatattttacaatgcccagttatcaaggctatatcctggaatctgccccagtgggagcaaccatttcggacagtctcaatttgacttcacctttaagaatagtagctctggacaaggacatagaagatacaaaagacccagagcttcacctttttctgaatgactacacctcagtcttcaccgtcacacagactggtattactcgctacctcaccttacttcaaccagtggacagggaagaacagcaaacttacaccttttcgataacagcatttgatggtgtacaagaaagtgagccagtcatcgtcaatattcaagtgatggatgcaaatgataacacgccaaccttccctgaaatatcctatgatgtgtatgtttatacagacatgagacctggggacagtgtcatacagctcactgcagtcgacgcagacgaagggtcaaatggggagatcacatatgaaatccttgttggggctcagggagacttcatcatcaataaaacaacagggcttatcaccatcgctccaggggtggaaatgatagtcgggcggacttacgcactcacggtccaagcagcggataatgctcctcctgcagagcgaaggaactccatctgcactgtgtatattgaagtgcttccaccaaataatcaaagccctcctcgcttcccacagctgatgtatagccttgaaattagtgaagccatgagggttggtgctgttttattaaatctacaggcaactgatcgagagggagactcaataacatatgccattgagaatggagatcctcagagagtttttaatctttcagaaaccacggggattctaaccttagggaaagcactggacagggaaagcactgatcgctacattctgatcatcacagcttcagatggcaggccagatggggaagagccaaagaaaattaaaaaaccaaaggttgaaattagagagcctagtgaggaggaagaagtagttgtaactatcgaaaaaccaccagcagctgagcctacatacacaacatggaagagagccagaatattccccatgatttttaagaaagttagaggattagctgataaaagaggaatcgttgaccttgagggtgaagagtggcagagacgccttgaggaagaagataaagattatttgaaactcactctggaccaagaggaagcaacagaaagcactgtagaatcagaggaggaatcctccagcgactatactgaatacagtgaagaagagtctgagttcagtgagtctgagactacagaagaggaatctgagtcagagacaccctctgaggaggaggagagttccacccctgaatcagaagaatcggaatccacagagtcagaaggagaaaaagcaaggaaaaacattgtgcttgcaagaagaaggcccatggttgaggaggtcaaggaagtcaagggtaggaaagaggagccacaagaagaacaaaaagaacctaagatggaagaagaagaacactcagaagaagaagaaagtggaccagcccctgtggaagaaagtacagaccctgaagctcaagatatccctgaagagggcagtgcagaatcagcttcggtggaaggaggtgtggaaagtgaggaggaatcagaatcaggtagtagtagcagtagtagcgaaagtcagtctggaggtccatggggctatcaggtaccagcgtatgacagaagcaagaatgcaaaccaaaagaagtcgccaggagcaaactctgaaggttacaacacagcactttgaaagagatcacagtaggtggaagttttgctgtgatgagtgctctcgtgtgcagtgccttctgtgtgttctccaaagtgacacttgaaagggaggaaattgatcaagattt

SEQ ID NO: 24928 - DNA, 5058 bp, Homo sapiens
  source 1..5058: mol_type = unassigned DNA
caacgtgctgagctaatagcgacagatagagggcagacagattcctgctagcagcttagtgttagttgcttgtggtaactaaggcaggtggcatacatctcagaacgtggagaatgatggtatgctttctgagttaacatgttgaactgttttgcttttctaaaaattttcctagtaacattttcttgatgatatgagagtggatatcaatgcctcacagaaacaagaggtggaacatgtgaatgaatcgtcttggaactagattatgagcactggttctttttaaagggatgtgcaagaggcagccttggcaagaaaacttgctgcataatcttacatggactaaagatgaaactttaaaccgcaaatcagctttgagtgaactttgacagaagatgtttcgacagttttatctctggacatgtttagcttcagggatcatcctgggctctctctttgaaatctgcttgggccagtatgatgatggctgaacaagacaatggtcatcctcttcctgcctttgccggtctacacattgaaatactggatgaaaacaatcaaagtccatattttacaatgcccagttatcaaggctatatcctggaatctgccccagtgggagcaaccatttcggacagtctcaatttgacttcacctttaagaatagtagctctggacaaggacatagaagatgttccacccagtggagttcctacaaaagacccagagcttcacctttttctgaatgactacacctcagtcttcaccgtcacacagactggtattactcgctacctcaccttacttcaaccagtggacagggaagaacagcaaacttacaccttttcgataacagcatttgatggtgtacaagaaagtgagccagtcatcgtcaatattcaagtgatggatgcaaatgataacacgccaaccttccctgaaatatcctatgatgtgtatgtttatacagacatgagacctggggacagtgtcatacagctcactgcagtcgacgcagacgaagggtcaaatggggagatcacatatgaaatccttgttggggctcagggagacttcatcatcaataaaacaacagggcttatcaccatcgctccaggggtggaaatgatagtcgggcggacttacgcactcacggtccaagcagcggataatgctcctcctgcagagcgaaggaactccatctgcactgtgtatattgaagtgcttccaccaaataatcaaagccctcctcgcttcccacagctgatgtatagccttgaaattagtgaagccatgagggttggtgctgttttattaaatctacaggcaactgatcgagagggagactcaataacatatgccattgagaatggagatcctcagagagtttttaatctttcagaaaccacggggattctaaccttagggaaagcactggacagggaaagcactgatcgctacattctgatcatcacagcttcagatggcaggccagatgggacctcaactgccacagtaaacatagtggtgacagatgtcaatgacaatgctccagtgtttgatccttatctgccaagaaatttatctgtggtggaagaagaagccaatgcctttgtgggtcaagtaaaagcaacagaccctgatgctggaataaatggtcaagtgcactacagtttgggtaactttaataatctttttcgtatcacatccaatgggagcatttacacagcagtgaagcttaacagagaagtcagggactactatgaacttgttgttgtggcaacagatggagcagtacaccctcgtcattcaactctaaccttggccatcaaggttttggacattgatgataacagtcctgtgttcaccaattcaacatacactgtccttgttgaagagaatttgccagctgggactaccatccttcaaatagaggccaaagatgtcgaccttggagcaaatgtgtcttaccggataagaagcccagaagtgaagcacttttttgcactacatccatttacaggagaactatcgcttttaaggagtttagattatgaggcatttccagaccaagaagcaagtatcacttttctggtagaggcctttgatatttatggaacaatgccacctggtattgctactgtcacagtgattgtaaaggatatgaatgattatcctcctgtctttagtaaacgaatatacaaagggatggtggctccggatgcagtcaagggtacacctatcacaacagtttatgctgaagatgcagaccctcctggattacctgcaagtcgtgtgaggtatagagtagatgatgtacagtttccttaccctgccagtatttttgaagtggaagaagattctggaagagtaataacacgagtcaatcttaatgaagaacctacaacaatttttaagttggtggtggttgcttttgatgatggggagcctgtgatgtccagcagtgccacagtgaagattcttgtcttacatcctggtgagatcccacgcttcacacaggaggaatatagacctcctccagtaagtgaacttgccaccaaagggaccatggttggtgtaatttctgctgctgccattaatcaaagtattgtgtactccattgtttcaggaaatgaagaagatacatttggaattaataacatcacaggtgttatctatgtgaatggacctctggattatgagaccaggacaagctatgtacttcgagtccaagctgattccctggaagtggtccttgccaatctccgagttccttcaaaaagcaatacagctaaagtatacattgagattcaggatgaaaataatcatcccccagtgtttcagaaaaaattctacatcggaggtgtatctgaagatgcaagaatgtttacttctgtactcagagtgaaggctactgataaagatactggcaattatagtgtcatggcctacagactcataataccaccaattaaagagggaaaagaaggatttgtagtggaaacatatacagggcttatcaaaactgctatgctcttccataatatgaggagatcctacttcaagtttcaagttattgcaactgacgactatgggaagggactgagcggcaaagccgatgtactcgtctccgtggtcaatcagctggatatgcaagtcattgtttccaatgtgcctcctactctagtggaaaaaaagatagaagatcttacagagatcttggatcgctatgttcaggaacaaattcctggtgccaaggtcgtagtggagtccattggagctcgccggcatggagatgccttttccctagaagattacaccaaatgtgacttgactgtctatgcaattgacccccaaaccaacagagccatcgatagaaatgagctttttaaatttttggatggcaaactacttgatatcaataaagactttcagccgtattatggggaaggaggacgcattctggagatccggactccagaggcagtgaccagcattaaaaagagaggagaaagtctaggatacacagaaggggccttgttggctctggccttcatcatcatcctctgctgcattcctgccatcttggtggttttggtcagctacagacagtttaaagtacgtcaagctgagtgtacaaagactgcacgaattcaggccgcattacccgcggctaaaccagcagtgccggctcctgcaccagtggcagcgcccccgccgccgccgccgcctccgccaggtgcgcatctctatgaagaacttggagacagctcaatgcataagaattatccatggagtctggaattgatcctggccaggaatatggacaagattattacagttatgagcatgggtatgaaatgcctcaatatgggagtcgccgtcgattgttaccaccagctggacaggaggaatatggtgaggtggttggtgaagctgaggaagaatatgaggaggaagaggaagagccaaagaaaattaaaaaaccaaaggttgaaattagagagcctagtgaggaggaagaagtagttgtaactatcgaaaaaccaccagcagctgagcctacatacacaacatggaagagagccagaatattccccatgatttttaagaaagttagaggattagctgataaaagaggaatcgttgaccttgagggtgaagagtggcagagacgccttgaggaagaagataaagattatttgaaactcactctggaccaagaggaagcaacagaaagcactgtagaatcagaggaggaatcctccagcgactatactgaatacagtgaagaagagtctgagttcagtgagtctgagactacagaagaggaatctgagtcagagacaccctctgaggaggaggagagttccacccctgaatcagaagaatcggaatccacagagtcagaaggagaaaaagcaaggaaaaacattgtgcttgcaagaagaaggcccatggttgaggaggtcaaggaagtcaagggtaggaaagaggagccacaagaagaacaaaaagaacctaagatggaagaagaagaacactcagaagaagaagaaagtggaccagcccctgtggaagaaagtacagaccctgaagctcaagatatccctgaagagggcagtgcagaatcagcttcggtggaaggaggtgtggaaagtgaggaggaatcagaatcaggtagtagtagcagtagtagcgaaagtcagtctggaggtccatggggctatcaggtaccagcgtatgacagaagcaagaatgcaaaccaaaagaagtcgccaggagcaaactctgaaggttacaacacagcactttgaaagagatcacagtaggtggaagttttgctgtgatgagtgctctcgtgtgcagtgccttctgtgtgttctccaaagtgacacttgaaagggaggaaattgatcaagattttgatatgacttatgatcagaagcatgccagaaaagtgaatatatatgttgtccaaatccatttgtatattagactgtattagagtaaaactgactaatccttcctatattagtaaatcagaacacatgcaat

SEQ ID NO: 24929 - DNA, 2905 bp, Homo sapiens
  source 1..2905: mol_type = unassigned DNA
caacgtgctgagctaatagcgacagatagagggcagacagattcctgctagcagcttagtgttagttgcttgtggtaactaaggcaggtggcatacatctcagaacgtggagaatgatggtatgctttctgagttaacatgttgaactgttttgcttttctaaaaattttcctagtaacattttcttgatgatatgagagtggatatcaatgcctcacagaaacaagaggtggaacatgtgaatgaatcgtcttggaactagattatgagcactggttctttttaaagggatgtgcaagaggcagccttggcaagaaaacttgctgcataatcttacatggactaaagatgaaactttaaaccgcaaatcagctttgagtgaactttgacagaagatgtttcgacagttttatctctggacatgtttagcttcagggatcatcctgggctctctctttgaaatctgcttgggccagtatgatgatgattgcaaactagctaggggaggaccaccagctaccatagttgctattgatgaagaaagtcggaatggtacaattctggtggacaacatgctgatcaaagggactgctggaggaccagaccccaccatagaactttctttaaaggataatgtggattactgggtgttgatggatcctgttaagcaaatgcttttcctgaacagcaccggaagagttctggatagagatccaccgatgaacatacactccattgtggtgcaggtccagtgcatcaacaaaaaagtgggcactattatctaccatgaagtgcgaatagtggtgagagacaggaatgacaactcacccactttcaagcatgaaagctactatgccacagtgaatgagctcactccagttggtaccacaatattcacaggattttcaggagacaatggagctacagatatagatgatggaccaaatggacagatagagtatgttattcagtataatccagatgatccgacatccaatgacacctttgaaattcccctaatgttgactggaaatatagtgttaaggaagaggctcaactatgaagataagactcgctactttgtcataatccaagctaatgaccgtgcccaaaatctgaatgagaggcgaaccaccaccaccactctcacagtggatgttctggatggagatgacttgggtccaatgtttcttccttgtgtccttgtgccaaacactcgtgattgccgtccactcacttatcaagctgccatacctgagttgagaactccggatcttggatcgctatgttcaggaacaaattcctggtgccaaggtcgtagtggagtccattggagctcgccggcatggagatgccttttccctagaagattacaccaaatgtgacttgactgtctatgcaattgacccccaaaccaacagagccatcgatagaaatgagctttttaaatttttggatggcaaactacttgatatcaataaagactttcagccgtattatggggaaggaggacgcattctggagatccggactccagaggcagtgaccagcattaaaaagagaggagaaagtctaggatacacagaaggggccttgttggctctggccttcatcatcatcctctgctgcattcctgccatcttggtggttttggtcagctacagacagtttaaagtacgtcaagctgagtgtacaaagactgcacgaattcaggccgcattacccgcggctaaaccagcagtgccggctcctgcaccagtggcagcgcccccgccgccgccgccgcctccgccaggtgcgcatctctatgaagaacttggagacagctcaatgtatgaaatgcctcaatatgggagtcgccgtcgattgttaccaccagctggacaggaggaatatggtgaggtggttggtgaagctgaggaagaatatgaggaggaagaggaagagccaaagaaaattaaaaaaccaaaggttgaaattagagagcctagtgaggaggaagaagtagttgtaactatcgaaaaaccaccagcagctgagcctacatacacaacatggaagagagccagaatattccccatgatttttaagaaagttagaggattagctgataaaagaggaatcgttgaccttgagggtgaagagtggcagagacgccttgaggaagaagataaagattatttgaaactcactctggaccaagaggaagcaacagaaagcactgtagaatcagaggaggaatcctccagcgactatactgaatacagtgaagaagagtctgagttcagtgagtctgagactacagaagaggaatctgagtcagagacaccctctgaggaggaggagagttccacccctgaatcagaagaatcggaatccacagagtcagaaggagaaaaagcaaggaaaaacattgtgcttgcaagaagaaggcccatggttgaggaggtcaaggaagtcaagggtaggaaagaggagccacaagaagaacaaaaagaacctaagatggaagaagaagaacactcagaagaagaagaaagtggaccagcccctgtggaagaaagtacagaccctgaagctcaagatatccctgaagagggcagtgcagaatcagcttcggtggaaggaggtgtggaaagtgaggaggaatcagaatcaggtagtagtagcagtagtagcgaaagtcagtctggaggtccatggggctatcaggtaccagcgtatgacagaagcaagaatgcaaaccaaaagaagtcgccaggagcaaactctgaaggttacaacacagcactttgaaagagatcacagtaggtggaagttttgctgtgatgagtgctctcgtgtgcagtgccttctgtgtgttctccaaagtgacacttgaaagggaggaaattgatcaagattt

SEQ ID NO: 24930 - DNA, 9249 bp, Homo sapiens
  source 1..9249: mol_type = unassigned DNA
caacgtgctgagctaatagcgacagatagagggcagacagattcctgctagcagcttagtgttagttgcttgtggtaactaaggcaggtggcatacatctcagaacgtggagaatgatggtatgctttctgagttaacatgttgaactgttttgcttttctaaaaattttcctagtaacattttcttgatgatatgagagtggatatcaatgcctcacagaaacaagaggtggaacatgtgaatgaatcgtcttggaactagattatgagcactggttctttttaaagggatgtgcaagaggcagccttggcaagaaaacttgctgcataatcttacatggactaaagatgaaactttaaaccgcaaatcagctttgagtgaactttgacagaagatgtttcgacagttttatctctggacatgtttagcttcagggatcatcctgggctctctctttgaaatctgcttgggccagtatgatgatggctggaggtacatgtattgcaaactagctaggggaggaccaccagctaccatagttgctattgatgaagaaagtcggaatggtacaattctggtggacaacatgctgatcaaagggactgctggaggaccagaccccaccatagaactttctttaaaggataatgtggattactgggtgttgatggatcctgttaagcaaatgcttttcctgaacagcaccggaagagttctggatagagatccaccgatgaacatacactccattgtggtgcaggtccagtgcatcaacaaaaaagtgggcactattatctaccatgaagtgcgaatagtggtgagagacaggaatgacaactcacccactttcaagcatgaaagctactatgccacagtgaatgagctcactccagttggtaccacaatattcacaggattttcaggagacaatggagctacagatatagatgatggaccaaatggacagatagagtatgttattcagtataatccagatgatccgacatccaatgacacctttgaaattcccctaatgttgactggaaatatagtgttaaggaagaggctcaactatgaagataagactcgctactttgtcataatccaagctaatgaccgtgcccaaaatctgaatgagaggcgaaccaccaccaccactctcacagtggatgttctggatggagatgacttgggtccaatgtttcttccttgtgtccttgtgccaaacactcgtgattgccgtccactcacttatcaagctgccatacctgagttgagaactccggaagaactgaaccccattattgttacgccaccaatccaagccattgatcaggaccggaatattcaaccgccatcagataggccaggaatcctctattccatccttgttgggactcctgaggattacccacgatttttccatatgcatcctaggacagcagaacttagtctcctggagccagtaaacagagactttcaccagaaatttgatttggttattaaggctgaacaagacaatggtcatcctcttcctgcctttgccggtctacacattgaaatactggatgaaaacaatcaaagtccatattttacaatgcccagttatcaaggctatatcctggaatctgccccagtgggagcaaccatttcggacagtctcaatttgacttcacctttaagaatagtagctctggacaaggacatagaagatacaaaagacccagagcttcacctttttctgaatgactacacctcagtcttcaccgtcacacagactggtattactcgctacctcaccttacttcaaccagtggacagggaagaacagcaaacttacaccttttcgataacagcatttgatggtgtacaagaaagtgagccagtcatcgtcaatattcaagtgatggatgcaaatgataacacgccaaccttccctgaaatatcctatgatgtgtatgtttatacagacatgagacctggggacagtgtcatacagctcactgcagtcgacgcagacgaagggtcaaatggggagatcacatatgaaatccttgttggggctcagggagacttcatcatcaataaaacaacagggcttatcaccatcgctccaggggtggaaatgatagtcgggcggacttacgcactcacggtccaagcagcggataatgctcctcctgcagagcgaaggaactccatctgcactgtgtatattgaagtgcttccaccaaataatcaaagccctcctcgcttcccacagctgatgtatagccttgaaattagtgaagccatgagggttggtgctgttttattaaatctacaggcaactgatcgagagggagactcaataacatatgccattgagaatggagatcctcagagagtttttaatctttcagaaaccacggggattctaaccttagggaaagcactggacagggaaagcactgatcgctacattctgatcatcacagcttcagatggcaggccagatgggacctcaactgccacagtaaacatagtggtgacagatgtcaatgacaatgctccagtgtttgatccttatctgccaagaaatttatctgtggtggaagaagaagccaatgcctttgtgggtcaagtaaaagcaacagaccctgatgctggaataaatggtcaagtgcactacagtttgggtaactttaataatctttttcgtatcacatccaatgggagcatttacacagcagtgaagcttaacagagaagtcagggactactatgaacttgttgttgtggcaacagatggagcagtacaccctcgtcattcaactctaaccttggccatcaaggttttggacattgatgataacagtcctgtgttcaccaattcaacatacactgtccttgttgaagagaatttgccagctgggactaccatccttcaaatagaggccaaagatgtcgaccttggagcaaatgtgtcttaccggataagaagcccagaagtgaagcacttttttgcactacatccatttacaggagaactatcgcttttaaggagtttagattatgaggcatttccagaccaagaagcaagtatcacttttctggtagaggcctttgatatttatggaacaatgccacctggtattgctactgtcacagtgattgtaaaggatatgaatgattatcctcctgtctttagtaaacgaatatacaaagggatggtggctccggatgcagtcaagggtacacctatcacaacagtttatgctgaagatgcagaccctcctggattacctgcaagtcgtgtgaggtatagagtagatgatgtacagtttccttaccctgccagtatttttgaagtggaagaagattctggaagagtaataacacgagtcaatcttaatgaagaacctacaacaatttttaagttggtggtggttgcttttgatgatggggagcctgtgatgtccagcagtgccacagtgaagattcttgtcttacatcctggtgagatcccacgcttcacacaggaggaatatagacctcctccagtaagtgaacttgccaccaaagggaccatggttggtgtaatttctgctgctgccattaatcaaagtattgtgtactccattgtttcaggaaatgaagaagatacatttggaattaataacatcacaggtgttatctatgtgaatggacctctggattatgagaccaggacaagctatgtacttcgagtccaagctgattccctggaagtggtccttgccaatctccgagttccttcaaaaagcaatacagctaaagtatacattgagattcaggatgaaaataatcatcccccagtgtttcagaaaaaattctacatcggaggtgtatctgaagatgcaagaatgtttacttctgtactcagagtgaaggctactgataaagatactggcaattatagtgtcatggcctacagactcataataccaccaattaaagagggaaaagaaggatttgtagtggaaacatatacagggcttatcaaaactgctatgctcttccataatatgaggagatcctacttcaagtttcaagttattgcaactgacgactatgggaagggactgagcggcaaagccgatgtactcgtctccgtggtcaatcagctggatatgcaagtcattgtttccaatgtgcctcctactctagtggaaaaaaagatagaagatcttacagagatcttggatcgctatgttcaggaacaaattcctggtgccaaggtcgtagtggagtccattggagctcgccggcatggagatgccttttccctagaagattacaccaaatgtgacttgactgtctatgcaattgacccccaaaccaacagagccatcgatagaaatgagctttttaaatttttggatggcaaactacttgatatcaataaagactttcagccgtattatggggaaggaggacgcattctggagatccggactccagaggcagtgaccagcattaaaaagagaggagaaagtctaggatacacagaaggggccttgttggctctggccttcatcatcatcctctgctgcattcctgccatcttggtggttttggtcagctacagacaacgtcaagctgagtgtacaaagactgcacgaattcaggccgcattacccgcggctaaaccagcagtgccggctcctgcaccagtggcagcgcccccgccgccgccgccgcctccgccaggtgcgcatctctatgaagaacttggagacagctcaattttatattacaggtatgaaatgcctcaatatgggagtcgccgtcgattgttaccaccagctggacaggaggaatatggtgaggtggttggtgaagctgaggaagaatatgaggaggaagagtgggcaagaaaaagaatgatcaagttagttgttgatcgagagtatgaaaccagctcaactggagaagacagtgctcctgaatgtcagagaaaccgtcttcaccatcctagtatccacagtaatatcaacggcaatatatatattgcacagaatggttctgtggtgagaacccgccgtgcctgcctcacggacaacttaaaagttgcttcccctgttcgactgggagggccctttaagaaactagacaagttggcagtgacacatgaggagaatgtacctctgaacacattatcaaaggggccattttctactgaaaaaatgaatgcaagaccaactctggttacatttgccccttgccctgtggggactgacaatacagcggtgaagccactaaggaacaggctgaaaagcacagttgaacaggagtccatgattgacagtaagaacatcaaggaggctttggaatttcatagtgaccacacacagtctgatgatgaagagctttggatgggcccctggaacaacctccatataccaatgacaaaactgtgaccaattttttaaaagatattttaattaatttttacttacatttttaataaactgtgctttttattgtcactgagaaaacaatgtatggaatttatatcatgcacacaagctaaaactttgaacaatatgctttaaaattttaagagacagatttgcactcacattgttatcaattaatcgtttttcccagaaaatccttttggacatactttcactaaataacctatcgtttaaacatttagctgttttgttgggtcttgaatttttgttcattttaataaacaagaaataattactaaataatcatttatattttattgattaacatagattatgctttatttctagctccacaaaacatttttagtacatgtaattttattttccatagccaaaagggcaaaaaagaagtaagaggatatttacaggcaatgagtttatacagctgctgtctatactgccctaatttttaaaatgaaagctagaattgcaaagtaaagtaaatgagggaatcacctgtaaataattaattattttaaatcatgagcttgttttctttctttattgtcctgtataaaggttttcacattttaccataaatacatttatatcttgaccctttaggaaaccacttgaagtcgtatgtctttttatcaatattatttacaatattctcttgtcccttcatctcatatcaaatatggtagatactttagtttagtttaatcacttgaggttaaataattgtttggagcaacatggaaatctcacccttagcaaaagcttttagggaagtgagaaaggttcgagtaagcagtaatgcatctagaacgacaatttcataatggaagacatggtgaggttagggaagtctcacattaatgtcactagactttaatagtttgtaaacccagcatatcagagtaaaggaatttggcagggttgaaatgtatataatatataaagcttataaaggctatgaattcataacttcaaatgttgtgtttaacttcttccattttcaggttatttatagaatattttaatgcacatatttatgtgcctaaaatccagaaccaggaaatcattgcctgggcattttttaaaatcaaagaacatggtcttgattttttaccattgaacaaagcacagtgtttcatcataagtagaaatgaaaacagaatatcctttaaaaaacttgccttgtgtgttgcttattttccagatgatgtaaaaagaatgaaacaatatagattaagagaattcagaattctattgaatattacttagtatgatatagatgtagctcacttcaaattttgcacagtattgaccaagttcaggttttaatgaaatttcctcatgcatgcttaatatatggttgaaggactgaataatgcactattatttattcccctcttacatgtttcgcgtcttaaaaattgtttattattatgctatttcctcatttccaaagtgaatgaattgtactgacataaacttgccgacttgtaagagtagtatgtttttacttcagatttccaagaaaatatttgagatcaaatacagtaacatctcatctaccttattttattgagaattaatgcattccatacccttgccaaaaaaacaaaacaaaacaaacaaacaaaaaaaaacctagtggcattagctagattagaaacgtagaatcatgaccacacctcctggcctgccaaacaagcatccacattttcaaaagatcctaaggtggtttatatgcacattaaattttggaagcaatgaagtccggggcttattccttcaggcaccaaagcaatggtttttagtataggatactttgtataggaattagattaagcatatatttccctactaattcaatcagaggtcatcgaatataatttaatattatcttgatacccccagatcatctcagtcagcatcccttgatattctctctatatacagcttcatggctgcgtttttgtcctttgatttctggctgtgacatttaacttattctgttgttgtgcctttctcacatttttttctttcagtttatagcttctagtatcctgatgggaaagtttgtgttttttgtttgttttcttaatgttgaaaaatcatgaagcttaagatgggaattaggtacacggattcaaccaaatgttttgcgactcttagacgctttctttggttaccagtagatttggaaatatgatgttggcagaagtctagtggcctgacatatgagatgtcactgtattttaaactacattttttatgagaaaatatgcaaaattttacaagccacttagcagacacatttcagtaatttaaacttgatcatttcagtaaaaacaatcatgaggtcaatcatctgttacttaatggagatagtataaagagaagcagaatttacacagagcaaccaaaccaaatatttggtcagtatatttttgggtaacgtagagcagcaaaattattactaactaaataaatctggatcaattaaatagttactttcatagaactttcactagtctataaatccctgactcaggattaaaactgtggaacccagaggaaatacccaggtatgtttaatcttaagaatacttcatataaataacgtttcaatgtaaatatttataaagaaattggttgttatttttcctaggaaggtgtaggaaggttttcttgttgttctcaatcagcactagcttcaatcaggcagaagaaacagcaggtcttggctaatcgaggtgagaacagaatgatgtaatgactaatattgcaacccgttgattttagaaggtcttgtgggcattaagggaaagcagaggaagaatgagaaaatatggtcagagtgacataggacatttgtgacttaatgaccatcgaatcacaggtgttaatctccctctctcaatttgtctttctcattaattacagactctgagagttgtcatagaattgcaaccgtaggttggccaaaaccatctttttaaaatacagaagaaagtttgccttgaattttatatgtgatatgtcattcatgttattttaccacattgttcacagggatgttaaagactattatttacttaagtggttgttccaaaggtgattcagtagttaccattaaaatattatttaaaaacatttttatatcatagagccagaagtaattgaatattgactctcgagggaagacattttctgtcttttatttcatgagctttgatttttctctttctctgcttcaccttctgcactttataccttaagtgggatttatataccacttgaatttaattagcaaaataggcaaaaagtgctaataatctattctcagggcagatgcctattggtgcctgcaaattacacagcgataaggctgaaggataggttcaaaataatgttgaggacttacacattttatagatagtttctttctattcccaaatggtatgtgaaatttttgttctattttttttattggttttcaatagttaattttgatctttatcataagaagctttagttatagactggtatttttttcattgcaatctactttaaatttatggtcagttaagcacatgtatggaagattcgaacattgtctatagtttgaaaaatctatcaacaccttcactgctttcccaatttctttatccaaatacctgttcttccttaacaaatattatgttactgtataagaatctgaattagaagttttaagttaaaatgcattgttattcactacacaatgtttcaaaaataaattttcatttgaaaa

SEQ ID NO: 24931 - DNA, 6284 bp, Homo sapiens
  source 1..6284: mol_type = unassigned DNA
caacgtgctgagctaatagcgacagatagagggcagacagattcctgctagcagcttagtgttagttgcttgtggtaactaaggcaggtggcatacatctcagaacgtggagaatgatggtatgctttctgagttaacatgttgaactgttttgcttttctaaaaattttcctagtaacattttcttgatgatatgagagtggatatcaatgcctcacagaaacaagaggtggaacatgtgaatgaatcgtcttggaactagattatgagcactggttctttttaaagggatgtgcaagaggcagccttggcaagaaaacttgctgcataatcttacatggactaaagatgaaactttaaaccgcaaatcagctttgagtgaactttgacagaagatgtttcgacagttttatctctggacatgtttagcttcagggatcatcctgggctctctctttgaaatctgcttgggccagtatgatgatgcctacagctatgaagattgcaaactagctaggggaggaccaccagctaccatagttgctattgatgaagaaagtcggaatggtacaattctggtggacaacatgctgatcaaagggactgctggaggaccagaccccaccatagaactttctttaaaggataatgtggattactgggtgttgatggatcctgttaagcaaatgcttttcctgaacagcaccggaagagttctggatagagatccaccgatgaacatacactccattgtggtgcaggtccagtgcatcaacaaaaaagtgggcactattatctaccatgaagtgcgaatagtggtgagagacaggaatgacaactcacccactttcaagcatgaaagctactatgccacagtgaatgagctcactccagttggtaccacaatattcacaggattttcaggagacaatggagctacagatatagatgatggaccaaatggacagatagagtatgttattcagtataatccagatgatccgacatccaatgacacctttgaaattcccctaatgttgactggaaatatagtgttaaggaagaggctcaactatgaagataagactcgctactttgtcataatccaagctaatgaccgtgcccaaaatctgaatgagaggcgaaccaccaccaccactctcacagtggatgttctggatggagatgacttgggtccaatgtttcttccttgtgtccttgtgccaaacactcgtgattgccgtccactcacttatcaagctgccatacctgagttgagaactccggaagaactgaaccccattattgttacgccaccaatccaagccattgatcaggaccggaatattcaaccgccatcagataggccaggaatcctctattccatccttgttgggactcctgaggattacccacgatttttccatatgcatcctaggacagcagaacttagtctcctggagccagtaaacagagactttcaccagaaatttgatttggttattaaggctgaacaagacaatggtcatcctcttcctgcctttgccggtctacacattgaaatactggatgaaaacaatcaaagtccatattttacaatgcccagttatcaaggctatatcctggaatctgccccagtgggagcaaccatttcggacagtctcaatttgacttcacctttaagaatagtagctctggacaaggacatagaagatacaaaagacccagagcttcacctttttctgaatgactacacctcagtcttcaccgtcacacagactggtattactcgctacctcaccttacttcaaccagtggacagggaagaacagcaaacttacaccttttcgataacagcatttgatggtgtacaagaaagtgagccagtcatcgtcaatattcaagtgatggatgcaaatgataacacgccaaccttccctgaaatatcctatgatgtgtatgtttatacagacatgagacctggggacagtgtcatacagctcactgcagtcgacgcagacgaagggtcaaatggggagatcacatatgaaatccttgttggggctcagggagacttcatcatcaataaaacaacagggcttatcaccatcgctccaggggtggaaatgatagtcgggcggacttacgcactcacggtccaagcagcggataatgctcctcctgcagagcgaaggaactccatctgcactgtgtatattgaagtgcttccaccaaataatcaaagccctcctcgcttcccacagctgatgtatagccttgaaattagtgaagccatgagggttggtgctgttttattaaatctacaggcaactgatcgagagggagactcaataacatatgccattgagaatggagatcctcagagagtttttaatctttcagaaaccacggggattctaaccttagggaaagcactggacagggaaagcactgatcgctacattctgatcatcacagcttcagatggcaggccagatgggacctcaactgccacagtaaacatagtggtgacagatgtcaatgacaatgctccagtgtttgatccttatctgccaagaaatttatctgtggtggaagaagaagccaatgcctttgtgggtcaagtaaaagcaacagaccctgatgctggaataaatggtcaagtgcactacagtttgggtaactttaataatctttttcgtatcacatccaatgggagcatttacacagcagtgaagcttaacagagaagtcagggactactatgaacttgttgttgtggcaacagatggagcagtacaccctcgtcattcaactctaaccttggccatcaaggttttggacattgatgataacagtcctgtgttcaccaattcaacatacactgtccttgttgaagagaatttgccagctgggactaccatccttcaaatagaggccaaagatgtcgaccttggagcaaatgtgtcttaccggataagaagcccagaagtgaagcacttttttgcactacatccatttacaggagaactatcgcttttaaggagtttagattatgaggcatttccagaccaagaagcaagtatcacttttctggtagaggcctttgatatttatggaacaatgccacctggtattgctactgtcacagtgattgtaaaggatatgaatgattatcctcctgtctttagtaaacgaatatacaaagggatggtggctccggatgcagtcaagggtacacctatcacaacagtttatgctgaagatgcagaccctcctggattacctgcaagtcgtgtgaggtatagagtagatgatgtacagtttccttaccctgccagtatttttgaagtggaagaagattctggaagagtaataacacgagtcaatcttaatgaagaacctacaacaatttttaagttggtggtggttgcttttgatgatggggagcctgtgatgtccagcagtgccacagtgaagattcttgtcttacatcctggtgagatcccacgcttcacacaggaggaatatagacctcctccagtaagtgaacttgccaccaaagggaccatggttggtgtaatttctgctgctgccattaatcaaagtattgtgtactccattgtttcaggaaatgaagaagatacatttggaattaataacatcacaggtgttatctatgtgaatggacctctggattatgagaccaggacaagctatgtacttcgagtccaagctgattccctggaagtggtccttgccaatctccgagttccttcaaaaagcaatacagctaaagtatacattgagattcaggatgaaaataatcatcccccagtgtttcagaaaaaattctacatcggaggtgtatctgaagatgcaagaatgtttacttctgtactcagagtgaaggctactgataaagatactggcaattatagtgtcatggcctacagactcataataccaccaattaaagagggaaaagaaggatttgtagtggaaacatatacagggcttatcaaaactgctatgctcttccataatatgaggagatcctacttcaagtttcaagttattgcaactgacgactatgggaagggactgagcggcaaagccgatgtactcgtctccgtggtcaatcagctggatatgcaagtcattgtttccaatgtgcctcctactctagtggaaaaaaagatagaagatcttacagagatcttggatcgctatgttcaggaacaaattcctggtgccaaggtcgtagtggagtccattggagctcgccggcatggagatgccttttccctagaagattacaccaaatgtgacttgactgtctatgcaattgacccccaaaccaacagagccatcgatagaaatgagctttttaaatttttggatggcaaactacttgatatcaataaagactttcagccgtattatggggaaggaggacgcattctggagatccggactccagaggcagtgaccagcattaaaaagagaggagaaagtctaggatacacagaaggggccttgttggctctggccttcatcatcatcctctgctgcattcctgccatcttggtggttttggtcagctacagacacttcaaaagacgtcaagctgagtgtacaaagactgcacgaattcaggccgcattacccgcggctaaaccagcagtgccggctcctgcaccagtggcagcgcccccgccgccgccgccgcctccgccaggtgcgcatctctatgaagaacttggagacagctcaatgaaaggtcttttccttctctaccattttcaacaaagcaggggaaataactcagtctcagaagacaggaaacatcaacaagttgtgatgcccttttcttccaatactattgaggctcacaagtcagctcatgtagacggatcacttaagagcaacaaactgaagtctgcaagaaaattcacatttctatctgatgaggatgacttaagtgcccataatcccctttataaggaaaacataagtcaagtatcaacaaattcagacatttcacagagaacagattttgtagacccattttcacccaaaatacaagccaagagtaagtctctgaggggcccaagagaaaagattcagaggctgtggagtcagtcagtcagcttacccaggaggctgatgaggaaagttccaaatagaccagagatcatagatctgcagcagtggcaaggcaccaggcagaaagctgaaaatgaaaacactggaatctgtacaaacaaaagaggtagcagcaatccattgcttacaactgaagaggcaaatttgacagagaaagaggaaataaggcaaggtgaaacactgatgatagaaggaacagaacagttgaaatctctctcttcagactcttcattttgctttcccaggcctcacttctcattctccactttgccaactgtttcaagaactgtggaactcaaatcagaacctaatgtcatcagttctcctgctgagtgttccttggaactttctccttcaaggccttgtgttttacattcttcactctctaggagagagacacctatttgtatgttacctattgaaaccgaaagaaatatttttgaaaattttgcccatccaccaaacatctctccttctgcctgtccccttccccctcctcctcctatttctcctccttctcctcctcctgctcctgctcctcttgctcctcctcctgacatttctcctttttctcttttttgtcctcctccctctcctccttctatccctcttcctcttcctcctcctacattttttccactttccgtttcaacgtctggtcccccaacaccacctcttctacctccatttccaactcctcttcctccaccacctccttctattccttgccctccacctccttcagcttcatttctgtccacagagtgtgtctgtataacaggtgttaaatgcacgaccaacttgatgcctgccgagaaaattaagtcctctatgacacagctatcaacaacgacagtgtgtaaaacagaccctcagagagaaccaaaaggcatcctcagacacgttaaaaacttagcagaacttgaaaaatcagtagctaacatgtacagtcaaatagaaaaaaactatctacgcacaaatgtttcagaacttcaaactatgtgcccttcagaagtaacaaatatggaaatcacatctgaacaaaacaaggggagtttgaacaatattgtcgagggaactgaaaaacaatctcacagtcaatctacttcactgtaa

SEQ ID NO: 24932 - DNA, 6056 bp, Homo sapiens
  source 1..6056: mol_type = unassigned DNA
caacgtgctgagctaatagcgacagatagagggcagacagattcctgctagcagcttagtgttagttgcttgtggtaactaaggcaggtggcatacatctcagaacgtggagaatgatggtatgctttctgagttaacatgttgaactgttttgcttttctaaaaattttcctagtaacattttcttgatgatatgagagtggatatcaatgcctcacagaaacaagaggtggaacatgtgaatgaatcgtcttggaactagattatgagcactggttctttttaaagggatgtgcaagaggcagccttggcaagaaaacttgctgcataatcttacatggactaaagatgaaactttaaaccgcaaatcagctttgagtgaactttgacagaagatgtttcgacagttttatctctggacatgtttagcttcagggatcatcctgggctctctctttgaaatctgcttgggccagtatgatgatgattgcaaactagctaggggaggaccaccagctaccatagttgctattgatgaagaaagtcggaatggtacaattctggtggacaacatgctgatcaaagggactgctggaggaccagaccccaccatagaactttctttaaaggataatgtggattactgggtgttgatggatcctgttaagcaaatgcttttcctgaacagcaccggaagagttctggatagagatccaccgatgaacatacactccattgtggtgcaggtccagtgcatcaacaaaaaagtgggcactattatctaccatgaagtgcgaatagtggtgagagacaggaatgacaactcacccactttcaagcatgaaagctactatgccacagtgaatgagctcactccagttggtaccacaatattcacaggattttcaggagacaatggagctacagatatagatgatggaccaaatggacagatagagtatgttattcagtataatccagatgatccgacatccaatgacacctttgaaattcccctaatgttgactggaaatatagtgttaaggaagaggctcaactatgaagataagactcgctactttgtcataatccaagctaatgaccgtgcccaaaatctgaatgagaggcgaaccaccaccaccactctcacagtggatgttctggatggagatgacttgggtccaatgtttcttccttgtgtccttgtgccaaacactcgtgattgccgtccactcacttatcaagctgccatacctgagttgagaactccggaagaactgaaccccattattgttacgccaccaatccaagccattgatcaggaccggaatattcaaccgccatcagataggccaggaatcctctattccatccttgttgggactcctgaggattacccacgatttttccatatgcatcctaggacagcagaacttagtctcctggagccagtaaacagagactttcaccagaaatttgatttggttattaaggctgaacaagacaatggtcatcctcttcctgcctttgccggtctacacattgaaatactggatgaaaacaatcaaagtccatattttacaatgcccagttatcaaggctatatcctggaatctgccccagtgggagcaaccatttcggacagtctcaatttgacttcacctttaagaatagtagctctggacaaggacatagaagatacaaaagacccagagcttcacctttttctgaatgactacacctcagtcttcaccgtcacacagactggtattactcgctacctcaccttacttcaaccagtggacagggaagaacagcaaacttacaccttttcgataacagcatttgatggtgtacaagaaagtgagccagtcatcgtcaatattcaagtgatggatgcaaatgataacacgccaaccttccctgaaatatcctatgatgtgtatgtttatacagacatgagacctggggacagtgtcatacagctcactgcagtcgacgcagacgaagggtcaaatggggagatcacatatgaaatccttgttggggctcagggagacttcatcatcaataaaacaacagggcttatcaccatcgctccaggggtggaaatgatagtcgggcggacttacgcactcacggtccaagcagcggataatgctcctcctgcagagcgaagcacggggattctaaccttagggaaagcactggacagggaaagcactgatcgctacattctgatcatcacagcttcagatggcaggccagatgggacctcaactgccacagtaaacatagtggtgacagatgtcaatgacaatgctccagtgtttgatccttatctgccaagaaatttatctgtggtggaagaagaagccaatgcctttgtgggtcaagtaaaagcaacagaccctgatgctggaataaatggtcaagtgcactacagtttgggtaactttaataatctttttcgtatcacatccaatgggagcatttacacagcagtgaagcttaacagagaagtcagggactactatgaacttgttgttgtggcaacagatggagcagtacaccctcgtcattcaactctaaccttggccatcaaggttttggacattgatgataacagtcctgtgttcaccaattcaacatacactgtccttgttgaagagaatttgccagctgggactaccatccttcaaatagaggccaaagatgtcgaccttggagcaaatgtgtcttaccggataagaagcccagaagtgaagcacttttttgcactacatccatttacaggagaactatcgcttttaaggagtttagattatgaggcatttccagaccaagaagcaagtatcacttttctggtagaggcctttgatatttatggaacaatgccacctggtattgctactgtcacagtgattgtaaaggatatgaatgattatcctcctgtctttagtaaacgaatatacaaagggatggtggctccggatgcagtcaagggtacacctatcacaacagtttatgctgaagatgcagaccctcctggattacctgcaagtcgtgtgaggtatagagtagatgatgtacagtttccttaccctgccagtatttttgaagtggaagaagattctggaagagtaataacacgagtcaatcttaatgaagaacctacaacaatttttaagttggtggtggttgcttttgatgatggggagcctgtgatgtccagcagtgccacagtgaagattcttgtcttacatcctggtgagatcccacgcttcacacaggaggaatatagacctcctccagtaagtgaacttgccaccaaagggaccatggttggtgtaatttctgctgctgccattaatcaaagtattgtgtactccattgtttcaggaaatgaagaagatacatttggaattaataacatcacaggtgttatctatgtgaatggacctctggattatgagaccaggacaagctatgtacttcgagtccaagctgattccctggaagtggtccttgccaatctccgagttccttcaaaaagcaatacagctaaagtatacattgagattcaggatgaaaataatcatcccccagtgtttcagaaaaaattctacatcggaggtgtatctgaagatgcaagaatgtttacttctgtactcagagtgaaggctactgataaagatactggcaattatagtgtcatggcctacagactcataataccaccaattaaagagggaaaagaaggatttgtagtggaaacatatacagggcttatcaaaactgctatgctcttccataatatgaggagatcctacttcaagtttcaagttattgcaactgacgactatgggaagggactgagcggcaaagccgatgtactcgtctccgtggtcaatcagctggatatgcaagtcattgtttccaatgtgcctcctactctagtggaaaaaaagatagaagatcttacagagatcttggatcgctatgttcaggaacaaattcctggtgccaaggtcgtagtggagtccattggagctcgccggcatggagatgccttttccctagaagattacaccaaatgtgacttgactgtctatgcaattgacccccaaaccaacagagccatcgatagaaatgagctttttaaatttttggatggcaaactacttgatatcaataaagactttcagccgtattatggggaaggaggacgcattctggagatccggactccagaggcagtgaccagcattaaaaagagaggagaaagtctaggatacacagaaggggccttgttggctctggccttcatcatcatcctctgctgcattcctgccatcttggtggttttggtcagctacagacacttcaaaagacgtcaagctgagtgtacaaagactgcacgaattcaggccgcattacccgcggctaaaccagcagtgccggctcctgcaccagtggcagcgcccccgccgccgccgccgcctccgccaggtgcgcatctctatgaagaacttggagacagctcaatgaaaggtcttttccttctctaccattttcaacaaagcaggggaaataactcagtctcagaagacaggaaacatcaacaagttgtgatgcccttttcttccaatactattgaggctcacaagtcagctcatgtagacggatcacttaagagcaacaaactgaagtctgcaagaaaattcacatttctatctgatgaggatgacttaagtgcccataatcccctttataaggaaaacataagtcaagtatcaacaaattcagacatttcacagagaacagattttgtagacccattttcacccaaaatacaagccaagagtaagtctctgaggggcccaagagaaaagattcagaggctgtggagtcagtcagtcagcttacccaggaggctgatgaggaaagttccaaatagaccagagatcatagatctgcagcagtggcaaggcaccaggcagaaagctgaaaatgaaaacactggaatctgtacaaacaaaagaggtagcagcaatccattgcttacaactgaagaggcaaatttgacagagaaagaggaaataaggcaaggtgaaacactgatgatagaaggaacagaacagttgaaatctctctcttcagactcttcattttgctttcccaggcctcacttctcattctccactttgccaactgtttcaagaactgtggaactcaaatcagaacctaatgtcatcagttctcctgctgagtgttccttggaactttctccttcaaggccttgtgttttacattcttcactctctaggagagagacacctatttgtatgttacctattgaaaccgaaagaaatatttttgaaaattttgcccatccaccaaacatctctccttctgcctgtccccttccccctcctcctcctatttctcctccttctcctcctcctgctcctgctcctcttgctcctcctcctgacatttctcctttttctcttttttgtcctcctccctctcctccttctatccctcttcctcttcctcctcctacattttttccactttccgtttcaacgtctggtcccccaacaccacctcttctacctccatttccaactcctcttcctccaccacctccttctattccttgccctccacctccttcagcttcatttctgtccacagagtgtgtctgtataacaggtgttaaatgcacgaccaacttgatgcctgccgagaaaattaagtcctctatgacacagctatcaacaacgacagtgtgtaaaacagaccctcagagagaaccaaaaggcatcctcagacacgttaaaaacttagcagaacttgaaaaatcagtagctaacatgtacagtcaaatagaaaaaaactatctacgcacaaatgtttcagaacttcaaactatgtgcccttcagaagtaacaaatatggaaatcacatctgaacaaaacaaggggagtttgaacaatattgtcgagggaactgaaaaacaatctcacagtcaatctacttcactgtaa

SEQ ID NO: 24933 - DNA, 6771 bp, Homo sapiens
  source 1..6771: mol_type = unassigned DNA
caacgtgctgagctaatagcgacagatagagggcagacagattcctgctagcagcttagtgttagttgcttgtggtaactaaggcaggtggcatacatctcagaacgtggagaatgatggtatgctttctgagttaacatgttgaactgttttgcttttctaaaaattttcctagtaacattttcttgatgatatgagagtggatatcaatgcctcacagaaacaagaggtggaacatgtgaatgaatcgtcttggaactagattatgagcactggttctttttaaagggatgtgcaagaggcagccttggcaagaaaacttgctgcataatcttacatggactaaagatgaaactttaaaccgcaaatcagctttgagtgaactttgacagaagatgtttcgacagttttatctctggacatgtttagcttcagggatcatcctgggctctctctttgaaatctgcttgggccagtatgatgatgattgcaaactagctaggggaggaccaccagctaccatagttgctattgatgaagaaagtcggaatggtacaattctggtggacaacatgctgatcaaagggactgctggaggaccagaccccaccatagaactttctttaaaggataatgtggattactgggtgttgatggatcctgttaagcaaatgcttttcctgaacagcaccggaagagttctggatagagatccaccgatgaacatacactccattgtggtgcaggtccagtgcatcaacaaaaaagtgggcactattatctaccatgaagtgcgaatagtggtgagagacaggaatgacaactcacccactttcaagcatgaaagctactatgccacagtgaatgagctcactccagttggtaccacaatattcacaggattttcaggagacaatggagctacagatatagatgatggaccaaatggacagatagagtatgttattcagtataatccagatgatccgacatccaatgacacctttgaaattcccctaatgttgactggaaatatagtgttaaggaagaggctcaactatgaagataagactcgctactttgtcataatccaagctaatgaccgtgcccaaaatctgaatgagaggcgaaccaccaccaccactctcacagtggatgttctggatggagatgacttgggtccaatgtttcttccttgtgtccttgtgccaaacactcgtgattgccgtccactcacttatcaagctgccatacctgagttgagaactccggaagaactgaaccccattattgttacgccaccaatccaagccattgatcaggaccggaatattcaaccgccatcagataggccaggaatcctctattccatccttgttgggactcctgaggattacccacgatttttccatatgcatcctaggacagcagaacttagtctcctggagccagtaaacagagactttcaccagaaatttgatttggttattaaggctgaacaagacaatggtcatcctcttcctgcctttgccggtctacacattgaaatactggatgaaaacaatcaaagtccatattttacaatgcccagttatcaaggctatatcctggaatctgccccagtgggagcaaccatttcggacagtctcaatttgacttcacctttaagaatagtagctctggacaaggacatagaagatacaaaagacccagagcttcacctttttctgaatgactacacctcagtcttcaccgtcacacagactggtattactcgctacctcaccttacttcaaccagtggacagggaagaacagcaaacttacaccttttcgataacagcatttgatggtgtacaagaaagtgagccagtcatcgtcaatattcaagtgatggatgcaaatgataacacgccaaccttccctgaaatatcctatgatgtgtatgtttatacagacatgagacctggggacagtgtcatacagctcactgcagtcgacgcagacgaagggtcaaatggggagatcacatatgaaatccttgttggggctcagggagacttcatcatcaataaaacaacagggcttatcaccatcgctccaggggtggaaatgatagtcgggcggacttacgcactcacggtccaagcagcggataatgctcctcctgcagagcgaaggaactccatctgcactgtgtatattgaagtgcttccaccaaataatcaaagccctcctcgcttcccacagctgatgtatagccttgaaattagtgaagccatgagggttggtgctgttttattaaatctacagcacggggattctaaccttagggaaagcactggacagggaaagcactgatcgctacattctgatcatcacagcttcagatggcaggccagatgggacctcaactgccacagtaaacatagtggtgacagatgtcaatgacaatgctccagtgtttgatccttatctgccaagaaatttatctgtggtggaagaagaagccaatgcctttgtgggtcaagtaaaagcaacagaccctgatgctggaataaatggtcaagtgcactacagtttgggtaactttaataatctttttcgtatcacatccaatgggagcatttacacagcagtgaagcttaacagagaagtcagggactactatgaacttgttgttgtggcaacagatggagcagtacaccctcgtcattcaactctaaccttggccatcaaggttttggacattgatgataacagtcctgtgttcaccaattcaacatacactgtccttgttgaagagaatttgccagctgggactaccatccttcaaatagaggccaaagatgtcgaccttggagcaaatgtgtcttaccggataagaagcccagaagtgaagcacttttttgcactacatccatttacaggagaactatcgcttttaaggagtttagattatgaggcatttccagaccaagaagcaagtatcacttttctggtagaggcctttgatatttatggaacaatgccacctggtattgctactgtcacagtgattgtaaaggatatgaatgattatcctcctgtctttagtaaacgaatatacaaagggatggtggctccggatgcagtcaagggtacacctatcacaacagtttatgctgaagatgcagaccctcctggattacctgcaagtcgtgtgaggtatagagtagatgatgtacagtttccttaccctgccagtatttttgaagtggaagaagattctggaagagtaataacacgagtcaatcttaatgaagaacctacaacaatttttaagttggtggtggttgcttttgatgatggggagcctgtgatgtccagcagtgccacagtgaagattcttgtcttacatcctggtgagatcccacgcttcacacaggaggaatatagacctcctccagtaagtgaacttgccaccaaagggaccatggttggtgtaatttctgctgctgccattaatcaaagtattgtgtactccattgtttcaggaaatgaagaagatacatttggaattaataacatcacaggtgttatctatgtgaatggacctctggattatgagaccaggacaagctatgtacttcgagtccaagctgattccctggaagtggtccttgccaatctccgagttccttcaaaaagcaatacagctaaagtatacattgagattcaggatgaaaataatcatcccccagtgtttcagaaaaaattctacatcggaggtgtatctgaagatgcaagaatgtttacttctgtactcagagtgaaggctactgataaagatactggcaattatagtgtcatggcctacagactcataataccaccaattaaagagggaaaagaaggatttgtagtggaaacatatacagggcttatcaaaactgctatgctcttccataatatgaggagatcctacttcaagtttcaagttattgcaactgacgactatgggaagggactgagcggcaaagccgatgtactcgtctccgtggtcaatcagctggatatgcaagtcattgtttccaatgtgcctcctactctagtggaaaaaaagatagaagatcttacagagatcttggatcgctatgttcaggaacaaattcctggtgccaaggtcgtagtggagtccattggagctcgccggcatggagatgccttttccctagaagattacaccaaatgtgacttgactgtctatgcaattgacccccaaaccaacagagccatcgatagaaatgagctttttaaatttttggatggcaaactacttgatatcaataaagactttcagccgtattatggggaaggaggacgcattctggagatccggactccagaggcagtgaccagcattaaaaagagaggagaaagtctaggatacacagaaggggccttgttggctctggccttcatcatcatcctctgctgcattcctgccatcttggtggttttggtcagctacagacagtttaaagtacgtcaagctgagtgtacaaagactgcacgaattcaggccgcattacccgcggctaaaccagcagtgccggctcctgcaccagtggcagcgcccccgccgccgccgccgcctccgccaggtgcgcatctctatgaagaacttggagacagctcaatgcataatcttttccttctctaccattttcaacaaagcaggggaaataactcagtctcagaagacaggaaacatcaacaagttgtgatgcccttttcttccaatactattgaggctcacaagtcagctcatgtagacggatcacttaagagcaacaaactgaagtctgcaagaaaattcacatttctatctgatgaggatgacttaagtgcccataatcccctttataaggaaaacataagtcaagtatcaacaaattcagacatttcacagagaacagattttgtagacccattttcacccaaaatacaagccaagagtaagtctctgaggggcccaagagaaaagattcagaggctgtggagtcagtcagtcagcttacccaggaggctgatgaggaaagttccaaatagaccagagatcatagatctgcagcagtggcaaggcaccaggcagaaagctgaaaatgaaaacactggaatctgtacaaacaaaagaggtagcagcaatccattgcttacaactgaagaggcaaatttgacagagaaagaggaaataaggcaaggtgaaacactgatgatagaaggaacagaacagttgaaatctctctcttcagactcttcattttgctttcccaggcctcacttctcattctccactttgccaactgtttcaagaactgtggaactcaaatcagaacctaatgtcatcagttctcctgctgagtgttccttggaactttctccttcaaggccttgtgttttacattcttcactctctaggagagagacacctatttgtatgttacctattgaaaccgaaagaaatatttttgaaaattttgcccatccaccaaacatctctccttctgcctgtccccttccccctcctcctcctatttctcctccttctcctcctcctgctcctgctcctcttgctcctcctcctgacatttctcctttttctcttttttgtcctcctccctctcctccttctatccctcttcctcttcctcctcctacattttttccactttccgtttcaacgtctggtcccccaacaccacctcttctacctccatttccaactcctcttcctccaccacctccttctattccttgccctccacctccttcagcttcatttctgtccacagagtgtgtctgtataacaggtgttaaatgcacgaccaacttgatgcctgccgagaaaattaagtcctctatgacacagctatcaacaacgacagtgtgtaaaacagaccctcagagagaaccaaaaggcatcctcagacacgttaaaaacttagcagaacttgaaaaatcagtagctaacatgtacagtcaaatagaaaaaaactatctacgcacaaatgtttcagaacttcaaactatgtgcccttcagaagtaacaaatatggaaatcacatctgaacaaaacaaggggagtttgaacaatattgtcgagggaactgaaaaacaatctcacagtcaatctacttcactgtaatgttgcttttcttattttagtcgggcaaacctcttgttgatcatagtcttcaagttgaacatcaaatttgaacgtcaaagaagactctattattttaccccaaattcaatgaaatgcagttttttttctcgtttttaatttaaaaagatattaacctcatcactactaactcactcatataatagatttaccttactttttaaaaactacaaagtagcataatttgttctacatttatttgaaaagtaagtaattttaatctcttttttagtgggaatatgtgggcatgaaaattagatacccaacttaaaccaaaggcatgtctatcatgtggatgcagtaacatttacatttagtttttgatcgtagttttatatgaatgttccaagaaaaaagcagactgttacaaataagttaaaactgatatgattgataggttctgttttttcttgaagcctatgtatttggtaagaagaaatactaccgaagtaaaatataatgtacctagattgtaggagatgacagacataaggtatttcaaaataaatctcaggtgctataacatgtagtcatctgttttct

SEQ ID NO: 24934 - DNA, 9237 bp, Homo sapiens
  source 1..9237: mol_type = unassigned DNA
caacgtgctgagctaatagcgacagatagagggcagacagattcctgctagcagcttagtgttagttgcttgtggtaactaaggcaggtggcatacatctcagaacgtggagaatgatggtatgctttctgagttaacatgttgaactgttttgcttttctaaaaattttcctagtaacattttcttgatgatatgagagtggatatcaatgcctcacagaaacaagaggtggaacatgtgaatgaatcgtcttggaactagattatgagcactggttctttttaaagggatgtgcaagaggcagccttggcaagaaaacttgctgcataatcttacatggactaaagatgaaactttaaaccgcaaatcagctttgagtgaactttgacagaagatgtttcgacagttttatctctggacatgtttagcttcagggatcatcctgggctctctctttgaaatctgcttgggccagtatgatgatgattgcaaactagctaggggaggaccaccagctaccatagttgctattgatgaagaaagtcggaatggtacaattctggtggacaacatgctgatcaaagggactgctggaggaccagaccccaccatagaactttctttaaaggataatgtggattactgggtgttgatggatcctgttaagcaaatgcttttcctgaacagcaccggaagagttctggatagagatccaccgatgaacatacactccattgtggtgcaggtccagtgcatcaacaaaaaagtgggcactattatctaccatgaagtgcgaatagtggtgagagacaggaatgacaactcacccactttcaagcatgaaagctactatgccacagtgaatgagctcactccagttggtaccacaatattcacaggattttcaggagacaatggagctacagatatagatgatggaccaaatggacagatagagtatgttattcagtataatccagatgatccgacatccaatgacacctttgaaattcccctaatgttgactggaaatatagtgttaaggaagaggctcaactatgaagataagactcgctactttgtcataatccaagctaatgaccgtgcccaaaatctgaatgagaggcgaaccaccaccaccactctcacagtggatgttctggatggagatgacttgggtccaatgtttcttccttgtgtccttgtgccaaacactcgtgattgccgtccactcacttatcaagctgccatacctgagttgagaactccggaagaactgaaccccattattgttacgccaccaatccaagccattgatcaggaccggaatattcaaccgccatcagataggccaggaatcctctattccatccttgttgggactcctgaggattacccacgatttttccatatgcatcctaggacagcagaacttagtctcctggagccagtaaacagagactttcaccagaaatttgatttggttattaaggctgaacaagacaatggtcatcctcttcctgcctttgccggtctacacattgaaatactggatgaaaacaatcaaagtccatattttacaatgcccagttatcaaggctatatcctggaatctgccccagtgggagcaaccatttcggacagtctcaatttgacttcacctttaagaatagtagctctggacaaggacatagaagatacaaaagacccagagcttcacctttttctgaatgactacacctcagtcttcaccgtcacacagactggtattactcgctacctcaccttacttcaaccagtggacagggaagaacagcaaacttacaccttttcgataacagcatttgatggtgtacaagaaagtgagccagtcatcgtcaatattcaagtgatggatgcaaatgataacacgccaaccttccctgaaatatcctatgatgtgtatgtttatacagacatgagacctggggacagtgtcatacagctcactgcagtcgacgcagacgaagggtcaaatggggagatcacatatgaaatccttgttggggctcagggagacttcatcatcaataaaacaacagggcttatcaccatcgctccaggggtggaaatgatagtcgggcggacttacgcactcacggtccaagcagcggataatgctcctcctgcagagcgaaggaactccatctgcactgtgtatattgaagtgcttccaccaaataatcaaagccctcctcgcttcccacagctgatgtatagccttgaaattagtgaagccatgagggttggtgctgttttattaaatctacaggcaactgatcgagagggagactcaataacatatgccattgagaatggagatcctcagagagtttttaatctttcagaaaccacggggattctaaccttagggaaagcactggacagggaaagcactgatcgctacattctgatcatcacagcttcagatggcaggccagatgggacctcaactgccacagtaaacatagtggtgacagatgtcaatgacaatgctccagtgtttgatccttatctgccaagaaatttatctgtggtggaagaagaagccaatgcctttgtgggtcaagtaaaagcaacagaccctgatgctggaataaatggtcaagtgcactacagtttgggtaactttaataatctttttcgtatcacatccaatgggagcatttacacagcagtgaagcttaacagagaagtcagggactactatgaacttgttgttgtggcaacagatggagcagtacaccctcgtcattcaactctaaccttggccatcaaggttttggacattgatgataacagtcctgtgttcaccaattcaacatacactgtccttgttgaagagaatttgccagctgggactaccatccttcaaatagaggccaaagatgtcgaccttggagcaaatgtgtcttaccggataagaagcccagaagtgaagcacttttttgcactacatccatttacaggagaactatcgcttttaaggagtttagattatgaggcatttccagaccaagaagcaagtatcacttttctggtagaggcctttgatatttatggaacaatgccacctggtattgctactgtcacagtgattgtaaaggatatgaatgattatcctcctgtctttagtaaacgaatatacaaagggatggtggctccggatgcagtcaagggtacacctatcacaacagtttatgctgaagatgcagaccctcctggattacctgcaagtcgtgtgaggtatagagtagatgatgtacagtttccttaccctgccagtatttttgaagtggaagaagattctggaagagtaataacacgagtcaatcttaatgaagaacctacaacaatttttaagttggtggtggttgcttttgatgatggggagcctgtgatgtccagcagtgccacagtgaagattcttgtcttacatcctggtgagatcccacgcttcacacaggaggaatatagacctcctccagtaagtgaacttgccaccaaagggaccatggttggtgtaatttctgctgctgccattaatcaaagtattgtgtactccattgtttcaggaaatgaagaagatacatttggaattaataacatcacaggtgttatctatgtgaatggacctctggattatgagaccaggacaagctatgtacttcgagtccaagctgattccctggaagtggtccttgccaatctccgagttccttcaaaaagcaatacagctaaagtatacattgagattcaggatgaaaataatcatcccccagtgtttcagaaaaaattctacatcggaggtgtatctgaagatgcaagaatgtttacttctgtactcagagtgaaggctactgataaagatactggcaattatagtgtcatggcctacagactcataataccaccaattaaagagggaaaagaaggatttgtagtggaaacatatacagggcttatcaaaactgctatgctcttccataatatgaggagatcctacttcaagtttcaagttattgcaactgacgactatgggaagggactgagcggcaaagccgatgtactcgtctccgtggtcaatcagctggatatgcaagtcattgtttccaatgtgcctcctactctagtggaaaaaaagatagaagatcttacagagatcttggatcgctatgttcaggaacaaattcctggtgccaaggtcgtagtggagtccattggagctcgccggcatggagatgccttttccctagaagattacaccaaatgtgacttgactgtctatgcaattgacccccaaaccaacagagccatcgatagaaatgagctttttaaatttttggatggcaaactacttgatatcaataaagactttcagccgtattatggggaaggaggacgcattctggagatccggactccagaggcagtgaccagcattaaaaagagaggagaaagtctaggatacacagaaggggccttgttggctctggccttcatcatcatcctctgctgcattcctgccatcttggtggttttggtcagctacagacacttcaaaagacgtcaagctgagtgtacaaagactgcacgaattcaggccgcattacccgcggctaaaccagcagtgccggctcctgcaccagtggcagcgcccccgccgccgccgccgcctccgccaggtgcgcatctctatgaagaacttggagacagctcaatatacaggtatgaaatgcctcaatatgggagtcgccgtcgattgttaccaccagctggacaggaggaatatggtgaggtggttggtgaagctgaggaagaatatgaggaggaagagtgggcaagaaaaagaatgatcaagttagttgttgatcgagagtatgaaaccagctcaactggagaagacagtgctcctgaatgtcagagaaaccgtcttcaccatcctagtatccacagtaatatcaacggcaatatatatattgcacagaatggttctgtggtgagaacccgccgtgcctgcctcacggacaacttaaaagttgcttcccctgttcgactgggagggccctttaagaaactagacaagttggcagtgacacatgaggagaatgtacctctgaacacattatcaaaggggccattttctactgaaaaaatgaatgcaagaccaactctggttacatttgccccttgccctgtggggactgacaatacagcggtgaagccactaaggaacaggctgaaaagcacagttgaacaggagtccatgattgacagtaagaacatcaaggaggctttggaatttcatagtgaccacacacagtctgatgatgaagagctttggatgggcccctggaacaacctccatataccaatgacaaaactgtgaccaattttttaaaagatattttaattaatttttacttacatttttaataaactgtgctttttattgtcactgagaaaacaatgtatggaatttatatcatgcacacaagctaaaactttgaacaatatgctttaaaattttaagagacagatttgcactcacattgttatcaattaatcgtttttcccagaaaatccttttggacatactttcactaaataacctatcgtttaaacatttagctgttttgttgggtcttgaatttttgttcattttaataaacaagaaataattactaaataatcatttatattttattgattaacatagattatgctttatttctagctccacaaaacatttttagtacatgtaattttattttccatagccaaaagggcaaaaaagaagtaagaggatatttacaggcaatgagtttatacagctgctgtctatactgccctaatttttaaaatgaaagctagaattgcaaagtaaagtaaatgagggaatcacctgtaaataattaattattttaaatcatgagcttgttttctttctttattgtcctgtataaaggttttcacattttaccataaatacatttatatcttgaccctttaggaaaccacttgaagtcgtatgtctttttatcaatattatttacaatattctcttgtcccttcatctcatatcaaatatggtagatactttagtttagtttaatcacttgaggttaaataattgtttggagcaacatggaaatctcacccttagcaaaagcttttagggaagtgagaaaggttcgagtaagcagtaatgcatctagaacgacaatttcataatggaagacatggtgaggttagggaagtctcacattaatgtcactagactttaatagtttgtaaacccagcatatcagagtaaaggaatttggcagggttgaaatgtatataatatataaagcttataaaggctatgaattcataacttcaaatgttgtgtttaacttcttccattttcaggttatttatagaatattttaatgcacatatttatgtgcctaaaatccagaaccaggaaatcattgcctgggcattttttaaaatcaaagaacatggtcttgattttttaccattgaacaaagcacagtgtttcatcataagtagaaatgaaaacagaatatcctttaaaaaacttgccttgtgtgttgcttattttccagatgatgtaaaaagaatgaaacaatatagattaagagaattcagaattctattgaatattacttagtatgatatagatgtagctcacttcaaattttgcacagtattgaccaagttcaggttttaatgaaatttcctcatgcatgcttaatatatggttgaaggactgaataatgcactattatttattcccctcttacatgtttcgcgtcttaaaaattgtttattattatgctatttcctcatttccaaagtgaatgaattgtactgacataaacttgccgacttgtaagagtagtatgtttttacttcagatttccaagaaaatatttgagatcaaatacagtaacatctcatctaccttattttattgagaattaatgcattccatacccttgccaaaaaaacaaaacaaaacaaacaaacaaaaaaaaacctagtggcattagctagattagaaacgtagaatcatgaccacacctcctggcctgccaaacaagcatccacattttcaaaagatcctaaggtggtttatatgcacattaaattttggaagcaatgaagtccggggcttattccttcaggcaccaaagcaatggtttttagtataggatactttgtataggaattagattaagcatatatttccctactaattcaatcagaggtcatcgaatataatttaatattatcttgatacccccagatcatctcagtcagcatcccttgatattctctctatatacagcttcatggctgcgtttttgtcctttgatttctggctgtgacatttaacttattctgttgttgtgcctttctcacatttttttctttcagtttatagcttctagtatcctgatgggaaagtttgtgttttttgtttgttttcttaatgttgaaaaatcatgaagcttaagatgggaattaggtacacggattcaaccaaatgttttgcgactcttagacgctttctttggttaccagtagatttggaaatatgatgttggcagaagtctagtggcctgacatatgagatgtcactgtattttaaactacattttttatgagaaaatatgcaaaattttacaagccacttagcagacacatttcagtaatttaaacttgatcatttcagtaaaaacaatcatgaggtcaatcatctgttacttaatggagatagtataaagagaagcagaatttacacagagcaaccaaaccaaatatttggtcagtatatttttgggtaacgtagagcagcaaaattattactaactaaataaatctggatcaattaaatagttactttcatagaactttcactagtctataaatccctgactcaggattaaaactgtggaacccagaggaaatacccaggtatgtttaatcttaagaatacttcatataaataacgtttcaatgtaaatatttataaagaaattggttgttatttttcctaggaaggtgtaggaaggttttcttgttgttctcaatcagcactagcttcaatcaggcagaagaaacagcaggtcttggctaatcgaggtgagaacagaatgatgtaatgactaatattgcaacccgttgattttagaaggtcttgtgggcattaagggaaagcagaggaagaatgagaaaatatggtcagagtgacataggacatttgtgacttaatgaccatcgaatcacaggtgttaatctccctctctcaatttgtctttctcattaattacagactctgagagttgtcatagaattgcaaccgtaggttggccaaaaccatctttttaaaatacagaagaaagtttgccttgaattttatatgtgatatgtcattcatgttattttaccacattgttcacagggatgttaaagactattatttacttaagtggttgttccaaaggtgattcagtagttaccattaaaatattatttaaaaacatttttatatcatagagccagaagtaattgaatattgactctcgagggaagacattttctgtcttttatttcatgagctttgatttttctctttctctgcttcaccttctgcactttataccttaagtgggatttatataccacttgaatttaattagcaaaataggcaaaaagtgctaataatctattctcagggcagatgcctattggtgcctgcaaattacacagcgataaggctgaaggataggttcaaaataatgttgaggacttacacattttatagatagtttctttctattcccaaatggtatgtgaaatttttgttctattttttttattggttttcaatagttaattttgatctttatcataagaagctttagttatagactggtatttttttcattgcaatctactttaaatttatggtcagttaagcacatgtatggaagattcgaacattgtctatagtttgaaaaatctatcaacaccttcactgctttcccaatttctttatccaaatacctgttcttccttaacaaatattatgttactgtataagaatctgaattagaagttttaagttaaaatgcattgttattcactacacaatgtttcaaaaataaattttcatttgaaaa

SEQ ID NO: 24935 - DNA, 448 bp, Homo sapiens
  source 1..448: mol_type = unassigned DNA
tatgcaggatttccaggaaaatggaaacatcattccctagaaacagttgaagttgacagacctagaggttgacaaaaggacacgacactagggaatttgcattgtcatgtttcgaaataccattccaaagacctgcaaataagatcagctttgagtgaactttgacagaagatgtttcgacagttttatctctggacatgtttagcttcagggatcatcctgggctctctctttgaaatctgcttgggccagtatgatgatgattgcaaactagctaggggaggaccaccagctaccatagttgctattgatgaagaaagtcggaatggtacaattctggtggacaacatgctgatcaaagggactgctggaggaccagaccccaccatagaactttctttaaaggataatgtggattactgggtgttgatggatcctgttaagcaaa

SEQ ID NO: 24936 - DNA, 11967 bp, Homo sapiens
  source 1..11967: mol_type = unassigned DNA
gacaggggctctgggcggccggggagcatgcccgcgcggctacgctgaatggcgcctcctctgcgacccctcgcccggctgcgaccgccggggatgctgctccgcgcgctcctgctcctgctgctgctcagtcctttgccaggagtgtggtgctttagcgaactgtcttttgtaaaagaaccacaggatgtaactgtcacaagaaaggacccagtcgttttagattgccaggctcacggagaagttcctattaaggtcacatggttgaaaaatggagcaaaaatgtctgaaaataaacggatcgaggttctttctaacggctctttatacatcagtgaggtggaaggcaggcgaggagagcagtccgatgaaggattttatcagtgcttggcaatgaacaaatatggagccattcttagtcaaaaagctcatcttgccttatcaactatttctgcatttgaagtccagccaatttccactgaggtccacgaaggtggagttgctcgatttgcatgcaagatttcatcccaccctcctgcagtcataacatgggagttcaatcggacaactctacctatgactatggacaggataactgccctaccaacaggagtattgcagatctatgatgtcagccaaagggattctggaaattatcgttgtattgctgccactgtagcccaccgacgtaaaagtatggaggcctcgctaactgtgattccagctaaggagtcaaaatccttccacacaccaacaattatagcaggtccacagaacataacaacatctcttcatcagactgtagttttggaatgcatggccacaggaaatcccaaaccaatcatttcttggagccgccttgatcacaaatccattgatgtctttaatactcgggtacttggaaatggtaatctcatgatatctgatgtcaggctacaacatgctggagtatatgtttgtcgggccactacccctggcacacgcaactttacagttgctatggcaactttaactgtattagctcctccttcatttgttgaatggccagaaagtttaacaaggcctcgagctggcactgctcgatttgtgtgtcaggcagaaggaatcccctctcccaagatgtcatggttgaaaaatggaaggaagatacattcgaatggtagaattaaaatgtacaacagtaaattggtaattaaccagattattcctgaagatgatgctatttatcagtgcatggctgagaatagccaaggatctattttatctagagccagactgactgtagtgatgtcagaagacagacccagtgctccctataatgtacatgctgaaaccatgtcaagctcagccattcttttagcctgggagaggccactttataattcagacaaagtcattgcctattctgtacactacatgaaagcagaaggtttaaataatgaagagtatcaagtagtcatcggaaatgacacaactcattatattattgatgacttagagcctgccagcaattatactttctacattgtagcatatatgccaatgggagccagccagatgtctgaccatgtgacacagaatactctagaggatgttcccctgagacctcctgaaattagtttgacaagtcgaagtcccactgatattctcatctcctggctgccaatcccagccaaatatcggcggggccaagtggtgctgtatcgcttgtctttccgcctaagtactgagaattcaatccaagttctggagctcccggggaccacgcatgagtaccttttggaaggcctgaaacctgacagtgtctacctggttcggattactgctgccaccagagtggggctgggagagtcatcagtatggacttcacataggacgcccaaagctacaagcgtgaaagcccctaagtctccagagttgcatttggagcctctgaactgtaccaccatttctgtgaggtggcagcaagatgtagaggacacagctgctattcagggctacaagctgtactacaaggaagaagggcagcaggagaatgggcccattttcttggataccaaggacctactctatactctcagtggcttagaccccagaagaaaatatcatgtgagactcctggcttacaacaacatagacgatggctatcaggcagatcagactgtcagcactccaggatgcgtgtctgttcgtgatcgcatggtccctcctccaccaccaccccaccatctctatgcgaaggctaacacctcatcttccatcttcctgcactggaggaggcctgcattcaccgctgcacaaatcattaactacaccatccgctgtaatcctgttggcctgcagaatgcttctttggttctgtaccttcaaacatcagaaactcacatgttggttcaaggtctagaaccaaacaccaaatacgaatttgccgttcgattacatgtggatcagctttccagtccttggagccctgtagtctaccattctactcttccagaagcaccagcaggcccaccagttggagtaaaagtgacattaatagaggatgacactgccctggtttcttggaaaccccctgatggcccagaaacagttgtgacccgctatactatcttatatgcatctaggaaggcctggattgcaggagagtggcaggtcttacaccgtgaaggggcaataaccatggctttgctagaaaacttggtagcaggaaatgtgtacattgtcaagatatctgcatccaatgaggtgggagaaggacccttttcaaattctgtggagctggcagtacttccaaaggaaacctctgaatcaaatcagaggcccaagcgtttagattctgctgatgccaaagtttattcaggatattaccatctggaccaaaaatcaatgactggcattgctgtaggtgttggcatagccttgacctgcatcctcatctgtgttctcatcttgatataccgaagtaaagccaggaaatcatctgcttccaagacggcacagaatggaactcaacagttacctcgtaccagtgcctccttagctagtggaaatgaggtaggaaagaacctggaaggagctgtaggaaatgaagaatctttaatgccaatgatcatgccaaacagcttcattgatgcaaagggaggaactgacctgataattaatagctatggtcctataattaaaaacaactctaagaaaaagtggttttttttccaagactcaaagaagatacaagttgagcagcctcaaagaagatttactccagcggtctgcttttaccagccaggcaccactgtattaatcagtgatgaagactcccctagctccccaggtcagacaaccagcttctcaagaccctttggtgttgcagctgatacagaacattcagcaaatagtgaaggcagccatgagactggggattctgggcggttttctcatgagtccaacgatgagatacatctgtcctcagttataagtaccacaccccccaacctctgattctttcactggcagtgattcaggtggagattccgcattgaggaagtgtgaagaccctgctgtgtcatctgttagtgagcagacttcctccttagttctgcagccgccatctgccatgctatgctttgataaaaatgattttccaatctagacggccatgctcaggtattctcaccattaaatctgttcgaaggacaatgaacagggaaccaaagccttttgtgaaaatcttaatatctttatggggtattttagctttttttgaatgtgttttgttttttatttttaaacttgtgtaatttgaatgtttcattgtcagcaatgtgaaagaacggtcgagatgtttgactggattataaaatatatcactggagcaaagggaagacttttgaaagcccctttgctgactatctacctcagtttgcctcccggcaaactctgaagacaactttgttacctcatttgttgttatagtttatctcagctacataaccaatgatacttcctagtagtattgtgttttcattgctgtacgtgtaatgtgtgtgatcaaaggagtcatataggtagatgagtaagaatgtttatctgaagctctgatttttttaaaaaaagaaactatgacatctgcatggtttggataagttcatacctctggctgtgaggaccgttaaaccactgagaagaggaaaagtggggctatttcttctaacgatgaccaaaacaagaaagtatatttcttttgagaacagaactattcaataccaggtagggatcattttgcttaaaaggcctttatgttttgggcattagagtctgagtgctttatctcctatatcccaaacctcaagctgcccagaactgtgccttttctaccttcccctttgcctgacggttggccaaaggctgcactgtctagtttgcaaagcatcctcaactttgccagtattagttgcaaaaccccatgcagaatatggatttttaaagaaaatgggttaaggtggttttttttctttttttaaatcccagtttggcttaaaggagtgaagacatttcatgaactattaagaatgaaggtaaatgcaacagtagacagtaaaatgaactcgaagttattatggtaacagtgcctttcagtataatgaaattctttgccttatacctttttaatattcatgaaattgtttaggaacaggagtacaaaaagttgccttaagagtttcttggattttatcagtaactattttgatgtatagtatcttaccaaggcattttttttaagtgcaggttttgtttagggataaatattcagagttctaccaccctacttgtgttttcttgaattctttagagaatatggtatctacttaatcttccttcagtgtcagtgctgtgaatgaggaatgctaactccaggagtgagttaatcctcttgcaggtttgaaatcagcaaattgtttactcagctacataacataggccttttctccgtcatgagacagttacctaggtgccgagcagtgggagaggataaagaactaaacgcgtgtagagaaggggtcccatatccttttaaaagtattttttcaaattttctggaagtgacttttgattctcattttaaaaggaatcataatgggtttacacttgaaatgctttgttcctagaggaggcagggtcatgttcactgatgttctaaaatcaaaggaatattagcagataatagtcccagcatcatctgctagtctaatgactgtagatataacatttttaatttttttaaatctgtaattttgtgccaaactggatgtgattaagactaaagttcaatgccagcaaccacttctgaactaaactcagagtcccccagttagttatctaagtacggaattcatcgcaaaacaaacaaaaaagcagagctttaggtgaacagtctgcagcaaggaaaaatgctgctcctgcctttatagctcctgttttatactacctccttttaaagttattctagtgttattttttttcctgtactcagggaacgttttgttacttttgagctgcctcatggaagcataggcagattgacagggtatagcgctttgtggttggtaagtagaagtatatagggccaacttttatcagtatctaaaattaagtacagtgagatcattttatttttaagctttcattaaaaggcaaacaaaatctaaagctgaaacatcatccatcatggttatggaagatgtgtctaggactacatgaattcgagtggttttaaatggctaaaaagacgagctaaagtccttgaggaaagtattttgtttgtttggtttttgatgaataggcttatagttacaatagaactttaggctataactatttgataattatttaacagtacattttttaccttttcattttgttcttatacggactttttcataataattctgttaccaaagaattttcagtagaaaataaaattttgattataattccccccaaattgaattaactagaagcatttatagatatgaaacttacacaagtagttactaacccaaaacaatagggtttatattgattgttgtagttaaatagattagtaatgttaactaccttattgttaccagagcatttaaaataagttgtaatactttctttaccagcagatcgttccaaagaatttcaggtatagttttttcttcagcaagtaaatcttcaactatacagtattaaagtatttttatattgttgaaactacttgttggagagaaaattttttttttttaccaaaaataaatactttggtctcattgaataagatatttagtaatacagcaaagacttctttttacttgaccaaatcaagcttctttgaagtcttaagtatgaaattgtaattaaaatgtgaagattttcactcatttttcatagtggtattacttcatggtattgtacttcaaaggggctaatatgcaaatggtaactattttcttttccaaagatgtatttgctgtaagtactgatacctgcatgtcatttttatgccaaatattacaagatactgctcatcagtattttcataccaaagaccattaagatgtataggttagcctgtaagtaagtaaagatgagcagatttgaaataaatttatttagaggccgatagagaatctagctttagtagcaaaaaatatcaaagggctaagtttacataattaaaagcaatacaattatattggtatttatcagtgtttttattcaagtactttttatcagcaaattaaaaagaaaaaaaccaaagatatttaaggttacctccgcatataggcaaatatagttgtacattaaactgttgtttcttgtttttatgttaaaccaaacatgtctcttcggaacacagtctgtatacaaataacatgcatgaggactttccatttaatctgtgattcagccacatgatgtttttgccaaatgatgtgatactttccaaagcaccttgagtgtgaaatgtcaacagaaatatcagcaagcttttatgttgcagagtattatggtacctctgaattagcctgtatagttctcttcctgctttaagcattacctggttagctcagacggcttgaggcagtcccttaataatagggatgcttttcatctctaaggatgtaagaggcaaacaaatcatgtcattctttaagtgggctatgctttgatagatgtgctctttaaaggtgtgagattggaatttagagttgttaaattgaaatgtttgcattgcaccaaaggagctcagttttcaaactttaatggaaccttgggtaaagggaaaaaatttttaatgaaatctggggttttatattttgattagcctaaaagtaaaaatacagctttatccattaagtgacttttaaaaatcagttttgccataccaaagaaattagattcttagtgtcacatgctatacttttgtctgtgcttgaaacgagcaatgccaacattgggaacaatgacagaggtttgcatcagtttgtcttggctttgttaaggacttctgccagaaatgtgctcgtggttgacaacccaggatcattgttcaagttcttatgcagacacctttgaaaacaattcagatcgtgtcacaagaatttggaattgaaaatatcatttattttttaatgcaagaatacccagatgtggtttcacttcagcagtagctatagtggttcacttatatacatttctgtttcactgaatgtaaattttgaatactgaatgtaaaaaaaaaactccagttatattgaaacagtcactaagactgcacatgtgttttgcagactttcttcctgaccatttgccacatgggtctctgataagattctgttggtttaatagtcaaaataatctttgcagtttgtgagcactgagtagcaggttctggagactaccatatacaaccagttgtctaattgtgatttttttattgatgtttagaagaatgtaaccgtagagttctgtgttaagttgatttatgctcaggacataagatcacaggctaatgcaatgtgtatgtttcaggctttaatcttctcaatttccctttttaagccgttgatggtgtttaagattaacatgacagtcttgtatttttaccagatactgtattatttttcctattgctgctgtaacacattaccatgaaggtggtggcttaaaataacacaaatttttcttaagttctgcagatcagaagtctaacacaggtctccctgggacaaaatcaaggcgcttgcagggctgtttctttttgaggctttagggaaaaatctatttccttttctagttttttaaggctgggaacccctccttccatcttcaaagccagccatgtagcatctctctgaagctccttccgttatcatttctctttgtccaaccccagctgatacaggttatctaggtttaaggattccagtgatcacattgagcccacctaaataatccaggataatctccccaactgaagttcctcaacttaatcacatctacagagttccttttgctatgtttggtaacatattcactggttccagggatttgggcatggacttctgtaggtggccagtattttgcccacaacaggtacattctttctgtggaattctgatccctgtaaaatgtctgtagcattaaagagattggaaatctgaggtcatgtgccccttggggatctttaaagattaaaagcatgaaaactttgacttgtagcctaccaaaattatacactaaactttctctccaaaatacttgtgaaacaatttatctttaaagtttctgaatatgtgcttcataaaataacatctcatgtttatcagcaagtgtcctaaatatttgcgtctaactttatggaatttattcagaaaaagaattgaaaactcttcttatagttaccctttctccttttctcttcagtggttatgttgctggggaagagttgggggaagacctcaaaacacaggaactcagagtgatgaacaggaccatgctcaagtttattctttgttttcttttaatgacatattcacaacattcacaactttctgcctttaaatctggttcctctcttcagcttcaccaagccactgaatgcttttcagttttattaaccctcacattccccatccttctcagcaagagcctctccttatgccatcagcatgtatatacatttcctaggaaatttgatctttcttgtcattcttttttggttccaatcggccttttcctggttctcaaagctctagtttcttctaatttctggatcatcgcaagtctggccctctttgaactttaaaacataatgtctaattccaccccaattttcagcatttcttcaactaaatcgataaagctgtctccattatgagaaaggccagaataatactccgagtaagcataagaaagctggtcattttacaacttctcccgactctaggaagtaatatgatgccatttgttgagcatctacagtgtgccaagcacatggttcatctctgcaaactgctgctacattctgtaaagcaagtattatccgcattttagggattaggaacagcttcctgatctcttgccaaaagtcacagctagtgagtggtttaggcaagatacaaaccctagttagttaatccttactcagaagtgtataggactatgatacattgtctcagcttaaaaaaaaaaaaaaaaaaaaaaggtatttaatcacccagggtcatagtgccttccatagtgtgaccagatacaactgttttttccttgtatccacaaaagccaggttgtgtcagaacaacctttctacagagtaataaccaatcgaaaaagagaagactaccttatttaaatccacttattcacaggagggattaaggcggctgtaactcatcccttatcatctcctaatttctctcctccaaaaccttccatttatctcagctaaaattgtgtctgaaggctgtttgtacttagagttacattacaaataaggtaggcatggtttctagagtccttttctagtcaagcatttccttattcgacaatgtcttcagaattgcattttatcttttgtaattttctgtagctcccatattccaaacaggaattcattgacttgaaaaagtcaggtgtgtaaacagtaatcctttcttgttaggtctgaagagttcatgattttttatgaatataaactaatttattatttgcattaatgtaggagacagcaaagttaacggagagtcataaaacagaacaagtataagttaggctttggagcacctaagttctaatcttgacaattttgagaatcgtttggtacaaaaattcttaaactgtttctgtgccttctccatccatgaaatgaggataatttttttgtgcaaaatgaaacaatagtactttgaaaacttaagagaaaattcaagtgtaaataatcataatctgaaactcatttgtatgaggctgtgaaagattttacagactctttcttttcaagtcagcctttgcaattatattttgcctttgttgaaatgaaaaatgtttgcatctcccgtacgcatacacaaaaccaatagaagaaagtggttggtaaaagatatagctgaaatggaaacactcatatgttaggtggataaaatcataagagaaaatgggaattgactgtactttcaaagtactaaatttgaagtcatcttactccaatttaagtcatatatatatatatatatatatatatatatatatatatatatatatatatattggcttttaaagagttaaagagagaatcagatctgtccagcaggatagatgggtgaggagaaaagtacatatttaggatttttctctaaaagatctttttcaagattatggagtattttaatatttctgcaaactattccaaatgaatgcattttatatagggcaacacatactggcacctgattctggtttattcgagttcatatgtagggtttgttgggaagaattatatgattggcttctttttttagaggaaatattttcccttttttcttatccatatactattctgaacagctttgcagatttccttaagttcatagcttgtaagtagttcatggtatatagacatagtcttgacttacaactgaaaaaaaatttatgttacagaagtttattttttctatggaactgtctttaaaaacaaaaatattacaaatcttgaccttgaaatattctgtttcctgttatcacattctggatatctattttgtttgcaaatgaaaattattactgatgattagcaacttgagcctgttaataggaaattgcaaagcctgaatacacacacattgccttagcctatcagtagagtagaggacatatgttaagaaaatgtgtctgcttgttgctgttgttggacaaaattttatgtctgtgtgtatgatttttttttttctattttcttcaaagatgtgaattaaatgaaagtgtgggagccagttaaattattttgtattatgggtgttctggatcctttcactccgtataccattttcttgtaagggcagcatttgtagacttgctaatggactgtagagctgagctatattaattttatacttgactcaggggatcagttctgtgaatgccattgcacgaagaaagcaaatgtttgccttgattttgaatgtatctttttaatgtcttcttaaaacatatttgtttaataatgtagatttgtttttttttttctagtatcatagtaaatattgcttagtacttgcccccaccccactgggtagtttatatactaccctataggtcatgccaaaaatgaataaaagtttaaatgccaaaatgtttatgaaactgctgtctaaatactgattgattgcacaatttaaataaaagctttccttagttaaaaaa

SEQ ID NO: 24937 - DNA, 1686 bp, Homo sapiens
  source 1..1686: mol_type = unassigned DNA
gccgcgagaacagagtggacggagcgtaggagagaccgaaaaggctgggggtgggagtagcggatttgaagcacttgttggcctacagaggtgtggcaagcagagcacctcagaactcaggcgtactgcccgccgcccgagccctgcgagggccgatagcgagggtgtggcccttatctgcacccagcagagcgccggcggggtttccgcatgggccggaccgtggtcgtgctgggcggaggcatcagcggcttggccgccagttaccacctgagccgggccccctgcccccctaaggtggtcctagtggagagcagtgagcgtctgggaggctggattcgctccgttcgaggccctaatggtgctatctttgagcttggacctcggggaattaggccagcgggagccctaggggcccggaccttgctcctggtttctgagcttggcttggattcagaagtgctgcctgtccggggagaccacccagctgcccagaacaggttcctctacgtgggcggtgccctgcatgccctacccactggcctcagggggctactccgcccttcaccccccttctccaaacctctgttttgggctgggctgagggagctgaccaagccccggggcaaagagcctgatgagactgtgcacagttttgcccagcgccgccttggacctgaggtggcgtctctagccatggacagtctctgccgtggagtgtttgcaggcaacagccgtgagctcagcatcaggtcctgctttcccagtctcttccaagctgagcaaacccatcgttccatattactgggcctgctgctgggggcagggcggaccccacagccagactcagcactcattcgccaggccttggctgagcgctggagccagtggtcacttcgtggaggtctagagatgttgcctcaggcccttgaaacccacctgactagtaggggggtcagtgttctcagaggccagccggtctgtgggctcagcctccaggcagaagggcgctggaaggtatctctaagggacagcagtctggaggctgaccacgttattagtgccattccagcttcagtgctcagtgagctgctccctgctgaggctgcccctctggctcgtgccctgagtgccatcactgcagtgtctgtagctgtggtgaatctgcagtaccaaggagcccatctgcctgtccagggatttggacatttggtgccatcttcagaagatccaggagtcctgggaatcgtgtatgactcagttgctttccctgagcaggacgggagcccccctggcctcagagtgactgtgatgctgggaggttcctggttacagacactggaggctagtggctgtgtcttatctcaggagctgtttcaacagcgggcccaggaagcagctgctacacaattaggactgaaggagatgccgagccactgcttggtccatctacacaagaactgcattccccagtatacactaggtcactggcaaaaactagagtcagctaggcaattcctgactgctcacaggttgcccctgactctggctggagcctcctatgagggagttgctgttaatgactgtatagagagtgggcgccaggcagcagtcagtgtcctgggcacagaacctaacagctgatccccaactctcattcatgaaaataaaaattgctggagcttg

SEQ ID NO: 24938 - DNA, 1740 bp, Homo sapiens
  source 1..1740: mol_type = unassigned DNA
gagaacagagtggacggagcgtaggagagaccgaaaaggctgggggtgggagtagcggatttgaagcacttgttggcctacagaggtgtggcaagcagagcacctcagaactcaggcgtactgcccgccgcccgagccctgcgagggccgatagcgagggtgtggcccttatctgcacccagcagagcgccggcggggtacggtcttaggacctcgatctccttctccctcattttctctcatccctacctattgtgggtttccgcatgggccggaccgtggtcgtgctgggcggaggcatcagcggcttggccgccagttaccacctgagccgggccccctgcccccctaaggtggtcctagtggagagcagtgagcgtctgggaggctggattcgctccgttcgaggccctaatggtgctatctttgagcttggacctcggggaattaggccagcgggagccctaggggcccggaccttgctcctggtttctgagcttggcttggattcagaagtgctgcctgtccggggagaccacccagctgcccagaacaggttcctctacgtgggcggtgccctgcatgccctacccactggcctcagggggctactccgcccttcaccccccttctccaaacctctgttttgggctgggctgagggagctgaccaagccccggggcaaagagcctgatgagactgtgcacagttttgcccagcgccgccttggacctgaggtggcgtctctagccatggacagtctctgccgtggagtgtttgcaggcaacagccgtgagctcagcatcaggtcctgctttcccagtctcttccaagctgagcaaacccatcgttccatattactgggcctgctgctgggggcagggcggaccccacagccagactcagcactcattcgccaggccttggctgagcgctggagccagtggtcacttcgtggaggtctagagatgttgcctcaggcccttgaaacccacctgactagtaggggggtcagtgttctcagaggccagccggtctgtgggctcagcctccaggcagaagggcgctggaaggtatctctaagggacagcagtctggaggctgaccacgttattagtgccattccagcttcagtgctcagtgagctgctccctgctgaggctgcccctctggctcgtgccctgagtgccatcactgcagtgtctgtagctgtggtgaatctgcagtaccaaggagcccatctgcctgtccagggatttggacatttggtgccatcttcagaagatccaggagtcctgggaatcgtgtatgactcagttgctttccctgagcaggacgggagcccccctggcctcagagtgactgtgatgctgggaggttcctggttacagacactggaggctagtggctgtgtcttatctcaggagctgtttcaacagcgggcccaggaagcagctgctacacaattaggactgaaggagatgccgagccactgcttggtccatctacacaagaactgcattccccagtatacactaggtcactggcaaaaactagagtcagctaggcaattcctgactgctcacaggttgcccctgactctggctggagcctcctatgagggagttgctgttaatgactgtatagagagtgggcgccaggcagcagtcagtgtcctgggcacagaacctaacagctgatccccaactctcattcatgaaaataaaaattgctggagct

SEQ ID NO: 24939 - DNA, 922 bp, Homo sapiens
  source 1..922: mol_type = unassigned DNA
agagcacctcagaactcaggcgtactgcccgccgcccgagccctgcgagggccgatagcgagggtgtggcccttatctgcacccagcagagcgccggcggggtacggtcttaggacctcgatctccttctccctcattttctctcatccctacctattgtgggtttccgcatgggccggaccgtggtcgtgctgggcggaggcatcagcggcttggccgccagttaccacctgagccgggccccctgcccccctaaggtggtcctagtggagagcagtgagcgtctgggaggctggattcgctccgttcgaggccctaatggtgctatctttgagcttggacctcggggaattaggccagcgggagccctaggggcccggaccttgctcctgggatttggacatttggtgccatcttcagaagatccaggagtcctgggaatcgtgtatgactcagttgctttccctgagcaggacgggagcccccctggcctcagagtgactgtgatgctgggaggttcctggttacagacactggaggctagtggctgtgtcttatctcaggagctgtttcaacagcgggcccaggaagcagctgctacacaattaggactgaaggagatgccgagccactgcttggtccatctacacaagaccaagaaccagttgaagtggcgacagagtcatgacaggaccgtggagtggcctaaggagtacccagggcgaagtaggaaacaggctccttctattcttcatgtgcctgggtgccaactcctcaggtgcagggaccgtgaccacctgggggctgtaagcgaacagccccggagctcggcggagagtagggtgggggtggcgtcctctaccttttctacctttcccctcttctagcgggggtggggaggagggttactgctgaagagaaa

SEQ ID NO: 24940 - DNA, 1576 bp, Homo sapiens
  source 1..1576: mol_type = unassigned DNA
acttgttggcctacagaggtgtggcaagcagagcacctcagaactcaggcgtactgcccgccgcccgagccctgcgagggccgatagcgagggtgtggcccttatctgcacccagcagagcgccggcggggtacggtcttaggacctcgatctccttctccctcattttctctcatccctacctattgtgggtttccgcatgggccggaccgtggtcgtgctgggcggaggcatcagcggcttggccgccagttaccacctgagccgggccccctgcccccctaaggtggtcctagtggagagcagtgagcgtctgggaggctggattcgctccgttcgaggccctaatggtgctatctttgagcttggacctcggggaattaggccagcgggagccctaggggcccggaccttgctcctggcatgtggagagcaggtttctgagcttggcttggattcagaagtgctgcctgtccggggagaccacccagctgcccagaacaggttcctctacgtgggcggtgccctgcatgccctacccactggcctcagtcctagtctcacccttaaggtggcgtctctagccatggacagtctctgccgtggagtgtttgcaggcaacagccgtgagctcagcatcaggtcctgctttcccagtctcttccaagctgagcaaacccatcgttccatattactgggcctgctgctgggggcagggcggaccccacagccagactcagcactcattcgccaggccttggctgagcgctggagccagtggtcacttcgtggaggtctagagatgttgcctcaggcccttgaaacccacctgactagtaggggggtcagtgttctcagaggccagccggtctgtgggctcagcctccaggcagaagggcgctggaaggtatctctaagggacagcagtctggaggctgaccacgttattagtgccattccagcttcagtgctcagtgagctgctccctgctgaggctgcccctctggctcgtgccctgagtgccatcactgcagtgtctgtagctgtggtgaatctgcagtaccaaggagcccatctgcctgtccagggatttggacatttggtgccatcttcagaagatccaggagtcctgggaatcgtgtatgactcagttgctttccctgagcaggacgggagcccccctggcctcagagtgactgtgatgctgggaggttcctggttacagacactggaggctagtggctgtgtcttatctcaggagctgtttcaacagcgggcccaggaagcagctgctacacaattaggactgaaggagatgccgagccactgcttggtccatctacacaagaactgcattccccagtatacactaggtcactggcaaaaactagagtcagctaggcaattcctgactgctcacaggttgcccctgactctggctggagcctcctatgagggagttgctgttaatgactgtatagagagtgggcgccaggcagcagtcagtgtcctgggcacagaacctaacagctgatccccaactctcattcatgaaaataaaaattgctggagcttg

SEQ ID NO: 24941 - DNA, 483 bp, Homo sapiens
  source 1..483: mol_type = unassigned DNA
atggacattctgaaatcagagatccttcggaagcggcagctggtggaggacaggaacctgctgagtgagagtatgtgtgcaaatgatgcttatcttcagatggccattggaaatgcgccttggcccatcggtgtcactatggttggtatccatgccagaactggcagagaaaagattttttccaagcatgttgcacatgttttaaatgacgaaactcagcggaaatatattcagggattgaagaggttaatgaccatttgccagaaacactttcctacagacccatccaaatgtgtggagtacaatgcactgtgagatctgtgtatggtgtgttaataacaataagaaacttagggaagcaggctgtggacttctggaattaccaacaggaatgaggaaagaagaaaactggagtttccagtctctgagttctacctgatgtaactcttgattggttttaagaactttgttggccttcatttc

SEQ ID NO: 24942 - DNA, 788 bp, Homo sapiens
  source 1..788: mol_type = unassigned DNA
tgttctcaggtgtttgggcttgttgttccgtatactcagtgggttcgcggccgccggcccagtgaggctgggttcgaggagctggagcgggaaactggagcttaaattctggcggcgagatggacattctgaaatcagagatccttcggaagcggcagctggtggaggacaggaacctgctggtgaggaactcgattgaggaccagaggtccagtcacaagtaacaagccactagccaggtgcttcaggaagaccgccctcttgcctctgtggaatccagtgaggatgatcagaacgttccccggggaaaataaaaaatatttcaagcgtagtgagctcgccaaaaaagaagaggaagcatattttgaaagatgtggctacaagatacagccaaaagaggaggaccagaaaccattaacttcatcgaatccagtgttagaacttgaactggcagaggaaaaattacctatgacgctttctaggcaagaggtcatcagaagattgagagaaagaggagaaccaatcagactatttggagagactgattatgatgcttttcaacgtttaaggaaaatagagatcctcacaccagaagttaacaagggattgaggaatgatttgaaagcagccttggataagattgatcagcagtacctcaatgaaatcgtcggcggtcaggagcctggagaggaagacacacagaatgatctgaaagttcatgaggaaaacaccacaattgaagagttagaggcgcttggagagtccttagggaaaggcgatgatcataa

SEQ ID NO: 24943 - DNA, 747 bp, Homo sapiens
  source 1..747: mol_type = unassigned DNA
atgatcagaacgttccccggggaaaataaaaaatatttcaagcgtagtgagctcgccaaaaaagaagaggaagcatattttgaaagatgtggctacaagcctataaatgagaagccatctggagagatacagccaaaagaggaggaccagaaaccattaacttcatcgaatccagtgttagaacttgaactggcagaggaaaaattacctatgacgctttctaggcaagaggtcatcagaagattgagagaaagaggagaaccaatcagactatttggagagactgattatgatgcttttcaacgtttaaggaaaatagagatcctcacaccagaagttaacaagggattgaggaatgatttgaaagcagccttggataagattgatcagcagtacctcaatgaaatcgtcggcggtcaggagcctggagaggaagacacacagaatgatctgaaagttcatgaggaaaacaccacaattgaagagttagaggcgcttggagagtccttagggaaaggcgatgatcataaagacatggacatcatcaccaaattcctgaagtttcttcttggcgtttgggctaaagaattgaatgccagagaagattatgtgaaacgcagtgtgcagggtaaactgaacagtgcgacccagaaacagaccgagtcctacctaagaccactttttagaaagctacggaaaaggaatcttcctgctgatattaaagaatcaataacggatattattaaa

SEQ ID NO: 24944 - DNA, 1717 bp, Homo sapiens
  source 1..1717: mol_type = unassigned DNA
ctctctcatcccagcttccgccggaagcggctcctgtcagttgttctcaggtgtttgggcttgttgttccgtatactcagtgggttcgcggccgccggcccagtgaggctgggttcgaggagctggagcgggaaactggagcttaaattctggcggcgagatggacattctgaaatcagagatccttcggaagcggcagctggtggaggacaggaacctgctggtggaaaataaaaaatatttcaagcgtagtgagctcgccaaaaaagaagaggaagcatattttgaaagatgtggctacaagatacagccaaaagaggaggaccagaaaccattaacttcatcgaatccagtgttagaacttgaactggcagaggaaaaattacctatgacgctttctaggcaagaggtcatcagaagattgagagaaagaggagaaccaatcagactatttggagagactgattatgatgcttttcaacgtttaaggaaaatagagatcctcacaccagaagttaacaagggattgaggaatgatttgaaagcagccttggataagattgatcagcagtacctcaatgaaatcgtcggcggtcaggagcctggagaggaagacacacagaatgatctgaaagttcatgaggaaaacaccacaattgaagagttagaggcgcttggagagtccttagggaaaggcgatgatcataaagacatggacatcatcaccaaattcctgaagtttcttcttggcgtttgggctaaagaattgaatgccagagaagattatgtgaaacgcagtgtgcagggtaaactgaacagtgcgacccagaaacagaccgagtcctacctaagaccactttttagaaagctacggaaaaggaatcttcctgctgatattaaagaatcaataacggatattattaaattcatgttgcagagagaatacgtgaaggcaaatgatgcttatcttcagatggccattggaaatgcgccttggcccatcggtgtcactatggttggtatccatgccagaactggcagagaaaagattttttccaagcatgttgcacatgttttaaatgacgaaactcagcggaaatatattcagggattgaagaggttaatgaccatttgccagaaacactttcctacagacccatccaaatgtgtggagtacaatgcactgtgagatctgtgtatggtgtgttaataacaataagaaacttagggaagcaggctgtggacttctggaattaccaacaggaatgaggaaagaagaaaactggagtttccagtctctgagttctacctgatgtaactcttgattggttttaagaactttgttggccttcatttcatatctgactgcaagctgatttttctttcttgctttcattttaattagtccaaaattaagttttaaagatttttcctcacaatttaaatccatagacaacagaagggggtttaaaatgacctttttttcagttgacccgaaagttgtggttagatgattaaaaagaaacatttgaggatggacttaattatttcagtaaaatattataatttgcctattgtcttttatgtaatatttatataaaatatttttatatatttcaaaaacatgggaccattgaatgaaactttatagtccttaaatgttgctgaacttttgctgtcttgcaatagaatttgaatgtaaatattattactggta

SEQ ID NO: 24945 - DNA, 1062 bp, Homo sapiens
  source 1..1062: mol_type = unassigned DNA
agcttccgccggaagcggctcctgtcagttgttctcaggtgtttgggcttgttgttccgtatactcagtgggttcgcggccgccggcccagtgaggctgggttcgaggagctggagcgggaaactggagcttaaattctggcggcgagatggacattctgaaatcagagatccttcggaagcggcagctggtggaggacaggaacctgctggtgaggaactcgattgaggaccagaggtccagtcacaagtaacaagccactagccaggtgcttcaggaagaccgccctcttgcctctgtggaatccagtgaggatgatcagaacgttccccggggaaaataaaaaatatttcaagcgtagtgagctcgccaaaaaagaagaggaagcatattttgaaagatgtggctacaagcctataaatgagaagccatctggagagatacagccaaaagaggaggaccagaaaccattaacttcatcgaatccagtgttagaacttgaactggcagaggaaaaattacctatgacgctttctaggcaagaggtcatcagaagattgagagaaagaggagaaccaatcagactatttggagagactgattatgatgcttttcaacgtttaaggaaaatagagatcctcacaccagaagttaacaagggattgaggaatgatttgaaagcagccttggataagattgatcagcagtacctcaatgaaatcgtcggcggtcaggagcctggagaggaagacacacagaatgatctgaaagttcatgaggaaaacaccacaattgaagagttagaggcgcttggagagtccttagggaaaggcgatgatcataaagacatggacatcatcaccaaattcctgaagtttcttcttggcgtttgggctaaagaattgaatgccagagaagattatgtgaaacgcagtgtgcagggtaaactgaacagtgcgacccagaaacagaccgagtcctacctaagaccactttttagaaagctacggaaaaggaatcttcctgctgatattaaagaatcaataacggatattattaaat

SEQ ID NO: 24946 - DNA, 2157 bp, Homo sapiens
  source 1..2157: mol_type = unassigned DNA
ggcaatttccgttaggtgctgaaggctgtggcgcgcggctgtccccattcccacgtgaagcgctacgctagcatcgctcggctggcggctcccagctcgccgcggagcagtcccggcagcagcgggggaccggaagtggctcgcggaggctcagaagctagtcccggagcccggcgtgtggcgcctcggagcacggtgacggcgccatgtccctaatctgctccatctctaacgaagtgccggagcacccatgtgtatcccctgtctctaatcatgtttatgagcggcggctcatcgagaagtacattgcggagaatggtaccgaccccatcaacaaccagcctctctccgaggagcagctcatcgacatcaaagttgctcacccaatccggcccaagcctccctcagccaccagcatcccggccattctgaaagctttgcaggatgagtgggatgcagtcatgctgcacagcttcactctgcgccagcagctgcagacaacccgccaagagctgtcacacgctctgtaccagcacgatgccgcctgccgtgtcattgcccgtctcaccaaggaagtcactgctgcccgagaagctctggctaccctgaaaccacaggctggcctcattgtgccccaggctgtgccaagttcccaaccaagtgttgtgggtgcgggtgagccaatggatttgggtgagctggtgggaatgaccccagagattattcagaagcttcaagacaaagccactgtgctaaccacggagcgcaagaagagagggaagactgtgcctgaggagctggtgaagccagaagagctcagcaaataccggcaggtggcatcccacgtggggttgcacagtgccagcattcctgggatcctggccctggacctctgcccgtccgacaccaacaagatcctcactggtggggcggataaaaatgtcgttgtgtttgacaaaagttctgaacaaatcctggctaccctcaaaggccataccaagaaggtcaccagcgtggtgtttcacccttcccaggacctggtgttttctgcttcccccgatgccactatcaggatttggtcggtccccaatgcctcttgtgtacaggtggttcgggcccatgagagtgctgtgacaggcctcagccttcatgccactggcgactatctcctgagctcctccgatgatcagtactgggctttctctgacatccagacagggcgtgtgctcaccaaggtgacagatgagacctccggctgctctctcacctgtgcacagttccaccctgacggactcatctttggaacaggaaccatggactctcagatcaagatctgggacttgaaggaacgtactaatgtggccaacttccctggccactcgggccccatcactagcatcgccttctctgagaatggttactacctggctacagcggctgatgactcctctgtcaagctctgggatctgcgcaagcttaagaactttaagactttgcagctggataacaactttgaggtaaagtcactgatctttgaccagagtggtacctacctggctcttgggggcacggatgtccagatctacatctgcaaacaatggacggagattcttcactttacagagcatagcggcctgaccacaggggtggccttcgggcatcacgccaagttcatcgcttcaacaggcatggacagaagcctcaagttctacagcctgtaggccctggcccttctgatggaagctgggcctcatctcagtagaggggtagaattagggtttgggggggggggtggggggaatctatggggggagggggctctgtggggtgggacattcacatcatttcactctggtctgagtggtggcctgagaaccatggtggcatggaccaccctcatccatgcaactccaggccccatgggaacggatgtggaaggaagaactgtcaccctcttaaggcccagggtcggagcccagggcctctcccttcctgtcgttcaatggacgtggtggtggctgttccacacccattttgttgcagttcctgtgagacaggagaggctgagccaagggaactgtgaaggggatgggcaggagggcttgtgcagggttttgtaagcagtgatctagtttcattaaaaaaagaaaacaataa

SEQ ID NO: 24947 - DNA, 1130 bp, Homo sapiens
  source 1..1130: mol_type = unassigned DNA
agaaacagtggtgcgcggagaggagaggcctcgggatgtctctggcagatgagctcttagctgatctcgaagaggcagcagaagaggaggaaggaggaagctatggggaggaagaagaggagccagcgatcgaggatgtgcaggaggagacacagctggatctttccggggattcagtcaagaccatcgccaagctatgggatagtaagatgtttgctgagattatgatgaagattgaggagtatatcagcaagcaagccaaagcttcagaagtgatgggaccagtggaggccgcgcctgaataccgcgtcatcgtggatgccaacaacctgaccgtggagatcgaaaacgagctgaacatcatccataagttcatccgggataagtactcaaagagattccctgaactggagtccttggtccccaatgcactggattacatccgcacggtcaaggagctgggcaacagcctggacaagtgcaagaacaatgagaacctgcagcagatcctcaccaatgccaccatcatggtcgtcagcgtcaccgcctccaccacccaggggcagcagctgtcggaggaggagctggagcggctggaggaggcctgcgacatggcgctggagctgaacgcctccaagcaccgcatctacgagtatgtggagtcccggatgtccttcatcgcacccaacctgtccatcattatcggggcatccacggccgccaagatcatgggtgtggccggcggcctgaccaacctctccaagatgcccgcctgcaacatcatgctgctcggggcccagcgcaagacgctgtcgggcttctcgtctacctcagtgctgccccacaccggctacatctaccacagtgacatcgtgcagtccctgccaccggatctgcggcggaaagcggcccggctggtggccgccaagtgcacactggcagcccgtgtggacagtttccacgagagcacagaagggaaggtgggctacgaactgaaggatgagatcgagcgcaaattcgacaagtggcagagaagaaggtggctgaggccaaccagaagtatttctccagcatggctgagttcctcaaggtcaagggcgagaagagtggccttatgtccacctgaatga

SEQ ID NO: 24948 - DNA, 2126 bp, Homo sapiens
  source 1..2126: mol_type = unassigned DNA
cgaatccctgcttaaaggccttgctttcttgtctaacgccgcaaccagtcctctgagttgccaacgtctttcttcttgtctcgacgccccgtcgtccggccacagcgattctctgcttagcaggatcggtccacagcgggacgtgagtccctttcctcctcgcggcttaccgcctctctccgcctagtgccaggtgctaataaagttgttgtttcaaatgcggccaggaacatcgcgagcggggaccaatcagagagtagctttgcctctataacggcgcgagagtgagacgtcatcggtgagcgactaacgctagaaacagtggtgcgcggagaggagaggcctcgggatgtctctggcagatgagctcttagctgatctcgaagaggcagcagaagaggaggaaggaggaagctatggggaggaagaagaggagccagcgatcgaggatgtgcaggaggagacacagctggatctttccggggattcagtcaagaccatcgccaagctatgggatagtaagatgtttgctgagattatgatgaagattgaggagtatatcagcaagcaagccaaagcttcagaagtgatgggaccagtggaggccgcgcctgaataccgcgtcatcgtggatgccaacaacctgaccgtggagatcgaaaacgagctgaacatcatccataagttcatccgggataagtactcaaagagattccctgaactggagtccttggtccccaatgcactggattacatccgcacggtcaaggagctgggcaacagcctggacaagtgcaagaacaatgagaacctgcagcagatcctcaccaatgccaccatcatggtcgtcagcgtcaccgcctccaccacccaggggcagcagctgtcggaggaggagctggagcggctggaggaggcctgcgacatggcgctggagctgaacgcctccaagcaccgcatctacgagtatgtggagtcccggatgtccttcatcgcacccaacctgtccatcattatcggggcatccacggccgccaagatcatgggtgtggccggcggcctgaccaacctctccaagatgcccgcctgcaacatcatgctgctcggggcccagcgcaagacgctgtcgggcttctcgtctacctcagtgctgccccacaccggctacatctaccacagtgacatcgtgcagtccctgccaccggatctgcggcggaaagcggcccggctggtggccgccaagtgcacactggcagcccgtgtggacagtttccacgagagcacagaagggaaggtgggctacgaactgaaggatgagatcgagcgcaaattcgacaagtggcaggagccgccgcctgtgaagcaggtgaagccgctgcctgcgcccctggatggacagcggaagaagcgaggcggccgcaggtaccgcaagatgaaggagcggctggggctgacggagatccggaagcaggccaaccgtatgagcttcggagagatcgaggaggacgcctaccaggaggacctgggattcagcctgggccacctgggcaagtcgggcagtgggcgtgtgcggcagacacaggtaaacgaggccaccaaggccaggatctccaagacgctgcagcggaccctgcagaagcagagcgtcgtatatggcgggaagtccaccatccgcgaccgctcctcgggcacggcctccagcgtggccttcaccccactccagggcctggagattgtgaacccacaggcggcagagaagaaggtggctgaggccaaccagaagtatttctccagcatggctgagttcctcaaggtcaagggcgagaagagtggccttatgtccacctgaatgactgcgtgtgtccaaggtggcttcccactgaagggacacagaggtccagtccttctgaagggctaggatcgggttctggcagggagaacctgccctgccactggccccattgctgggactgcccagggaggaggccttggaagagtccggcctggcctcccccaggaccgagatcaccgcccagtatgggctagagcaggtcttcatcatgccttgtcttttttaactgagaaaggagattttttgaaaagagtacaattaaaaggacattgtc

SEQ ID NO: 24949 - DNA, 1744 bp, Homo sapiens
  source 1..1744: mol_type = unassigned DNA
agaaacagtggtgcgcggagaggagaggcctcgggatgtctctggcagatgagctcttagctgatctcgaagaggcagcagaagaggaggaaggaggaagctatggggaggaagaagaggagccagcgatcgaggatgtgcaggaggagacacagctggatctttccggggattcagtcaagaccatcgccaagctatgggatagtaagatgtttgctgagattatgatgaagattgaggagtatatcagcaagcaagccaaagcttcagaagtgatgggaccagtggaggccgcgcctgaataccgcgtcatcgtggatgccaacaacctgaccgtggagatcgaaaacgagctgaacatcatccataagttcatccgggataagtactcaaagagattccctgaactggagtccttggtccccaatgcactggattacatccgcacggtcaaggagctgggcaacagcctggacaagtgcaagaacaatgagaacctgcagcagatcctcaccaatgccaccatcatggtcgtcagcgtcaccgcctccaccacccaggggcagcagctgtcggaggaggagctggagcggctggaggaggcctgcgacatggcgctggagctgaacgcctccaagcaccgcatctacgagtatgtggagtcccggatgtccttcatcgcacccaacctgtccatcattatcggggcatccacggccgccaagatcatgggtgtggccggcggcctgaccaacctctccaagatgcccgcctgcaacatcatgctgctcggggcccagcgcaagacgctgtcgggcttctcgtctacctcagtgctgccccacaccggctacatctaccacagtgacatcgtgcagtccctgccaccggatctgcggcggaaagcggcccggctggtggccgccaagtgcacactggcagcccgtgtggacagtttccacgagagcacagaagggaaggtgggctacgaactgaaggatgagatcgagcgcaaattcgacaagtggcaggagccgccgcctgtgaagcaggtgaagccgctgcctgcgcccctggatggacagcggaagaagcgaggcggccgcaggtaccgcaagatgaaggagcggctggggctgacggagatccggaagcaggccaaccgtatgagcttcggagagatcgaggaggacgcctaccaggaggacctgggattcagcctgggccacctggacgctgcagcggaccctgcagaagcagagcgtcgtatatggcgggaagtccaccatccgcgaccgctcctcgggcacggcctccagcgtggccttcaccccactccagggcctggagattgtgaacccacaggcggcagagaagaaggtggctgaggccaaccagaagtatttctccagcatggctgagttcctcaaggtcaagggcgagaagagtggccttatgtccacctgaatgactgcgtgtgtccaaggtggcttcccactgaagggacacagaggtccagtccttctgaagggctaggatcgggttctggcagggagaacctgccctgccactggccccattgctgggactgcccagggaggaggccttggaagagtccggcctggcctcccccaggaccgagatcaccgcccagtatgggctagagcaggtcttcatcatgccttgtcttttttaactgagaaaggagattttttgaaaagagtacaattaaaaggacattgtc

SEQ ID NO: 24950 - DNA, 886 bp, Homo sapiens
  source 1..886: mol_type = unassigned DNA
tggtgcgcggagaggagagtttttagggaacgctgctgtccctccccaggcctcgggatgtctctggcagatgagctcttagctgatctcgaagaggcagcagaagaggaggaaggaggaagctatggggaggaagaagaggagccagcgatcgaggatgtgcaggaggagacacagctggatctttccggggattcagtcaagaccatcgccaagctatgggatagtaagatgtttgctgagattatgatgaagattgaggagtatatcagcaagcaagccaaagcttcagaagtgatgggaccagtggaggccgcgcctgaataccgcgtcatcgtggatgccaacaacctgaccgtggagatcgaaaacgagctgaacatcatccataagttcatccgggataagtactcaaagagattccctgaactggagtccttggtccccaatgcactggattacatccgcacggtcaaggagctgggcaacagcctggacaagtgcaagaacaatgagaacctgcagcagatcctcaccaatgccaccatcatggtcgtcagcgtcaccgcctccaccacccaggggcagcagctgtcggaggaggagctggagcggctggaggaggcctgcgacatggcgctggagctgaacgcctccaagcaccgcatctacgagtatgtggagtcccggatgtccttcatcgcacccaacctgtccatcattatcggggcatccacggccgccaagatcatgggtgtggccggcggcctgaccaacctctccaagatgcccgcctgcaacatcatgctgctcggggcccagcgcaagacgctgtcgggcttctcgtctacctcagtgctgccccacaccggctacatctaccaca

SEQ ID NO: 24951 - DNA, 928 bp, Homo sapiens
  source 1..928: mol_type = unassigned DNA
ggtgagcgactaacgctagaaacagtggtgcgcggagaggagagggaacgctgctgtccctccccaggcctcgggatgtctctggcagatgagctcttagctgatctcgaagaggcagcagaagaggaggaaggaggaagctatggggaggaagaagaggagccagcgatcgaggatgtgcaggaggagacacagctggatctttccggggattcagtcaagaccatcgccaagctatgggatagtaagatgtttgctgagattatgatgaagattgaggagtatatcagcaagcaagccaaagcttcagaagtgatgggaccagtggaggccgcgcctgaataccgcgtcatcgtggatgccaacaacctgaccgtggagatcgaaaacgagctgaacatcatccataagttcatccgggataagtactcaaagagattccctgaactggagtccttggtccccaatgcactggattacatccgcacggtcaaggagctgggcaacagcctggacaagtgcaagaacaatgagaacctgcagcagatcctcaccaatgccaccatcatggtcgtcagcgtcaccgcctccaccacccaggggcagcagctgtcggaggaggagctggagcggctggaggaggcctgcgacatggcgctggagctgaacgcctccaagcaccgcatctacgagtatgtggagtcccggatgtccttcatcgcacccaacctgtccatcattatcggggcatccacggccgccaagatcatgggtgtggccggcggcctgaccaacctctccaagatgcccgcctgcaacatcatgctgctcggggcccagcgcaagacgctgtcgggcttctcgtctacctcagtgctgccccacaccggctacatctaccacagtgacatcgtgcagtccctgccac

SEQ ID NO: 24952 - DNA, 854 bp, Homo sapiens
  source 1..854: mol_type = unassigned DNA
ggagaccacggggagcgggaggctgggctcctgggtctgggagaagaagtgtgtgaggaaaaaggcctcgggatgtctctggcagatgagctcttagctgatctcgaagaggcagcagaagaggaggaaggaggaagctatggggaggaagaagaggagccagcgatcgaggatgtgcaggaggagacacagctggatctttccggggattcagtcaagaccatcgccaagctatgggatagtaagatgtttgctgagattatgatgaagattgaggagtatatcagcaagcaagccaaagcttcagaagtgatgggaccagtggaggccgcgcctgaataccgcgtcatcgtggatgccaacaacctgaccgtggagatcgaaaacgagctgaacatcatccataagttcatccgggataagtactcaaagagattccctgaactggagtccttggtccccaatgcactggattacatccgcacggtcaaggagctgggcaacagcctggacaagtgcaagaacaatgagaacctgcagcagatcctcaccaatgccaccatcatggtcgtcagcgtcaccgcctccaccacccaggggcagcagctgtcggaggaggagctggagcggctggaggaggcctgcgacatggcgctggagctgaacgcctccaagcaccgcatctacgagtatgtggagtcccggatgtccttcatcgcacccaacctgtccatcattatcggggcatccacggccgccaagatcatgggtgtggccggcggcctgaccaacctctccaagatgcccgcctgcaacatcatgctgctcggggcccagcgcaagacgctgtcggg

SEQ ID NO: 24953 - DNA, 3496 bp, Homo sapiens
  source 1..3496: mol_type = unassigned DNA
cagagttcagccccgagccgcgcgagtcgactcacctacctcttttcaagccggcctagccccttcccggaacctcggctcccccccaacgaaactactgctaagccaactggactacacttcccagactgcttggagcctctctctccgcagaacctcgtcttccgcgagcttttcctggaggttctaggagggatgcccctcaatgccacgacgccatttcctactacgacttccatcatgctccgcgccgctccgggggcggtgacccctcttggcccacgtcttgtcagtgacgcacttcctgtcagtgacgcacttcccctctgctgggcgcgcggtggacggtctgaaagggagtgttcgggtttcgctggggcctcgcggctccagagcccagcatggcttcctcgcgagcctcttccacgcaggcaaccaaaactaaagcacccgacgacttagttgctccggtcgtgaagaaaccacacatctattatggaagtttggaagagaaggagagggagcgtctggccaaaggagagtctgggattttggggaaagacggacttaaagcagggatcgaagctggaaatattaatataacctctggagaagtgtttgaaattgaagagcatatcagcgagcgacaggcagaagtattggctgagtttgagagaaggaagcgagcccggcagatcaatgtttccacagatgactcagaggtcaaagcttgccttagagccttgggggaacccatcacactttttggagagggtcctgctgaaagaagagaaaggttaagaaatatcctctcagttgtcggtactgatgccttgaaaaagaccaaaaaggatgatgagaagtctaaaaagtccaaagaagagtatcagcaaacctggtatcatgaaggaccaaatagcttgaaggtggcaagactatggattgctaattattcgttgcccagggcaatgaaacgcttggaagaggcccgactccataaggagattcctgagacaacaaggacctcccagatgcaagagctgcacaagtctctccggtctttgaataatttttgcagtcagattggggatgatcggcctatctcctactgtcactttagtcccaattccaagatgctggccacagcttgttggagtgggctttgcaagctctggtctgttcctgattgcaacctccttcacactcttcgagggcataacacaaatgtaggagcaattgtattccatcccaaatccactgtctccttggacccaaaagatgtcaacctggcctcttgtgcggctgatggctctgtgaagctttggagtctcgacagtgatgaaccagtggcagatattgaaggccatacagtgcgtgtggcgcgggtaatgtggcatccttcaggacgtttcctgggcaccacctgctatgaccgttcatggcgcttatgggatttggaggctcaagaggagatcctgcatcaggaaggccatagcatgggtgtgtatgacattgccttccatcaagatggctctttggctggcactgggggactggatgcatttggtcgagtttgggacctacgcacaggacgttgtatcatgttcttagaaggccacctgaaagaaatctatggaataaatttctcccccaatggctatcacattgcaaccggcagtggtgacaacacctgcaaagtgtgggacctccgacagcggcgttgcgtctacaccatccctgctcatcagaacttagtgactggtgtcaagtttgagcctatccatgggaacttcttgcttactggtgcctatgataacacagccaagatctggacgcacccaggctggtccccgctgaagactctggctggccacgaaggcaaagtgatgggcctagatatttcttccgatgggcagctcatagccacttgctcatatgacaggaccttcaagctgtggatggctgaatagatgacaatgggaaaaggacttgaacctcaagctctctctaaggagctgttttcctcaaacgagaagaattgaagtgtttagttctatcatgttttctgccaattaccatgcatagaccctcagtagaattggatttccatgtcagcccccactccaggaaggcagcccaatccctaggtgatggggaacccctctcacggttgaaaatttattacctttttacgccctgccacgaactgtgtagacattgtttttattaatcttttgtttggccgggcgtggtggctcacgcctgtaatcctagcactttgggaggccgaggtgggtagatcgcttgagctcaggagttcaagacgagcctgggcaacatggcaaatgccgtctctgcaaaaaaatactaaaattagctggtcgcggtggcttctgcctgtgattccggctacttgggaggctgaggtgggagggattgcttaagcctgggaggcagaggttgcagtgagccgagattgcgccattgcactctagcctgtgtgacagagcaagaccctgtctcaaaaaaaaaaaaaatttgttcgaatgccttatagccttcctcacagcacccaggattgtgactgactctgcatttttaattcttgaaacttggctttccataacatggtacatgcttcaggactacatatgacccagagagcaaggtggctgaactatagtctggaagccctcaggtaaagaggcacatctcaccactcattggttaaacaatgcatcatagcgagcacttttcctttccctggagaatgggatgtgaagcagtagaccgcagccacgccgatggttatacagtgaagaagacttcacctcttcctattgagtttgcttggaatgctgacagcatcaggcaactctgaactgaacatttgctttgtcagaaaatatctttttttttactttgaagtttggcaaccttcatgttaccccaaagcaaaaccattgtgtcaggagtcaaacaaatgtttagaaagcaaacatgacgtctctattgtacaacctcctttctcttggctgtttaaaggatgtacttcgtgtattaaagggtactttatgttgaagtaacgaaaaaaccctaatgggtgttcctaaacctaaaccttttctttattccacatttgctacggtaaaatcctgttacaaaactaccctataaagaattattttctatagttaagcattttctgaatcctagccattggtccatagaggtctcttttttttggtttgggatataatggatgatctcaaatatggattactctgatttatgtctccttagcaccttgttaacaattttttttaaaatagaaggctgtttgcattttgggccagactgccagtaagccaggcctggactcaattacaattcttaacttgtctgtcatgcacctcttttcacctcaactatacagcctctgaactctcaaattacacagtaaattcaaaaaaatatataggaatttggaagaaga

SEQ ID NO: 24954 - DNA, 3493 bp, Homo sapiens
  source 1..3493: mol_type = unassigned DNA
cagagttcagccccgagccgcgcgagtcgactcacctacctcttttcaagccggcctagccccttcccggaacctcggctcccccccaacgaaactactgctaagccaactggactacacttcccagactgcttggagcctctctctccgcagaacctcgtcttccgcgagcttttcctggaggttctaggagggatgcccctcaatgccacgacgccatttcctactacgacttccatcatgctccgcgccgctccgggggcggtgacccctcttggcccacgtcttgtcagtgacgcacttcctgtcagtgacgcacttcccctctgctgggcgcgcggtggacggtctgaaagggagtgttcgggtttcgctggggcctcgcggctccagagcccagcatggcttcctcgcgagcctcttccacggcaaccaaaactaaagcacccgacgacttagttgctccggtcgtgaagaaaccacacatctattatggaagtttggaagagaaggagagggagcgtctggccaaaggagagtctgggattttggggaaagacggacttaaagcagggatcgaagctggaaatattaatataacctctggagaagtgtttgaaattgaagagcatatcagcgagcgacaggcagaagtattggctgagtttgagagaaggaagcgagcccggcagatcaatgtttccacagatgactcagaggtcaaagcttgccttagagccttgggggaacccatcacactttttggagagggtcctgctgaaagaagagaaaggttaagaaatatcctctcagttgtcggtactgatgccttgaaaaagaccaaaaaggatgatgagaagtctaaaaagtccaaagaagagtatcagcaaacctggtatcatgaaggaccaaatagcttgaaggtggcaagactatggattgctaattattcgttgcccagggcaatgaaacgcttggaagaggcccgactccataaggagattcctgagacaacaaggacctcccagatgcaagagctgcacaagtctctccggtctttgaataatttttgcagtcagattggggatgatcggcctatctcctactgtcactttagtcccaattccaagatgctggccacagcttgttggagtgggctttgcaagctctggtctgttcctgattgcaacctccttcacactcttcgagggcataacacaaatgtaggagcaattgtattccatcccaaatccactgtctccttggacccaaaagatgtcaacctggcctcttgtgcggctgatggctctgtgaagctttggagtctcgacagtgatgaaccagtggcagatattgaaggccatacagtgcgtgtggcgcgggtaatgtggcatccttcaggacgtttcctgggcaccacctgctatgaccgttcatggcgcttatgggatttggaggctcaagaggagatcctgcatcaggaaggccatagcatgggtgtgtatgacattgccttccatcaagatggctctttggctggcactgggggactggatgcatttggtcgagtttgggacctacgcacaggacgttgtatcatgttcttagaaggccacctgaaagaaatctatggaataaatttctcccccaatggctatcacattgcaaccggcagtggtgacaacacctgcaaagtgtgggacctccgacagcggcgttgcgtctacaccatccctgctcatcagaacttagtgactggtgtcaagtttgagcctatccatgggaacttcttgcttactggtgcctatgataacacagccaagatctggacgcacccaggctggtccccgctgaagactctggctggccacgaaggcaaagtgatgggcctagatatttcttccgatgggcagctcatagccacttgctcatatgacaggaccttcaagctgtggatggctgaatagatgacaatgggaaaaggacttgaacctcaagctctctctaaggagctgttttcctcaaacgagaagaattgaagtgtttagttctatcatgttttctgccaattaccatgcatagaccctcagtagaattggatttccatgtcagcccccactccaggaaggcagcccaatccctaggtgatggggaacccctctcacggttgaaaatttattacctttttacgccctgccacgaactgtgtagacattgtttttattaatcttttgtttggccgggcgtggtggctcacgcctgtaatcctagcactttgggaggccgaggtgggtagatcgcttgagctcaggagttcaagacgagcctgggcaacatggcaaatgccgtctctgcaaaaaaatactaaaattagctggtcgcggtggcttctgcctgtgattccggctacttgggaggctgaggtgggagggattgcttaagcctgggaggcagaggttgcagtgagccgagattgcgccattgcactctagcctgtgtgacagagcaagaccctgtctcaaaaaaaaaaaaaatttgttcgaatgccttatagccttcctcacagcacccaggattgtgactgactctgcatttttaattcttgaaacttggctttccataacatggtacatgcttcaggactacatatgacccagagagcaaggtggctgaactatagtctggaagccctcaggtaaagaggcacatctcaccactcattggttaaacaatgcatcatagcgagcacttttcctttccctggagaatgggatgtgaagcagtagaccgcagccacgccgatggttatacagtgaagaagacttcacctcttcctattgagtttgcttggaatgctgacagcatcaggcaactctgaactgaacatttgctttgtcagaaaatatctttttttttactttgaagtttggcaaccttcatgttaccccaaagcaaaaccattgtgtcaggagtcaaacaaatgtttagaaagcaaacatgacgtctctattgtacaacctcctttctcttggctgtttaaaggatgtacttcgtgtattaaagggtactttatgttgaagtaacgaaaaaaccctaatgggtgttcctaaacctaaaccttttctttattccacatttgctacggtaaaatcctgttacaaaactaccctataaagaattattttctatagttaagcattttctgaatcctagccattggtccatagaggtctcttttttttggtttgggatataatggatgatctcaaatatggattactctgatttatgtctccttagcaccttgttaacaattttttttaaaatagaaggctgtttgcattttgggccagactgccagtaagccaggcctggactcaattacaattcttaacttgtctgtcatgcacctcttttcacctcaactatacagcctctgaactctcaaattacacagtaaattcaaaaaaatatataggaatttggaagaaga

SEQ ID NO: 24955 - DNA, 4415 bp, Homo sapiens
  source 1..4415: mol_type = unassigned DNA
ggcacatgcgcggcagctcttttccttcttcctccacttcccctaccctccaccgtccgggagccgccgccaccgccgccgaggagtcaggaagttcaagatggccgccgcggagacccagtcgctacgggagcagccagagatggaagatgctaattctgaaaagagtataaatgaagaaaatggagaagtatcagaagaccagtctcaaaataagcacagtcgtcacaaaaaaaagaagcataaacacagaagtaaacataagaaacataaacattcctcagaagaagacaaggataaaaaacataaacataagcataaacataagaaacacaaaagaaaagagattattgatgcttctgataaagagggtatgtctccagcaaaaagaactaaacttgatgatttagctttgctagaagacttggaaaaacagagagccttgattaaggccgaacttgataatgagttaatggaaggaaaggtccagtctggtatggggctcattttgcaaggttatgagtctggctctgaagaagagggggaaattcatgaaaaggcaagaaatggaaataggtctagtactagatcttcaagtacaaaggggaaacttgaacttgtggacaataaaattactacaaagaaacgaagtaaaagcagatccaaagaacggactagacataggtctgataaaaagaaaagtaaggggggtattgaaatcgttaaagagaaaacaactaggagcaagtcaaaggagaggaaaaaatctaaaagcccatccaaaagaagtaagtctcaagatcaagcaaggaaatcaaaatcccctacccttagaaggcgatctcaagagaaaattggtaaggccagatctcctactgatgataaggttaaaattgaagataaaagtaaatcaaaagataggaaaaaatccccaattataaatgaaagtagaagtcgcgatcgaggtaaaaaatccagatccccagttgatttaagaggtaaatccaaagacagaaggtcacggtccaaagagagaaaatcaaaacggtctgaaactgataaagaaaagaagccaattaaatctccctctaaagatgcttcatctgggaaagaaaataggtcacccagcagaagacctggtcgtagtcctaaaagaagaagtttgtctccaaaaccacgtgataaatcaagaagaagcaggtctccacttttgaatgatagaagatctaagcagagcaaatccccctcgcggacactgtctcctgggagaagagccaagagccgatccttagaaagaaaacgacgagaaccagagaggagacgactttcttctccaagaacacgacctcgagatgatatcctcagtagacgtgaaagatcaaaagatgccagccccatcaatagatggtctccaacccgaagaagaagtagatctcccattagaaggaggtctcgttccccactcagacgtagcaggtctccaagaagaagaagcagatctcctcggagaagggacagaggtcggaggagcagatcacgcttgcgaaggcggtctcgatcacgcggtggtcgtagacgaaggagcagaagcaaagtaaaggaagataaatttaaaggaagtctttctgaaggaatgaaagttgagcaggaatcttcgtctgatgataaccttgaagactttgatgtagaggaagaagatgaagaagccctaatagaacagagaagaatccaaaggcaggcaattgttcagaaatataaataccttgctgaagatagcaacatgtctgtgccatctgaaccaagcagcccccagagcagtacgagaacacgatcaccatctccagatgacattctggagcgagtagctgctgatgttaaagagtatgaacgggaaaatgttgatacatttgaggcctcagtgaaagccaagcataatctaatgacagttgaacagaataatggttcatctcagaagaagttgttggcacctgatatgtttacagaatctgatgatatgtttgctgcgtattttgatagtgctcgtcttcgggccgctggcattggaaaagatttcaaagagaatcccaacctcagagataactggaccgatgcagaaggctattatcgtgtgaacataggtgaagtcctagataaacgttacaatgtgtatggctacactgggcaaggtgtattcagtaatgttgtacgagccagagataatgcaagagccaaccaagaagtggctgtaaagatcatcagaaacaatgagctcatgcaaaagactggtttaaaagaattagagttcttgaaaaaacttaatgatgctgatcctgatgacaaatttcattgtctgagactcttcaggcacttctatcacaagcagcatctttgtctggtattcgagcctctcagcatgaacttacgagaggtgttaaaaaaatatggtaaagatgttggtcttcatattaaagctgtaagatcctatagtcagcagttgttcctggcattgaaactccttaaaagatgcaatatcctacatgcagatatcaagccagacaatatcctggttaatgaatccaaaactattttaaagctttgcgattttgggtcggcttcacatgttgcggataatgacataacaccttatcttgtcagtagattttatcgtgctcctgaaatcattataggtaaaagctatgactatggtatagatatgtggtctgtaggttgcaccttatacgaactctatactggaaaaattttattccctggcaaaaccaataaccatatgctgaagcttgcaatggatctcaaaggaaagatgccaaataagatgattcgaaaaggtgtgttcaaagatcagcattttgatcaaaatctcaacttcatgtacatagaagttgataaagtaacagagagggagaaagttactgttatgagcaccattaatccaactaaggacctgttggctgacttgattgggtgccagagacttcctgaagaccaacgtaagaaagtacaccagctaaaggacttgttggaccagattctgatgttggacccagctaaacgaattagcatcaaccaggccctacagcacgccttcatccaggaaaaaatttaaacaagatgaagaaactccaagggtttgagtaaatacaaagactgaagaaatttcacagcagtttattaatgtatataaacttataaatatttctccagcaaatttgaggaagcatgatatatttgaattaacaccaagggtgatatttcttttagagatgttagttaatctgttttgtgtcttacgtgaaatttcactgtagactgttttaaattgccaagactgcacaaaattacagtgctaatgtatatggttgcagttcacataaagacaaaagcatctgttatgaaatgagtagtaatattgggtggttgatttgttcttagcagacttggcttcattttggtcttgagataaaatggccagcataaatgctgtttatattcacgttttcctaggtgtgtgtgtgcaggccacagcagcatgcccttggtgtagtcagtgccgaaaggggtctgttccttcttgagcctgcctgcagggatggtctccttttaaagcaggttgtgtgcagcattcagtacactgaaggtaagctaaaccatcaacatctctggtgttttaagatgttattttattggaacaactgacaaatgagggatgttagctttgtggcagaattccctgcatgtgtgataactgatcttgttttattttttggcattgcaactgtggcatagttacaatttctgtttgttcatcacatttaaaattggaagagaacgcgcttgatggatagagcgccttcagtgtactgtttcttattaactttactttttttaaatcaacttgctatagactttatatacattttgttaaatatagttcctagtgacatagaaacgatgcgtagttttcatttactaattacaaatgttgaggcctaattctgaaagtcctcatatttaaaggctagacaacgtaatgaaatttttaactatttgtatgtcattttgaaagtgtactgctttatggtaaaagtgtttttcatttgttcattgttttcattatttgtgatcatgttgtctttcaatacaggcataaaccttccactcttgaacaaagcagctgctttttaaaagcggtaattgcttctttaccttttatttcttttgtaaatgaagcttttctttaagaatgtgactttaaagtgttgtctattgcataaaacagttgacactcacttattgtaaagtgaagattgttctactgcatgtgaagtggaccatgcagatttctgtatgttctcagtatgcatcactagataataaagtcttttgtgaacaaggca

SEQ ID NO: 24956 - DNA, 6775 bp, Homo sapiens
  source 1..6775: mol_type = unassigned DNA
ggggttttatatccggattcttagcgcggactcagaacccagctcttccctacacggtcggcacatgcgcggcagctcttttccttcttcctccacttcccctaccctccaccgtccgggagccgccgccaccgccgccgaggagtcaggaagttcaagatggccgccgcggagacccagtcgctacgggagcagccagagatggaagatgctaattctgaaaagagtataaatgaagaaaatggagaagtatcagaagaccagtctcaaaataagcacagtcgtcacaaaaaaaagaagcataaacacagaagtaaacataagaaacataaacattcctcagaagaagacaaggataaaaaacataaacataagcataaacataagaaacacaaaagaaaagagattattgatgcttctgataaagagggtatgtctccagcaaaaagaactaaacttgatgatttagctttgctagaagacttggaaaaacagagagccttgattaaggccgaacttgataatgagttaatggaaggaaaggtccagtctggtatggggctcattttgcaaggttatgagtctggctctgaagaagagggggaaattcatgaaaaggcaagaaatggaaataggtctagtactagatcttcaagtacaaaggggaaacttgaacttgtggacaataaaattactacaaagaaacgaagtaaaagcagatccaaagaacggactagacataggtctgataaaaagaaaagtaaggggggtattgaaatcgttaaagagaaaacaactaggagcaagtcaaaggagaggaaaaaatctaaaagcccatccaaaagaagtaagtctcaagatcaagcaaggaaatcaaaatcccctacccttagaaggcgatctcaagagaaaattggtaaggccagatctcctactgatgataaggttaaaattgaagataaaagtaaatcaaaagataggaaaaaatccccaattataaatgaaagtagaagtcgcgatcgaggtaaaaaatccagatccccagttgatttaagaggtaaatccaaagacagaaggtcacggtccaaagagagaaaatcaaaacggtctgaaactgataaagaaaagaagccaattaaatctccctctaaagatgcttcatctgggaaagaaaataggtcacccagcagaagacctggtcgtagtcctaaaagaagaagtttgtctccaaaaccacgtgataaatcaagaagaagcaggtctccacttttgaatgatagaagatctaagcagagcaaatccccctcgcggacactgtctcctgggagaagagccaagagccgatccttagaaagaaaacgacgagaaccagagaggagacgactttcttctccaagaacacgacctcgagatgatatcctcagtagacgtgaaagatcaaaagatgccagccccatcaatagatggtctccaacccgaagaagaagtagatctcccattagaaggaggtctcgttccccactcagacgtagcaggtctccaagaagaagaagcagatctcctcggagaagggacagaggtcggaggagcagatcacgcttgcgaaggcggtctcgatcacgcggtggtcgtagacgaaggagcagaagcaaagtaaaggaagataaatttaaaggaagtctttctgaaggaatgaaagttgagcaggaatcttcgtctgatgataaccttgaagactttgatgtagaggaagaagatgaagaagccctaatagaacagagaagaatccaaaggcaggcaattgttcagaaatataaataccttgctgaagatagcaacatgtctgtgccatctgaaccaagcagcccccagagcagtacgagaacacgatcaccatctccagatgacattctggagcgagtagctgctgatgttaaagagtatgaacgggaaaatgttgatacatttgaggcctcagtgaaagccaagcataatctaatgacagttgaacagaataatggttcatctcagaagaagttgttggcacctgatatgtttacagaatctgatgatatgtttgctgcgtattttgatagtgctcgtcttcgggccgctggcattggaaaagatttcaaagagaatcccaacctcagagataactggaccgatgcagaaggctattatcgtgtgaacataggtgaagtcctagataaacgttacaatgtgtatggctacactgggcaaggtgtattcagtaatgttgtacgagccagagataatgcaagagccaaccaagaagtggctgtaaagatcatcagaaacaatgagctcatgcaaaagactggtttaaaagaattagagttcttgaaaaaacttaatgatgctgatcctgatgacaaatttcattgtctgagactcttcaggcacttctatcacaagcagcatctttgtctggtattcgagcctctcagcatgaacttacgagaggtgttaaaaaaatatggtaaagatgttggtcttcatattaaagctgtaagatcctatagtcagcagttgttcctggcattgaaactccttaaaagatgcaatatcctacatgcagatatcaagccagacaatatcctggttaatgaatccaaaactattttaaagctttgcgattttgggtcggcttcacatgttgcggataatgacataacaccttatcttgtcagtagattttatcgtgctcctgaaatcattataggtaaaagctatgactatggtatagatatgtggtctgtaggttgcaccttatacgaactctatactggaaaaattttattccctggcaaaaccaataaccatatgctgaagcttgcaatggatctcaaaggaaagatgccaaataagatgattcgaaaaggtgtgttcaaagatcagcattttgatcaaaatctcaacttcatgtacatagaagttgataaagtaacagagagggagaaagttactgttatgagcaccattaatccaactaaggacctgttggctgacttgattgggtgccagagacttcctgaagaccaacgtaagaaagtacaccagctaaaggacttgttggaccagattctgatgttggacccagctaaacgaattagcatcaaccaggccctacagcacgccttcatccaggaaaaaatttaaacaagatgaagaaactccaagggtttgagtaaatacaaagactgaagaaatttcacagcagtttattaatgtatataaacttataaatatttctccagcaaatttgaggaagcatgatatatttgaattaacaccaagggtgatatttcttttagagatgttagttaatctgttttgtgtcttacgtgaaatttcactgtagactgttttaaattgccaagactgcacaaaattacagtgctaatgtatatggttgcagttcacataaagacaaaagcatctgttatgaaatgagtagtaatattgggtggttgatttgttcttagcagacttggcttcattttggtcttgagataaaatggccagcataaatgctgtttatattcacgttttcctaggtgtgtgtgtgcaggccacagcagcatgcccttggtgtagtcagtgccgaaaggggtctgttccttcttgagcctgcctgcagggatggtctccttttaaagcaggttgtgtgcagcattcagtacactgaaggtaagctaaaccatcaacatctctggtgttttaagatgttattttattggaacaactgacaaatgagggatgttagctttgtggcagaattccctgcatgtgtgataactgatcttgttttattttttggcattgcaactgtggcatagttacaatttctgtttgttcatcacatttaaaattggaagagaacgcgcttgatggatagagcgccttcagtgtactgtttcttattaactttactttttttaaatcaacttgctatagactttatatacattttgttaaatatagttcctagtgacatagaaacgatgcgtagttttcatttactaattacaaatgttgaggcctaattctgaaagtcctcatatttaaaggctagacaacgtaatgaaatttttaactatttgtatgtcattttgaaagtgtactgctttatggtaaaagtgtttttcatttgttcattgttttcattatttgtgatcatgttgtctttcaatacaggcataaaccttccactcttgaacaaagcagctgctttttaaaagcggtaattgcttctttaccttttatttcttttgtaaatgaagcttttctttaagaatgtgactttaaagtgttgtctattgcataaaacagttgacactcacttattgtaaagtgaagattgttctactgcatgtgaagtggaccatgcagatttctgtatgttctcagtatgcatcactagataataaagtcttttgtgaacaaggcatttgtagccatttttaaaagtttttgtcttcagtgctggtaagtcaggtaaaccataaatagttaaaagcaaccttttgtttttttcctgaaagtttttaattgaaagtattattagttaaagatgtaaacctagccaaaattaccagtttattaataattaggatcctaattatttcaaaaaatcctacaaatattgtcagctttcagtgtagtgagattattcctgtaggttatggggtataattcaggatttaactaatgtttctgctattttctcacttttccttttgatggtgcggaaagagaaaaaggaaaacggggcacaggccattcgacgccttctccaaggggtctgatttgctgagacaccagcttcaccttcttaacaaggtgcagctcagtggaagatgatgacaaccagaagacatgagctaaggtttctgtcctataaaagatttattaaaaaacaatccttcatttattttttgtctaattttttagttttcagcattatgatttgggttttattggtgtttggtatttagaattagtgctgttgtggagtgcgtctgtaaagtgcttgttttatcatacttcctgcctctcccctcccccagtttctcctcccctaaaataaaaatagtggtcaactttagtaatataaaaggctgctggatgctgagattccacataacacatggttgtcaaaattggatgttaaggattcttagaaaaacagcaaccaccagaatagcatatatctgaaagtagtcttcagctttaggcagatgcaaaagaatacaaactggaatattaagaatactgttcaactcctttagtatctgttccccaacttaccctgtagaaacctcgttattaaccagtgttccagtcttaaagtagacaaaatattcagagccattttttttaagggaaatgaaaaagatactctgggttttttatactccccaatttagcatatctagactacctatttgaaaggaaccctatcaactgtcttatgtacgttacatgattttcctacactctgtaattttgctgaggtgcaatttggaactctgcaagacctactagattgaatttatttagtgaatgctcctgaataaatgtgcattcctcttttagagtagctgtatgcttttcaaatgctatctgccgtgaattttttgcttttattatactttatggcaaaagtgatatcaagtgattgtcagacttgagggctcatagaagtgttaggtacggctctcaaagatgttacagttttttctagggttgggagaatagttgagatctggaaagcatagacattttttacactctggatagactttattcttgaagatcatcagaaatgaggttggaatttcgaggttttgagcagggggagcatcttatattcacccttaaatcgttattaatacatcctgttttcttcattccctgatagctatctcatttcactctactgtctcaaaattttgttttaaaataatagaaatgttttgccattattaagtaccactttattcctaacaaaaataagtactcaggacttttttttcaaaatgaaatatttatgtactgttttatggtatgtggtagagtaagtaaaatgtaatgttctcagttttgttccatatttgcattcctcttatgctttacctgtattttatcatttgtaagcagaactctagctatatggggtagaaataaaatctctgagatgaaacaaaggaatcaacatgataaaatttaggcgaagtagttaagaaatggcccttttgaatgttgaagataggaaagaaagccatatattcaaatatgtaattttcctcatttagttataatgacatctttaccaattgggcttcataaatgtgtttctttcttaatagtatcctagttccagcatatattcaacatgaattttatcattctcctcctaatggaatgtcttccttatagaaatgttcacgacaaattcatttgtgttttttacatgtcaataatgtatgctaaattaaaatgttttccagttattctgatagatgtcattatggcatccttaatttttcttctccttctgtatatagggtaagggactgttctgaagaacctttccatttagtgatcaagatatggaagctgatttctgaaaatgctcagtgtgtactctaattatttatggtaccatttgaattgtaacttgcattttagcagtgcatgtttctaattgacttactgggaaactgaataaaatatgcctcttattatc

SEQ ID NO: 24957 - DNA, 3216 bp, Homo sapiens
  source 1..3216: mol_type = unassigned DNA
gttgccccgggaggcgtaggcgcgagcggcctctacaggtccggtgcgcgtggcggctgccgcggcagtgaggtcgcgctttcctatgcctcttttggggacccatctgagctccctggccgcagctcttagcggcatctgtgttggggacacgagggatggaagatgctaattctgaaaagagtataaatgaagaaaatggagaagtatcagaagaccagtctcaaaataagcacagtcgtcacaaaaaaaagaagcataaacacagaagtaaacataagaaacataaacattcctcagaagaagacaaggataaaaaacataaacataagcataaacataagaaacacaaaagaaaagagattattgatgcttctgataaagagggtatgtctccagcaaaaagaactaaacttgatgatttagctttgctagaagacttggaaaaacagagagccttgattaaggccgaacttgataatgagttaatggaaggaaaggtccagtctggtatggggctcattttgcaaggttatgagtctggctctgaagaagagggggaaattcatgaaaaggcaagaaatggaaataggtctagtactagatcttcaagtacaaaggggaaacttgaacttgtggacaataaaattactacaaagaaacgaagtaaaagcagatccaaagaacggactagacataggtctgataaaaagaaaagtaaggggggtattgaaatcgttaaagagaaaacaactaggagcaagtcaaaggagaggaaaaaatctaaaagcccatccaaaagaagtaagtctcaagatcaagcaaggaaatcaaaatcccctacccttagaaggcgatctcaagagaaaattggtaaggccagatctcctactgatgataaggttaaaattgaagataaaagtaaatcaaaagataggaaaaaatccccaattataaatgaaagtagaagtcgcgatcgaggtaaaaaatccagatccccagttgatttaagaggtaaatccaaagacagaaggtcacggtccaaagagagaaaatcaaaacggtctgaaactgataaagaaaagaagccaattaaatctccctctaaagatgcttcatctgggaaagaaaataggtcacccagcagaagacctggtcgtagtcctaaaagaagaagtttgtctccaaaaccacgtgataaatcaagaagaagcaggtctccacttttgaatgatagaagatctaagcagagcaaatccccctcgcggacactgtctcctgggagaagagccaagagccgatccttagaaagaaaacgacgagaaccagagaggagacgactttcttctccaagaacacgacctcgagatgatatcctcagtagacgtgaaagatcaaaagatgccagccccatcaatagatggtctccaacccgaagaagaagtagatctcccattagaaggaggtctcgttccccactcagacgtagcaggtctccaagaagaagaagcagatctcctcggagaagggacagaggtcggaggagcagatcacgcttgcgaaggcggtctcgatcacgcggtggtcgtagacgaaggagcagaagcaaagtaaaggaagataaatttaaaggaagtctttctgaaggaatgaaagttgagcaggaatcttcgtctgatgataaccttgaagactttgatgtagaggaagaagatgaagaagccctaatagaacagagaagaatccaaaggcaggcaattgttcagaaatataaataccttgctgaagatagcaacatgtctgtgccatctgaaccaagcagcccccagagcagtacgagaacacgatcaccatctccagatgacattctggagcgagtagctgctgatgttaaagagtatgaacgggaaaatgttgatacatttgaggcctcagtgaaagccaagcataatctaatgacagttgaacagaataatggttcatctcagaagaagttgttggcacctgatatgtttacagaatctgatgatatgtttgctgcgtattttgatagtgctcgtcttcgggccgctggcattggaaaagatttcaaagagaatcccaacctcagagataactggaccgatgcagaaggctattatcgtgtgaacataggtgaagtcctagataaacgttacaatgtgtatggctacactgggcaaggtgtattcagtaatgttgtacgagccagagataatgcaagagccaaccaagaagtggctgtaaagatcatcagaaacaatgagctcatgcaaaagactggtttaaaagaattagagttcttgaaaaaacttaatgatgctgatcctgatgacaaatttcattgtctgagactcttcaggcacttctatcacaagcagcatctttgtctggtattcgagcctctcagcatgaacttacgagaggtgttaaaaaaatatggtaaagatgttggtcttcatattaaagctgtaagatcctatagtcagcagttgttcctggcattgaaactccttaaaagatgcaatatcctacatgcagatatcaagccagacaatatcctggttaatgaatccaaaactattttaaagctttgcgattttgggtcggcttcacatgttgcggataatgacataacaccttatcttgtcagtagattttatcgtgctcctgaaatcattataggtaaaagctatgactatggtatagatatgtggtctgtaggttgcaccttatacgaactctatactggaaaaattttattccctggcaaaaccaataaccatatgctgaagcttgcaatggatctcaaaggaaagatgccaaataagatgattcgaaaaggtgtgttcaaagatcagcattttgatcaaaatctcaacttcatgtacatagaagttgataaagtaacagagagggagaaagttactgttatgagcaccattaatccaactaaggacctgttggctgacttgattgggtgccagagacttcctgaagaccaacgtaagaaagtacaccagctaaaggacttgttggaccagattctgatgttggacccagctaaacgaattagcatcaaccaggccctacagcacgccttcatccaggaaaaaatttaaacaagatgaagaaactccaagggtttgagtaaatacaaagactgaagaaatttcacagcagtttattaatgtatat

SEQ ID NO: 24958 - DNA, 3096 bp, Homo sapiens
  source 1..3096: mol_type = unassigned DNA
atgaggccggggacgggagctgagcgtggaggcctcatggtgagtgaaatggagagccatcctccctcgcagggtcctggggacggggagcggagattgtccggctcaagcctctgctccggctcttgggtctctgctgacggcttcctgaggagacggccctcgatggggcaccctggcatgcattatgccccaatgggaatgcaccctatgggtcagagagcgaatatgcctcctgtacctcatggaatgatgccgcagatgatgccccctatgggagggccaccaatgggacaaatgcctggaatgatgtcgtcagtaatgcctggaatgatgatgtctcatatgtctcaggcttccatgcagcctgccttaccgccaggagtaaatagtatggatgtagcagcaggtacgtatactctgtataaatcaatgtggactgaacataaatcacctgatggaaggacttactactacaacactgaaaccaaacagtctacctgggagaaaccagatgatcttaaaacacctgctgagcaactcttatctaaatgcccctggaaggaatacaaatcagattctggaaagccttactattataattctcaaacaaaagaatctcgctgggccaaacctaaagaacttgaggatcttgaaggtaaaatggggaaaattaagtatagtaagcaagaagagtgcaccacaacatcaacagccccagtccctacaacagaaattccgaccacaatgagcaccatggctgctgccgaagcagcagctgctgttgttgcagcagcagcagcggcagcagcagcagcagctgcagccaatgctaatgcttccacttctgcttctaatactgtcagtggaactgttccagttgttcctgagcctgaagttacttccattgttgctactgttgtagataatgagaatacagtaactatttcaactgaggaacaagcacaacttactagtacccctgctattcaggatcaaagtgtggaagtatccagtaatactggagaagaaacatctaagcaagaaactgtagctgattttactcccaaaaaagaagaggaggagagccaaccagcaaagaaaacatacacttggaatacaaaggaagaggcaaagcaagcttttaaagaattattgaaagaaaagcgggtaccatcgaatgcttcatgggagcaggctatgaaaatgattattaatgatccacgatacagtgctttggcaaagttaagtgaaaaaaagcaagcctttaatgcctataaagtccagacagaaaaagaagaaaaagaagaagcaagatcaaagtacaaagaggctaaggaatcctttcagcgttttcttgaaaatcatgagaaaatgacttctacaaccagatacaaaaaagcagagcaaatgtttggagagatggaagtttggaatgcaatatcagaacgtgatcgtcttgaaatctatgaagatgttttgttctttctttcaaaaaaagaaaaggaacaagcaaagcagttgcgaaagagaaattgggaagccttaaaaaacatacttgacaacatggctaatgtaacatactctaccacttggtctgaagcccagcagtatctgatggataatccaacttttgcagaagatgaggagttacaaaatatggacaaagaagatgcattaatttgctttgaagaacacattcgggctttagaaaaggaggaagaagaagaaaaacagaagagtttgctgagagaaaggagacgacagcgaaaaaatagggaatctttccagatatttttagatgaattacatgaacatggacaactgcattctatgtcatcttggatggaattgtatccaactattagttctgatattagattcactaatatgcttggtcagcctggatcaactgcacttgatcttttcaagttttatgttgaggatcttaaagcacgttatcatgacgagaagaagataataaaagacattctaaaggataaaggatttgtagttgaagtaaacactacttttgaagattttgtggcgataatcagttcaactaaaagatcaactacattagatgctggaaatatcaaattggctttcaatagtttactagaaaaggcagaagcccgtgaacgtgaaagagaaaaagaagaggctcggaagatgaaacgaaaagaatctgcatttaagagtatgttaaaacaagctgctcctccgatagaattggatgctgtctgggaagatatccgtgagagatttgtaaaagagccagcatttgaggacataactctagaatctgaaagaaaacgaatatttaaagattttatgcatgtgcttgagcatgaatgtcagcatcatcattcaaagaacaagaaacattctaagaaatctaaaaaacatcataggaaacgttcccgctctcgatcggggtcagattcagatgatgatgatagccattcaaagaaaaaaagacagcgatcagagtctcgttctgcttcagaacattcttctagtgcagagtctgagagaagttataaaaagtcaaaaaagcataagaagaaaagtaagaagaggagacataaatctgactctccagaatccgatgctgagcgagagaaggataaaaaagaaaaagatcgggaaagtgaaaaagacagaactagacaaagatcagaatcaaaacacaaatcgcctaagaaaaagactggaaaggattctggtaattgggatacttctggcagcgaactgagtgaaggggaattggaaaagcgcagaagaacccttttggagcaactggatgatgatcaataaattataccaaatatatgtttacagtatgatttaaagtctgattcagaccagggactctattttaagttcaactgaaataacactgggttttaattatatcacaggaaaaaaaaagtgcatttaagtattgttatcgtggactttataaaagcaaaggaaattgaaagtaacttttgattctgtatcaagaatcatattttcatacagtcataactgtctttctgtgaccctttcacagggcactgtaggatggattaaaggtggcaatttactgat

SEQ ID NO: 24959 - DNA, 2470 bp, Homo sapiens
  source 1..2470: mol_type = unassigned DNA
actcagatcgcttcttgttggtatgtgtagcggcagtggccgccggcggagcagtctgagcccgacgatgaggccggggacgggagctgagcgtggaggcctcatgatggggcaccctggcatgcattatgccccaatgggaatgcaccctatgggtcagagagcgaatatgcctcctgtacctcatggaatgatgccgcagatgatgccccctatgggagggccaccaatgggacaaatgcctggaatgatgtcgtcagtaatgcctggaatgatgatgtctcatatgtctcaggcttccatgcagcctgccttaccgcaactcttatctaaatgcccctggaaggaatacaaatcagattctggaaagccttactattataattctcaaacaaaagaatctcgctgggccaaacctaaagaacttgaggatcttgaaggataccagaataccattgttgctggaagtcttattacaaaatcaaacctgcatggaatgttaacggaattaaagtatagtaagcaagaagagtgcaccacaacatcaacagccccagtccctacaacagaaattccgaccacaatgagcaccatggctgctgccgaagcagcagctgctgttgttgcagcagcagcagcggcagcagcagcagcagctgcagccaatgctaatgcttccacttctgcttctaatactgtcagtggaactgttccagttgttcctgagcctgaagttacttccattgttgctactgttgtagataatgagaatacagtaactatttcaactgaggaacaagcacaacttactagtacccctgctattcaggatcaaagtgtggaagtatccagtaatactggagaagaaacatctaagcaagaaactgtagctgattttactcccaaaaaagaagaggaggagagccaaccagcaaagaaaacatacacttggaatacaaaggaagaggcaaagcaagcttttaaagaattattgaaagaaaagcgggtaccatcgaatgcttcatgggagcaggctatgaaaatgattattaatgatccacgatacagtgctttggcaaagttaagtgaaaaaaagcaagcctttaatgcctataaagtccagacagaaaaagaagaaaaagaagaagcaagatcaaagtacaaagaggctaaggaatcctttcagcgttttcttgaaaatcatgagaaaatgacttctacaaccagatacaaaaaagcagagcaaatgtttggagagatggaagtttggaatgcaatatcagaacgtgatcgtcttgaaatctatgaagatgttttgttctttctttcaaaaaaagaaaaggaacaagcaaagcagttgcgaaagagaaattgggaagccttaaaaaacatacttgacaacatggctaatgtaacatactctaccacttggtctgaagcccagcagtatctgatggataatccaacttttgcagaagatgaggagttacaaaatatggacaaagaagatgcattaatttgctttgaagaacacattcgggctttagaaaaggaggaagaagaagaaaaacagaagagtttgctgagagaaaggagacgacagcgaaaaaatagggaatctttccagatatttttagatgaattacatgaacatggacaactgcattctatgtcatcttggatggaattgtatccaactattagttctgatattagattcactaatatgcttggtcagcctgttttttcattaggatcaactgcacttgatcttttcaagttttatgttgaggatcttaaagcacgttatcatgacgagaagaagataataaaagacattctaaaggataaaggatttgtagttgaagtaaacactacttttgaagattttgtggcgataatcagttcaactaaaagatcaactacattagatgctggaaatatcaaattggctttcaatagtttactagaaaaggcagaagcccgtgaacgtgaaagagaaaaagaagaggctcggaagatgaaacgaaaagaatctgcatttaagagtatgttaaaacaagctgctcctccgatagaattggatgctgtctgggaagatatccgtgagagatttgtaaaagagccagcatttgaggacataactctagaatctgaaagaaaacgaatatttaaagattttatgcatgtgcttgagcatgaatgtcagcatcatcattcaaagaacaagaaacattctaagaaatctaaaaaacatcataggaaacgttcccgctctcgatcggggtcagattcagatgatgatgatagccattcaaagaaaaaaagacagcgatcagagtctcgttctgcttcagaacattcttctagtgcagagtctgagagaagttataaaaagtcaaaaaagcataagaagaaaagtaagaagaggagacataaatctgactctccagaatccgatgctgagcga

SEQ ID NO: 24960 - DNA, 8048 bp, Homo sapiens
  source 1..8048: mol_type = unassigned DNA
gatcgaaccctctcctccgaacccctcctttcgccttccccgcctcctcccctccgcctcgagcaccgcgcgcgcgcattcggtcccagccaccgctaacactacaggctgcttacccccgccccctccaccctacccctggcggcctcaggtttgtggggcgtacgtaactcgggcggggagggtgaaggtggcagacccccactgccccaccccctacggggtgaggcggtctaagctcgggaagctgggacactgttgtcttcccttcccctggggaagttggtagagttttcccgacggaggactcggcgcagaaacttcctccgtcctcctcctcccccccccccatgcaggcgacgccgagtgaggctgaggctgggggcgaatcgccgcagagctgcgtgtcggcggcgcattctgattggacagcggggaagcccgtcagcctgttggccccgctgatcccgccccgtagcgcagggcagcctttaacctttagccccagtgggcgccagccactcagatcgcttcttgttggtatgtgtagcggcagtggccgccggcggagcagtctgagcccgacgatgaggccggggacgggagctgagcgtggaggcctcatgatggggcaccctggcatgcattatgccccaatgggaatgcaccctatgggtcagagagcgaatatgcctcctgtacctcatggaatgatgccgcagatgatgccccctatgggagggccaccaatgggacaaatgcctggaatgatgtcgtcagtaatgcctggaatgatgatgtctcatatgtctcaggcttccatgcagcctgccttaccgccaggagtaaatagtatggatgtagcagcaggtacagcatctggtgcaaaatcaatgtggactgaacataaatcacctgatggaaggacttactactacaacactgaaaccaaacagtctacctgggagaaaccagatgatcttaaaacacctgctgagcaactcttatctaaatgcccctggaaggaatacaaatcagattctggaaagccttactattataattctcaaacaaaagaatctcgctgggccaaacctaaagaacttgaggatcttgaaggataccagaataccattgttgctggaagtcttattacaaaatcaaacctgcatgcaatgatcaaagctgaagaaagcagtaagcaagaagagtgcaccacaacatcaacagccccagtccctacaacagaaattccgaccacaatgagcaccatggctgctgccgaagcagcagctgctgttgttgcagcagcagcagcggcagcagcagcagcagctgcagccaatgctaatgcttccacttctgcttctaatactgtcagtggaactgttccagttgttcctgagcctgaagttacttccattgttgctactgttgtagataatgagaatacagtaactatttcaactgaggaacaagcacaacttactagtacccctgctattcaggatcaaagtgtggaagtatccagtaatactggagaagaaacatctaagcaagaaactgtagctgattttactcccaaaaaagaagaggaggagagccaaccagcaaagaaaacatacacttggaatacaaaggaagaggcaaagcaagcttttaaagaattattgaaagaaaagcgggtaccatcgaatgcttcatgggagcaggctatgaaaatgattattaatgatccacgatacagtgctttggcaaagttaagtgaaaaaaagcaagcctttaatgcctataaagtccagacagaaaaagaagaaaaagaagaagcaagatcaaagtacaaagaggctaaggaatcctttcagcgttttcttgaaaatcatgagaaaatgacttctacaaccagatacaaaaaagcagagcaaatgtttggagagatggaagtttggaatgcaatatcagaacgtgatcgtcttgaaatctatgaagatgttttgttctttctttcaaaaaaagaaaaggaacaagcaaagcagttgcgaaagagaaattgggaagccttaaaaaacatacttgacaacatggctaatgtaacatactctaccacttggtctgaagcccagcagtatctgatggataatccaacttttgcagaagatgaggagttacaaaatatggacaaagaagatgcattaatttgctttgaagaacacattcgggctttagaaaaggaggaagaagaagaaaaacagaagagtttgctgagagaaaggagacgacagcgaaaaaatagggaatctttccagatatttttagatgaattacatgaacatggacaactgcattctatgtcatcttggatggaattgtatccaactattagttctgatattagattcactaatatgcttggtcagcctggatcaactgcacttgatcttttcaagttttatgttgaggatcttaaagcacgttatcatgacgagaagaagataataaaagacattctaaaggataaaggatttgtagttgaagtaaacactacttttgaagattttgtggcgataatcagttcaactaaaagatcaactacattagatgctggaaatatcaaattggctttcaatagtttactagaaaaggcagaagcccgtgaacgtgaaagagaaaaagaagaggctcggaagatgaaacgaaaagaatctgcatttaagagtatgttaaaacaagctgctcctccgatagaattggatgctgtctgggaagatatccgtgagagatttgtaaaagagccagcatttgaggacataactctagaatctgaaagaaaacgaatatttaaagattttatgcatgtgcttgagcatgaatgtcagcatcatcattcaaagaacaagaaacattctaagaaatctaaaaaacatcataggaaacgttcccgctctcgatcggggtcagattcagatgatgatgatagccattcaaagaaaaaaagacagcgatcagagtctcgttctgcttcagaacattcttctagtgcagagtctgagagaagttataaaaagtcaaaaaagcataagaagaaaagtaagaagaggagacataaatctgactctccagaatccgatgctgagcgagagaaggataaaaaagaaaaagatcgggaaagtgaaaaagacagaactagacaaagatcagaatcaaaacacaaatcgcctaagaaaaagactggaaaggattctggtaattgggatacttctggcagcgaactgagtgaaggggaattggaaaagcgcagaagaacccttttggagcaactggatgatgatcaataaattataccaaatatatgtttacagtatgatttaaagtctgattcagaccagggactctattttaagttcaactgaaataacactgggttttaattatatcacaggaaaaaaaaagtgcatttaagtattgttatcgtggactttataaaagcaaaggaaattgaaagtaacttttgattctgtatcaagaatcatattttcatacagtcataactgtctttctgtgaccctttcacagggcactgtaggatggattaaaggtggcaatttactgataactgcagatgtctctactttgttctaaaatctaagtcatgaggtgatttgatttactttatagaagctggattttgaagatctaatgaaaaattttttgataatatagtagtacaaaaaaagcaccagcaactgataaaaattgcttttttgtgcgctacccaactggttaaagccaatgtgatcttttatggtgaaactcctaagaaacaggtggttttgctggaaacttggtagacccttaattatagtggtgctaatgagcactactgtaatataaagccaccattattttttatcaaacatctgaatacattttacaaaggctattgtgagggcattattttgagcatctattttgaggtgatgtttaaaaaaactttaacatcaaatcaaattgtaaattaatttaaatatattgccttaaggacctactaaagaatgtgccaccagactttaagtgatagttgcaatatccttgtctaaaaaaaaaaaaaaagttgacttaaacattttctttaacagttgtcttttttttctaaattcagtctttctcttgcttttttttccctgctattgaggaagtattttgccttccctactcactgagaagtattgacttcgtggtacacattctaaagcatttctgatttgaatatttttgtacatttttatcaattattaaaccttctcttctagtgtgtactagtatttatttctacttaaactgctcagctctaaagaaattgtatgatcactttaaaggtactaaatccctgaaattttgcttcatcttacccacaccgctagtttactttccttttttaatatttaagaatattataaatcagtgcatttgaggtccctagatttgtttttcacctatgaattttttacagactattttagagaggctgtggtttgaagacagaatactctttacatgctaacttttgaaggttggtaatgtaatttatactattttccttcagtgcaggagattttttaagtaaataagtaaattttagcacctattcttcggtattatctgtgttattcttttaatgtgtacacttgaagagatcctatttcaaagttgggattttgaagaacaaaaagtttttttcttacccatcctagtgagttttgaaagtgggcctgaccagaatgtctctttcccattttgccccgtttgaattaaatataatgtctactctttaaaggctgaaggggtgggtgaggggattgtttctcattttgtctcccaagtcatttttctgctgtgaaatatgaccaggcttgtaggaagactcatcttggagaaaatgtgaagtaatcaaattgcttgagattagtctcctattgtatattagagccaaaacacataataactttggcaacagggagttgtctagactcaattttcagaggtcccattgtagtgagttaatattgctaatcatgtcaatcacttgacatggaagtcagtggcaaatctttaaagtatgcatttgatactggcaaatatatactactgatgtttcacaaaagaatcttagaatctgtagaaaacattaattacttccatgaattatttctaaagtataactttaaagttttgatttttctatttaaataaaaagctattgatgtgttttagcatgtcctcaaaatagattcctgtatttcttacagagataatcttactataaccgcaaatccctacaacacagtataaagtttccctgtagttcacccatgaaaattatttgacttaaaaacaaccatagtagtaagccaattgcaattcaaaatgcaacatccttgccataaaagatgtaacttaagtgactgtgatcctttgtctacctttcaggatcccatcaaatgggatttagttgctagaaagatacttgacagtctgaaggcacaggtgataagattttgttctctgtgaatatttttaaactaataggttatgtttttaaatcttcaatttggtaaaaaactgaaacgtcttggaatattggttctattagagttaaatatggtaaaacaggaaagcgtgtttattttcagataaggggaatttatacttttcattaaagtcttggagtcttaggaaaatgttgagggtttgtcttcccccagtgtcattaatactaatgaactattagatcaaattcacttatacatttaatatcatagttattcaaaatcaggactttaaatatttttttctcccagttcatatttctttgtgcgaaaattgaatttgtatgaaaagttagataattaagctaatcaagtatgaagtatacactcttcctaagtgaatttaaataatgtaatgcttttaaataaaagcagtggtcccaccacatttttttcagcatagtagctggcattttgttatcattagccagagtagcttcagcatataagttattgatgttttccaacttcaaaagtgcattttatgcctcccagtaaatttgataatgatttgtcacagctttgtcatcttttgacttttgcttatgggcctcacttcgtacaactataacatgaaaaaggattgtcctaaagtaagggaatcagttaatggtaggatgaagaaactgtaaaaactcctagaaaaaaacctgtgtgcatttttctggaaagttttcaaactgtgtaattcagttttcattcaattatataatttggttatatgctttaaaaaacatttgtctaaatgttcccggttttcttctggtcttagagtcagctgagtgctggctatgcagccactcgtatttttgcatccagaaaggagtaactccctttatatgaagatttttttttttaagcttagatgctatgtaagagaaaactatttgtaatcacatagtacccagggaggagtgatgaatgcttttttaaaaaaggatatttaagtatattatgtaatttaaatataaattatcaaactaaaaaacttcagcttttaaaactttctaaacaaaatgaagcaaagtacattaattccttctatcttaaatctgagactttttattttcccttgggtatatatttctctcagtgttaggtagatgttaattcaaccatcctacattctctatataaaattacactcattttacatgaaagcaaaataatgtcgttactttcatggaactgtgttctaacaggcttataatctcattctgtgcttctggtaatggcgtataccagtctgatgattcttaccatccttattcttacattactcttccaattgttttgattttaactggtggtcatgtaagttcctcggtggcagggatttatctggttcatttactgttatatatccttgtggaataggacagtgcctggcatataataggcacttttggaatgaatgtaaaatactagttgaaatatgtattcatctggcatccatggtacccatcatctgtattaaagggcttaaaaaagcatcattgcaataaaccatactaacccaccactaaagtcacagtcataattgaagtgcacccaaaataaggtccagtgactgtaccttagcttttacttcagacatgtccaaaacttgtgagaacatacaatttaaagttgaaaactcatcattttgggctatttttgaatagggctgaaatatggtgacatgtcaggcactcagttttttggagctgtcttaaaggtgaggtggaaagtgagagatgattttgctctaattacccacacattctccctaaccctccattttaagacacttagctataatagcttaagactatcaaaactgcttttgtgattctcagtaggatctagttcaaagccatctcagtgctagtgattggtaattgttaatttgatggtaattaccctacttgtaaagttgacattcatactggctaatcctccctgcccctagtcgtggacaatgaaacagtgagtggctggtgaattagatcagattcaaactaagccattccttgatgctattcttcactgctgttccttagggtatctaaatgtgttatttataaacatttttgggggctcctgcctgcaaacttcggtaggtgttggtcttccccacctctacaactgagccaaggacttgttctgaaaggtgagtaataaataagggaacaaggtttctattttctgtgtttgtaattaccagattttcacctctgtttatatattattctgatgtaaaagaacctcatagttatataaaattagaccttttgtaaataaatataatttattagaaaaaatggtatcttttactaaattggatttgtgtcagttttttcctttaagcaccactcaggcagcaagctctatgctgtgagagttgctggaggcccacgttatgttttctcagtgtaattcctctttttcttgataaaaaga

SEQ ID NO: 24961 - DNA, 3134 bp, Homo sapiens
  source 1..3134: mol_type = unassigned DNA
actcagatcgcttcttgttggtatgtgtagcggcagtggccgccggcggagcagtctgagcccgacgatgaggccggggacgggagctgagcgtggaggcctcatgatggggcaccctggcatgcattatgccccaatgggaatgcaccctatgggtcagagagcgaatatgcctcctgtacctcatggaatgatgccgcagatgatgccccctatgggagggccaccaatgggacaaatgcctggaatgatgtcgtcagtaatgcctggaatgatgatgtctcatatgtctcaggcttccatgcagcctgccttaccgctaaactaaacggatattcactctgaagtgggataaatgaagatgtggagtttcatgttcatgtagggcaggttttgccactatagtgagttttggtaccatacttgaaaaaagttggctttcagagggttttggtttccagaattgtgggtaaaggattgaggaccttgtgtacacttggtgaccatataacatttaaactactcccgtagtctcggttgctgatctcttttacaatttatagcaagctcggggaactgagaccactaaaagttttgctaagaatatgagtcagaggcttgaggattatacatagcagccaggagtaaatagtatggatgtagcagcaggtacagcatctggtgcaaaatcaatgtggactgaacataaatcacctgatggaaggacttactactacaacactgaaaccaaacagtctacctgggagaaaccagatgatcttaaaacacctgctgagcaactcttatctaaatgcccctggaaggaatacaaatcagattctggaaagccttactattataattctcaaacaaaagaatctcgctgggccaaacctaaagaacttgaggatcttgaaggataccagaataccattgttgctggaagtcttattacaaaatcaaacctgcatggaatgttaacggaattaaagtatagtaagcaagaagagtgcaccacaacatcaacagccccagtccctacaacagaaattccgaccacaatgagcaccatggctgctgccgaagcagcagctgctgttgttgcagcagcagcagcggcagcagcagcagcagctgcagccaatgctaatgcttccacttctgcttctaatactgtcagtggaactgttccagttgttcctgagcctgaagttacttccattgttgctactgttgtagataatgagaatacagtaactatttcaactgaggaacaagcacaacttactagtacccctgctattcaggatcaaagtgtggaagtatccagtaatactggagaagaaacatctaagcaagaaactgtagctgattttactcccaaaaaagaagaggaggagagccaaccagcaaagaaaacatacacttggaatacaaaggaagaggcaaagcaagcttttaaagaattattgaaagaaaagcgggtaccatcgaatgcttcatgggagcaggctatgaaaatgattattaatgatccacgatacagtgctttggcaaagttaagtgaaaaaaagcaagcctttaatgcctataaagtccagacagaaaaagaagaaaaagaagaagcaagatcaaagtacaaagaggctaaggaatcctttcagcgttttcttgaaaatcatgagaaaatgacttctacaaccagatacaaaaaagcagagcaaatgtttggagagatggaagtttggaatgcaatatcagaacgtgatcgtcttgaaatctatgaagatgttttgttctttctttcaaaaaaagaaaaggaacaagcaaagcagttgcgaaagagaaattgggaagccttaaaaaacatacttgacaacatggctaatgtaacatactctaccacttggtctgaagcccagcagtatctgatggataatccaacttttgcagaagatgaggagttacaaaatatggacaaagaagatgcattaatttgctttgaagaacacattcgggctttagaaaaggaggaagaagaagaaaaacagaagagtttgctgagagaaaggagacgacagcgaaaaaatagggaatctttccagatatttttagatgaattacatgaacatggacaactgcattctatgtcatcttggatggaattgtatccaactattagttctgatattagattcactaatatgcttggtcagcctggatcaactgcacttgatcttttcaagttttatgttgaggatcttaaagcacgttatcatgacgagaagaagataataaaagacattctaaaggataaaggatttgtagttgaagtaaacactacttttgaagattttgtggcgataatcagttcaactaaaagatcaactacattagatgctggaaatatcaaattggctttcaatagtttactagaaaaggcagaagcccgtgaacgtgaaagagaaaaagaagaggctcggaagatgaaacgaaaagaatctgcatttaagagtatgttaaaacaagctgctcctccgatagaattggatgctgtctgggaagatatccgtgagagatttgtaaaagagccagcatttgaggacataactctagaatctgaaagaaaacgaatatttaaagattttatgcatgtgcttgagcatgaatgtcagcatcatcattcaaagaacaagaaacattctaagaaatctaaaaaacatcataggaaacgttcccgctctcgatcggggtcagattcagatgatgatgatagccattcaaagaaaaaaagacagcgatcagagtctcgttctgcttcagaacattcttctagtgcagagtctgagagaagttataaaaagtcaaaaaagcataagaagaaaagtaagaagaggagacataaatctgactctccagaatccgatgctgagcgagagaaggataaaaaagaaaaagatcgggaaagtgaaaaagacagaactagacaaagatcagaatcaaaacacaaatcgcctaagaaaaagactggaaaggattctggtaattgggatacttctggcagcgaactgagtgaaggggaattggaaaagcgcagaagaacccttttggagcaactggatgatgatcaataa

SEQ ID NO: 24962 - DNA, 1358 bp, Homo sapiens
  source 1..1358: mol_type = unassigned DNA
tctgagcccgacgatgaggccggggacgggagctgagcgtggaggcctcatggtgagtgaaatggagagccatcctccctcgcagggtcctggggacggggagcggagattgtccggctcaagcctctgctccggctcttgggtctctgctgacggcttcctgaggagacggccctcgatggggcaccctggcatgcattatgccccaatgggaatgcaccctatgggtcagagagcgaatatgcctcctgtacctcatggaatgatgccgcagatgatgccccctatgggagggccaccaatgggacaaatgcctggaatgatgtcgtcagtaatgcctggaatgatgatgtctcatatgtctcaggcttccatgcagcctgccttaccgccaggagtaaatagtatggatgtagcagcaggtacagcatctggtgcaaaatcaatgtggactgaacataaatcacctgatggaaggacttactactacaacactgaaaccaaacagtctacctgggagaaaccagatgatcttaaaacacctgctgagcaactcttatctaaatgcccctggaaggaatacaaatcagattctggaaagccttactattataattctcaaacaaaagaatctcgctgggccaaacctaaagaacttgaggatcttgaaggataccagaataccattgttgctggaagtcttattacaaaatcaaacctgcatgcaatgatcaaagctgaagaaagcagtaagcaagaagagtgcaccacaacatcaacagccccagtccctacaacagaaattccgaccacaatgagcaccatggctgctgccgaagcagcagctgctgttgttgcagcagcagcagcggcagcagcagcagcagctgcagccaatgctaatgcttccacttctgcttctaatactgtcagtggaactgttccagttgttcctgagcctgaagttacttccattgttgctactgttgtagataatgagaatacagtaactatttcaactgaggaacaagcacaacttactagtacccctgctattcaggatcaaagtgtggaagtatccagtaatactggagaagaaacatctaagcaagaaactgtagctgattttactcccaaaaaagaagaggaggagagccaaccagcaaagaaaacatacacttggaatacaaaggaagaggcaaagcaagcttttaaagaattattgaaagaaaagcgggtaccatcgaatgcttcatgggagcaggctatgaaaatgattattaatgatccacgatacagtgctttggcaaagttaagtgaaaaaaagcaagcctttaatgcctataaagtccagacag

SEQ ID NO: 24963 - DNA, 3044 bp, Homo sapiens
  source 1..3044: mol_type = unassigned DNA
ggcgacactttgctacggagtgcatcggacgtcgaagcctagagtctctgcgtctttccctcttccgctgcctcattcctttccttcctagccttggtcgtcgccgccaccatgaacaagaagaagaaaccgttcctagggatgcccgcgcccctcggctacgtgccggggctgggccggggcgccactggcttcaccacgcggtcagacattgggcccgcccgtgatgcaaatgaccctgtggatgatcgccatgcacccccaggcaagagaaccgttggggaccagatgaagaaaaatcaggctgctgacgatgacgacgaggatctaaatgacaccaattacgatgagtttaatggctatgctgggagcctcttctcaagtggaccctacgagaaagatgatgaggaagcagatgctatctatgcagccctggataaaaggatggatgaaagaagaaaagaaagacgggagcaaagggagaaagaagaaatagagaaatatcgtatggaacgccccaaaatccaacagcagttctcagacctcaagaggaagttggcagaagtcacagaagaagagtggctgagcatccccgaggttggcgatgccagaaataaacgtcagcggaacccacgctatgagaagctgacccctgttcctgacagtttctttgccaaacatttacagaccggagagaaccatacctcagtggatccccgacaaactcaatttggaggtcttaacacaccctatccaggtggactaaacactccatacccaggtggaatgacgccaggactgatgacacctggcacaggtgagctggacatgaggaagattggccaagcgaggaacactctgatggacatgaggctgagccaggtgtctgactccgtgagtggacagaccgtcgttgaccccaaaggctacctgacggatttaaattccatgatcccgacacacggaggagacatcaatgatatcaagaaggcgcgactgctcctcaagtctgttcgggagacgaaccctcatcacccgccagcctggattgcatcagcccgcctggaagaagtcactgggaagctacaagtagctcggaaccttatcatgaaggggacggagatgtgccccaagagtgaagatgtctggctggaagcagccaggttgcagcctggggacacagccaaggccgtggtagcccaagctgtccgtcatctcccacagtctgtcaggatttacatcagagccgcagagctggaaacggacattcgtgcaaagaagcgggttcttcggaaagccctcgagcatgttccaaactcggttcgcttgtggaaagcagccgttgagctggaagaacctgaagatgctagaatcatgctgagccgagctgtggagtgctgccccaccagcgtggagctctggcttgctctggcaaggctggagacctatgaaaatgcccgcaaggtcttgaacaaggcgcgggagaacattcctacagaccgacatatctggatcacggctgctaagctggaggaagccaatgggaacacgcagatggtggagaagatcatcgaccgagccatcacctcgctgcgggccaacggtgtggagatcaaccgtgagcagtggatccaggatgccgaggaatgtgacagggctgggagtgtggccacctgccaggccgtcatgcgtgccgtgattgggattgggattgaggaggaagatcggaagcatacctggatggaggatgctgacagttgtgtagcccacaatgccctggagtgtgcacgagccatctacgcctacgccctgcaggtgttccccagcaagaagagtgtgtggctgcgcgccgcgtacttcgagaagaaccatggcactcgggagtccctggaagcactcctgcagagggctgtggcccactgccccaaagcagaggtgctgtggctcatgggcgccaagtccaagtggctggcaggggatgtgcctgcagcaaggagcatcctggccctggccttccaggccaaccccaacagtgaggagatctggctggcagccgtgaagctggagtccgagaatgatgagtacgagcgggcccggaggctgctggccaaggcgcggagcagtgcccccaccgcccgggtgttcatgaagtctgtgaagctggagtgggtgcaagacaacatcagggcagcccaagatctgtgcgaggaggccctgcggcactatgaggacttccccaagctgtggatgatgaaggggcagatcgaggagcagaaggagatgatggagaaggcgcgggaagcctataaccaggggttgaagaagtgtccccactccacacccctgtggcttttgctctctcggctggaggagaagattgggcagcttactcgagcacgggccattttggaaaagtctcgtctgaagaacccaaagaaccctgggctgtggttggagtccgtgcggctggagtaccgtgcggggctgaagaacatcgcaaatacactcatggccaaggcgctgcaggagtgccccaactccggtatcctgtggtctgaggccatcttcctcgaggcaaggccccagaggaggaccaagagcgtggatgccctgaagaagtgtgagcatgacccccatgtgctcctggccgtggccaagctgttttggagtcagcggaagatcaccaaggccagggagtggttccaccgcactgtgaagattgactcggacctgggggatgcctgggccttcttctacaagtttgagctgcagcatggcactgaggagcagcaggaggaggtgaggaagcgctgtgagagtgcagagcctcggcatggggagctgtggtgcgccgtgtccaaggacatcgccaactggcagaagaagatcggggacatccttaggctggtggccggccgcatcaagaacaccttctgattgagcggttgccatggccggtctccgtggggcagggttgggccgcatgtggaagggctctgagctgtgtcctccttcattaaaagtttttatgtctcgtgtcagaa

SEQ ID NO: 24964 - DNA, 2920 bp, Homo sapiens
  source 1..2920: mol_type = unassigned DNA
ggcgacactttgctacggagtgcatcggacgtcgaagcctagagtctctgcgtctttccctcttccgctgcctcattcctttccttcctagccttggtcgtcgccgccaccatgaacaagaagaagaaaccgttcctagggatgcccgcgcccctcggctacgtgccggggctgggccggggcgccactggcttcaccacgcggtcagacattgggcccgcccgtgatgcaaatgaccctgtggatgatcgccatgcacccccaggcaagagaaccgttggggaccagatgaagaaaaatcaggctgctgacgatgacgacgaggatctaaatgacaccaattacgatgagtttaatggctatgctgggagcctcttctcaagtggaccctacgagaaagatgatgaggaagcagatgctatctatgcagccctggataaaaggatggatgaaagaagaaaagaaagacgggagcaaagggagaaagaagaaatagagaaatatcgtatggaacgccccaaaatccaacagcagttctcagacctcaagaggaagttggcagaagtcacagaagaagagtggctgagcatccccgaggttggcgatgccagaaataaacgtcagcggaacccacgctatgagaagctgacccctgttcctgacagtttctttgccaaacatttacagaccggagagaaccatacctcagtggatccccgacaaactcaatttggaggtcttaacacaccctatccaggtggactaaacactccatacccaggtggaatgacgccaggactgatgacacctggcacaggtgagctggacatgaggaagattggccaagcgaggaacactctgatggacatgaggctgagccaggtgtctgactccgtgagtggacagaccgtcgttgaccccaaaggctacctgacggatttaaattccatgatcccgacacacggaggagacatcaatgatatcaagaaggcgcgactgctcctcaagtctgttcgggagacgaaccctcatcacccgccagcctggattgcatcagcccgcctggaagaagtcactgggaagctacaagtagctcggaaccttatcatgaaggggacggagatgtgccccaagagtgaagatgtctggctggaagcagccaggttgcagcctggggacacagccaaggccgtggtagcccaagctgtccgtcatctcccacagtctgtcaggatttacatcagagccgcagagctggaaacggacattcgtgcaaagaagcgggttcttcggaaagccctcgagcatgttccaaactcggttcgcttgtggaaagcagccgttgagctggaagaacctgaagatgctagaatcatgctgagccgagctgtggagtgctgccccaccagcgtggagctctggcttgctctggcaaggctggagacctatgaaaatgcccgcaaggtcttgaacaaggcgcgggagaacattcctacagaccgacatatctggatcacggctgctaagctggaggaagccaatgggaacacgcagatggtggagaagatcatcgaccgagccatcacctcgctgcgggccaacggtgtggagatcaaccgtgagcagtggatccaggatgccgaggaatgtgacagggctgggagtgtggccacctgccaggccgtcatgcgtgccgtgattgggattgggattgaggaggaagatcggaagcatacctggatggaggatgctgacagttgtgtagcccacaatgccctggagtgtgcacgagccatctacgcctacgccctgcaggtgttccccagcaagaagagtgtgtggctgcgcgccgcgtacttcgagaagaaccatggcactcgggagtccctggaagcactcctgcagagggctgtggcccactgccccaaagcagaggtgctgtggctcatgggcgccaagtccaagtggctggcaggggatgtgcctgcagcaaggagcatcctggccctggccttccaggtgttcatgaagtctgtgaagctggagtgggtgcaagacaacatcagggcagcccaagatctgtgcgaggaggccctgcggcactatgaggacttccccaagctgtggatgatgaaggggcagatcgaggagcagaaggagatgatggagaaggcgcgggaagcctataaccaggggttgaagaagtgtccccactccacacccctgtggcttttgctctctcggctggaggagaagattgggcagcttactcgagcacgggccattttggaaaagtctcgtctgaagaacccaaagaaccctgggctgtggttggagtccgtgcggctggagtaccgtgcggggctgaagaacatcgcaaatacactcatggccaaggcgctgcaggagtgccccaactccggtatcctgtggtctgaggccatcttcctcgaggcaaggccccagaggaggaccaagagcgtggatgccctgaagaagtgtgagcatgacccccatgtgctcctggccgtggccaagctgttttggagtcagcggaagatcaccaaggccagggagtggttccaccgcactgtgaagattgactcggacctgggggatgcctgggccttcttctacaagtttgagctgcagcatggcactgaggagcagcaggaggaggtgaggaagcgctgtgagagtgcagagcctcggcatggggagctgtggtgcgccgtgtccaaggacatcgccaactggcagaagaagatcggggacatccttaggctggtggccggccgcatcaagaacaccttctgattgagcggttgccatggccggtctccgtggggcagggttgggccgcatgtggaagggctctgagctgtgtcctccttcattaaaagtttttatgtctcgtgtc

SEQ ID NO: 24965 - DNA, 7273 bp, Homo sapiens
  source 1..7273: mol_type = unassigned DNA
ggcgctgggaacgcggagcggacgcagtctggccgccattgcgctgcggggaaagcggcctcttgtgtgagggcctgtgggattctccggatatggccggagtgtttccttatcgagggccgggtaacccggtgcctggccctctagccccgctaccggactacatgtcggaggagaagctgcaggagaaagctcgaaaatggcagcaattgcaggccaagcgctatgcagaaaagcggaagtttgggtttgtggatgcccagaaggaagacatgcccccagaacatgtcaggaagatcattcgagaccatggagacatgaccaacaggaagttccgccatgacaaaagggtttacttgggtgccctaaagtacatgccccacgcagtcctcaaactcctggagaacatgcctatgccttgggagcagattcgggatgtgcctgtgctgtaccacatcactggagccatttccttcgtcaatgagattccctgggtcattgaacctgtctacatctcccagtgggggtcaatgtggattatgatgcgccgagaaaaaagagataggaggcatttcaagaggatgcgttttcccccttttgatgatgaggagccgcccttggactatgctgacaacatcctagatgttgagccactggaggccattcagctagagctggaccctgaggaggacgcccctgtgttggactggttctatgaccaccagccgttgagggacagcaggaagtatgtaaatggctccacttaccagcgctggcagttcacactacctatgatgtcgactctctaccgcctggctaatcagctcctgacagacttggtggatgacaactacttctacctgtttgatttgaaggccttctttacgtccaaggcactcaatatggccattcctggaggccccaaatttgaacctcttgttcgagacatcaacctacaggatgaagactggaatgaattcaatgatattaacaagattatcatccggcagcctatccgcactgagtacaagattgcttttccttacttgtacaacaatcttccacaccatgtccacctcacctggtaccatactcccaatgttgtattcatcaaaactgaggatcctgacttgccagctttctactttgaccctttgatcaacccaatctcccataggcactcagtcaagagccaggaaccattgccggatgatgatgaggaatttgagctcccggagtttgtggagcccttcctgaaggacacacccctctatacagacaatacagccaatggcattgccctgctctgggccccgcggcccttcaacctacgctctggtcgcacccgtcgggccctggacataccccttgtcaagaactggtatcgggagcattgtcctgccgggcagcctgtgaaagtgagggtctcctaccagaagctgcttaagtactatgtgctgaatgccctgaagcatcggccccctaaggctcaaaagaagaggtatttgttccgctccttcaaagccaccaaattctttcagtccacaaagctggactgggtggaggttgggctccaggtttgccgccagggctacaacatgctcaaccttctcattcaccgcaaaaacctcaactacctgcacctggactacaacttcaacctcaagcctgtgaaaacgctcaccaccaaggaaagaaagaaatctcgttttgggaatgctttccacctgtgtcgggaagttctgcgtttgactaagctggtggtggatagtcacgtgcagtatcggctgggcaatgtggatgccttccagctggcagatggattgcagtatatatttgcccatgttgggcagttgacgggcatgtatcgatacaaatacaagctgatgcgacagattcgcatgtgcaaggacctgaagcatctcatctattatcgtttcaacacgggccctgtagggaagggtcctggctgtggcttctgggctgccggttggcgagtctggctctttttcatgcgtggcattacccctttattagagcgatggcttggcaacctcctggcccggcagtttgaaggtcgacactcaaagggggtggcaaagacagtaacaaagcagcgagtggagtcacattttgaccttgagctgcgggcagctgtgatgcatgatattctggacatgatgcctgaggggatcaagcagaacaaggcccggacaatcctgcagcacctcagtgaagcctggcgctgctggaaagccaacattccctggaaggtccctgggctgccgacgcccatagagaatatgatccttcgatacgtgaaggccaaggctgactggtggaccaacactgcccactacaaccgagaacggatccgccgaggggccactgtggacaagactgtttgtaaaaagaatctgggccgcctcacccggctctatctgaaggcagaacaggagcggcagcacaactacctgaaggacgggccttacatcacagcggaggaagcagtggcagtatataccaccacagtgcattggttggaaagccgcaggttttcacccatcccattccccccactctcctataagcatgacaccaagttgctcatcttggcattggagcggctcaaggaagcttatagtgtgaagtctcggttgaaccagtctcagagggaggagctaggtctgatcgagcaggcctacgataacccccacgaggcgctgtcccgcatcaagcgtcacctcctcacacagagagccttcaaagaggtgggcattgagttcatggatctgtatagccacctcgttccagtatatgatgttgagcccctggagaagataactgatgcttacctggaccagtacctgtggtatgaagccgacaagcgccgcctgttcccaccctggattaagcctgcagacacagaaccacctccgctgcttgtttacaagtggtgtcaaggcatcaataacctgcaggacgtgtgggagacgagtgaaggcgagtgcaatgtcatgctggaatcccgctttgagaagatgtatgagaagatcgacttgactctgctcaacaggctgctgcgcctcatcgtggaccacaacatagccgactacatgacagccaagaacaacgtcgtcatcaactataaggacatgaaccatacgaattcatatgggatcatcagaggcctgcagtttgcctcattcatcgtgcagtattatggcctggtgatggatttgcttgtattgggattgcaccgggccagtgagatggctgggccccctcagatgccaaatgactttctcagtttccaggacatagccactgaggctgcccaccccatccgtctcttctgcagatacattgatcgcatccatatttttttcaggttcacagcagatgaggctcgggacctgattcaacgttacctgacagagcaccctgaccccaataatgaaaacatcgttggctataataacaagaagtgctggccccgagatgcccgcatgcgcctcatgaaacatgatgttaacttaggccgggcggtattctgggacatcaagaaccgcttgccacggtcagtgactacagttcagtgggagaacagcttcgtgtctgtgtacagtaaggacaaccccaacctgctgttcaacatgtgtggcttcgagtgccgcatcctgcctaagtgccgcaccagctatgaggagttcacccacaaggacggggtctggaacctgcagaatgaggttactaaggagcgcacagctcagtgtttcctgcgtgtggacgatgagtcaatgcagcgcttccacaaccgcgtgcgtcagattctcatggcctctgggtccaccaccttcaccaagattgtgaataagtggaatacagctctcattggccttatgacatactttcgggaggctgtggtgaacacccaagagctcttggacttactggtgaagtgtgagaacaaaatccagacacgtatcaagattggactcaactccaagatgccaagtcggttccccccggttgtgttctacacccctaaggagttgggtggactcggcatgctctcaatgggccatgtgctcatcccccaatccgacctcaggtggtccaaacagacagatgtaggtatcacacactttcgttcaggaatgagccatgaagaagaccagctcattcccaacttgtaccgctacatacagccatgggagagcgagttcattgattctcagcgggtctgggctgagtacgcactcaagaggcaagaggccattgctcagaacagacgcctgactttagaagacctagaagattcatgggatcgtggcattcctcgaatcaataccctcttccagaaggaccggcacacactggcttatgataagggctggcgtgtcagaactgactttaagcagtatcaggttttgaagcagaatccgttctggtggacacaccagcggcatgatgggaagctctggaacctgaacaactaccgtacagacatgatccaggccctgggcggtgtggaaggcattctggaacacacactctttaagggcacttacttccctacctgggaggggcttttctgggagaaggccagtggctttgaggaatctatgaagtggaagaagctaactaatgctcagcgatcaggactgaaccagattcccaatcgtagattcaccctctggtggtccccgaccattaatcgagccaatgtatatgtaggctttcaggtgcagctagacctgacgggtatcttcatgcacggcaagatccccacgctgaagatctctctcatccagatcttccgagctcacttgtggcagaagatccatgagagcattgttatggacttatgtcaggtgtttgaccaggaacttgatgcactggaaattgagacagtacaaaaggagacaatccatccccgaaagtcatataagatgaactcttcctgtgcagatatcctgctctttgcctcctataagtggaatgtctcccggccctcattgctggctgactccaaggatgtgatggacagcaccaccacccagaaatactggattgacatccagttgcgctggggggactatgattcccacgacattgagcgctacgcccgggccaagttcctggactacaccaccgacaacatgagtatctacccttcgcccacaggtgtactcatcgccattgacctggcctataacttgcacagtgcctatggaaactggttcccaggcagcaagcctctcatacaacaggccatggccaagatcatgaaggcaaaccctgccctgtatgtgttacgtgaacggatccgcaaggggctacagctctattcatctgaacccactgagccttatttgtcttctcagaactatggtgagctcttctccaaccagattatctggtttgtggatgacaccaacgtctacagagtgactattcacaagacctttgaagggaacttgacaaccaagcccatcaacggagccatcttcatcttcaacccacgcacagggcagctgttcctcaagataatccacacgtccgtgtgggcgggacagaagcgtttggggcagttggctaagtggaagacagctgaggaggtggccgccctgatccgatctctgcctgtggaggagcagcccaagcagatcattgtcaccaggaagggcatgctggacccactggaggtgcacttactggacttccccaatattgtcatcaaaggatcggagctccaactccctttccaggcgtgtctcaaggtggaaaaattcggggatctcatccttaaagccactgagccccagatggttctcttcaacctctatgacgactggctcaagactatttcatcttacacggccttctcccgtctcatcctgattctgcgtgccctacatgtgaacaacgatcgggcaaaagtgatcctgaagccagacaagactactattacagaaccacaccacatctggcccactctgactgacgaagaatggatcaaggtcgaggtgcagctcaaggatctgatcttggctgactacggcaagaaaaacaatgtgaacgtggcatcactgacacaatcagaaattcgagacatcatcctgggtatggagatctcggcaccgtcacagcagcggcagcagatcgctgagatcgagaagcagaccaaggaacaatcgcagctgacggcaacacagactcgcactgtcaacaagcatggcgatgagatcatcacctccaccaccagcaactatgagacccagactttctcatccaagactgagtggagggtcagggccatctctgctgccaacctgcacctaaggaccaatcacatctatgtttcatctgacgacatcaaggagactggctacacctacatccttcccaagaatgtgcttaagaagttcatctgcatatctgaccttcgggcccaaattgcaggatacctatatggggtgagcccaccagataacccccaggtgaaggagatccgctgcattgtgatggtgccgcagtggggcactcaccagaccgtgcacctgcctggccagctgccccagcatgagtacctcaaggagatggaacccttaggttggatccacactcagcccaatgagtccccgcagttatcaccccaggatgtcaccacccatgccaagatcatggctgacaacccatcttgggatggcgagaagaccattatcatcacatgcagcttcacgccaggctcctgtacactgacggcctacaagctgacccccagtggctacgaatggggccgccagaacacagacaagggcaacaaccccaagggctacctgccttcacactatgagagggtgcagatgctgctgtcggaccgtttccttggcttcttcatggtccctgcccagtcctcgtggaactacaacttcatgggtgttcggcatgaccccaacatgaaatatgagctacagctggcgaaccccaaagagttctaccacgaggtgcacaggccctctcacttcctcaactttgctctcctgcaggagggggaggtttactctgcggatcgggaggacctgtatgcctgaccgtttccctgcctcctgcttcagcctcccgaggccgaagcctcagcccctccagacaggccgctgacattcagcagtttggcctctttccctctgtctgtgcttgtgttgttgacctcctgatggcttgtcatcctgaataaaatataataataaattttgtataaatagga

SEQ ID NO: 24966 - DNA, 7253 bp, Homo sapiens
  source 1..7253: mol_type = unassigned DNA
cggagcggacgcagtctggccgccattgcgctgcggggaaagcggcctcttgtgtgagggcctgtgggattctccggatatggccggagtgtttccttatcgagggccgggtaacccggtgcctggccctctagccccgctaccggactacatgtcggaggagaagctgcaggagaaagctcgaaaatggcagcaattgcaggccaagcgctatgcagaaaagcggaagtttgggtttgtggatgcccagaaggaagacatgcccccagaacatgtcaggaagatcattcgagaccatggagacatgaccaacaggaagttccgccatgacaaaagggtttacttgggtgccctaaagtacatgccccacgcagtcctcaaactcctggagaacatgcctatgccttgggagcagattcgggatgtgcctgtgctgtaccacatcactggagccatttccttcgtcaatgagattccctgggtcattgaacctgtctacatctcccagtgggggtcaatgtggattatgatgcgccgagaaaaaagagataggaggcatttcaagaggatgcgttttcccccttttgatgatgaggagccgcccttggactatgctgacaacatcctagatgttgagccactggaggccattcagctagagctggaccctgaggaggacgcccctgtgttggactggttctatgaccaccagccgttgagggacagcaggaagtatgtaaatggctccacttaccagcgctggcagttcacactacctatgatgtcgactctctaccgcctggctaatcagctcctgacagacttggtggatgacaactacttctacctgtttgatttgaaggccttctttacgtccaaggcactcaatatggccattcctggaggccccaaatttgaacctcttgttcgagacatcaacctacaggatgaagactggaatgaattcaatgatattaacaagattatcatccggcagcctatccgcactgagtacaagattgcttttccttacttgtacaacaatcttccacaccatgtccacctcacctggtaccatactcccaatgttgtattcatcaaaactgaggatcctgacttgccagctttctactttgaccctttgatcaacccaatctcccataggcactcagtcaagagccaggaaccattgccggatgatgatgaggaatttgagctcccggagtttgtggagcccttcctgaaggacacacccctctatacagacaatacagccaatggcattgccctgctctgggccccgcggcccttcaacctacgctctggtcgcacccgtcgggccctggacataccccttgtcaagaactggtatcgggagcattgtcctgccgggcagcctgtgaaagtgagggtctcctaccagaagctgcttaagtactatgtgctgaatgccctgaagcatcggccccctaaggctcaaaagaagaggtatttgttccgctccttcaaagccaccaaattctttcagtccacaaagctggactgggtggaggttgggctccaggtttgccgccagggctacaacatgctcaaccttctcattcaccgcaaaaacctcaactacctgcacctggactacaacttcaacctcaagcctgtgaaaacgctcaccaccaaggaaagaaagaaatctcgttttgggaatgctttccacctgtgtcgggaagttctgcgtttgactaagctggtggtggatagtcacgtgcagtatcggctgggcaatgtggatgccttccagctggcagatggattgcagtatatatttgcccatgttgggcagttgacgggcatgtatcgatacaaatacaagctgatgcgacagattcgcatgtgcaaggacctgaagcatctcatctattatcgtttcaacacgggccctgtagggaagggtcctggctgtggcttctgggctgccggttggcgagtctggctctttttcatgcgtggcattacccctttattagagcgatggcttggcaacctcctggcccggcagtttgaaggtcgacactcaaagggggtggcaaagacagtaacaaagcagcgagtggagtcacattttgaccttgagctgcgggcagctgtgatgcatgatattctggacatgatgcctgaggggatcaagcagaacaaggcccggacaatcctgcagcacctcagtgaagcctggcgctgctggaaagccaacattccctggaaggtccctgggctgccgacgcccatagagaatatgatccttcgatacgtgaaggccaaggctgactggtggaccaacactgcccactacaaccgagaacggatccgccgaggggccactgtggacaagactgtttgtaaaaagaatctgggccgcctcacccggctctatctgaaggcagaacaggagcggcagcacaactacctgaaggacgggccttacatcacagcggaggaagcagtggcagtatataccaccacagtgcattggttggaaagccgcaggttttcacccatcccattccccccactctcctataagcatgacaccaagttgctcatcttggcattggagcggctcaaggaagcttatagtgtgaagtctcggttgaaccagtctcagagggaggagctaggtctgatcgagcaggcctacgataacccccacgaggcgctgtcccgcatcaagcgtcacctcctcacacagagagccttcaaagaggtgggcattgagttcatggatctgtatagccacctcgttccagtatatgatgttgagcccctggagaagataactgatgcttacctggaccagtacctgtggtatgaagccgacaagcgccgcctgttcccaccctggattaagcctgcagacacagaaccacctccgctgcttgtttacaagtggtgtcaaggcatcaataacctgcaggacgtgtgggagacgagtgaaggcgagtgcaatgtcatgctggaatcccgctttgagaagatgtatgagaagatcgacttgactctgctcaacaggctgctgcgcctcatcgtggaccacaacatagccgactacatgacagccaagaacaacgtcgtcatcaactataaggacatgaaccatacgaattcatatgggatcatcagaggcctgcagtttgcctcattcatcgtgcagtattatggcctggtgatggatttgcttgtattgggattgcaccgggccagtgagatggctgggccccctcagatgccaaatgactttctcagtttccaggacatagccactgaggctgcccaccccatccgtctcttctgcagatacattgatcgcatccatatttttttcaggttcacagcagatgaggctcgggacctgattcaacgttacctgacagagcaccctgaccccaataatgaaaacatcgttggctataataacaagaagtgctggccccgagatgcccgcatgcgcctcatgaaacatgatgttaacttaggccgggcggtattctgggacatcaagaaccgcttgccacggtcagtgactacagttcagtgggagaacagcttcgtgtctgtgtacagtaaggacaaccccaacctgctgttcaacatgtgtggcttcgagtgccgcatcctgcctaagtgccgcaccagctatgaggagttcacccacaaggacggggtctggaacctgcagaatgaggttactaaggagcgcacagctcagtgtttcctgcgtgtggacgatgagtcaatgcagcgcttccacaaccgcgtgcgtcagattctcatggcctctgggtccaccaccttcaccaagattgtgaataagtggaatacagctctcattggccttatgacatactttcgggaggctgtggtgaacacccaagagctcttggacttactggtgaagtgtgagaacaaaatccagacacgtatcaagattggactcaactccaagatgccaagtcggttccccccggttgtgttctacacccctaaggagttgggtggactcggcatgctctcaatgggccatgtgctcatcccccaatccgacctcaggtggtccaaacagacagatgtaggtatcacacactttcgttcaggaatgagccatgaagaagaccagctcattcccaacttgtaccgctacatacagccatgggagagcgagttcattgattctcagcgggtctgggctgagtacgcactcaagaggcaagaggccattgctcagaacagacgcctgactttagaagacctagaagattcatgggatcgtggcattcctcgaatcaataccctcttccagaaggaccggcacacactggcttatgataagggctggcgtgtcagaactgactttaagcagtatcaggttttgaagcagaatccgttctggtggacacaccagcggcatgatgggaagctctggaacctgaacaactaccgtacagacatgatccaggccctgggcggtgtggaaggcattctggaacacacactctttaagggcacttacttccctacctgggaggggcttttctgggagaaggccagtggctttgaggaatctatgaagtggaagaagctaactaatgctcagcgatcaggactgaaccagattcccaatcgtagattcaccctctggtggtccccgaccattaatcgagccaatgtatatgtaggctttcaggtgcagctagacctgacgggtatcttcatgcacggcaagatccccacgctgaagatctctctcatccagatcttccgagctcacttgtggcagaagatccatgagagcattgttatggacttatgtcaggtgtttgaccaggaacttgatgcactggaaattgagacagtacaaaaggagacaatccatccccgaaagtcatataagatgaactcttcctgtgcagatatcctgctctttgcctcctataagtggaatgtctcccggccctcattgctggctgactccaaggatgtgatggacagcaccaccacccagaaatactggattgacatccagttgcgctggggggactatgattcccacgacattgagcgctacgcccgggccaagttcctggactacaccaccgacaacatgagtatctacccttcgcccacaggtgtactcatcgccattgacctggcctataacttgcacagctactcagaagttggcagcttgcagcaagcctctcatacaacaggcgccaagatcatgaaggcaaaccctgccctgtatgtgttacgtgaacggatccgcaaggggctacagctctattcatctgaacccactgagccttatttgtcttctcagaactatggtgagctcttctccaaccagattatctggtttgtggatgacaccaacgtctacagagtgactattcacaagacctttgaagggaacttgacaaccaagcccatcaacggagccatcttcatcttcaacccacgcacagggcagctgttcctcaagataatccacacgtccgtgtgggcgggacagaagcgtttggggcagttggctaagtggaagacagctgaggaggtggccgccctgatccgatctctgcctgtggaggagcagcccaagcagatcattgtcaccaggaagggcatgctggacccactggaggtgcacttactggacttccccaatattgtcatcaaaggatcggagctccaactccctttccaggcgtgtctcaaggtggaaaaattcggggatctcatccttaaagccactgagccccagatggttctcttcaacctctatgacgactggctcaagactatttcatcttacacggccttctcccgtctcatcctgattctgcgtgccctacatgtgaacaacgatcgggcaaaagtgatcctgaagccagacaagactactattacagaaccacaccacatctggcccactctgactgacgaagaatggatcaaggtcgaggtgcagctcaaggatctgatcttggctgactacggcaagaaaaacaatgtgaacgtggcatcactgacacaatcagaaattcgagacatcatcctgggtatggagatctcggcaccgtcacagcagcggcagcagatcgctgagatcgagaagcagaccaaggaacaatcgcagctgacggcaacacagactcgcactgtcaacaagcatggcgatgagatcatcacctccaccaccagcaactatgagacccagactttctcatccaagactgagtggagggtcagggccatctctgctgccaacctgcacctaaggaccaatcacatctatgtttcatctgacgacatcaaggagactggctacacctacatccttcccaagaatgtgcttaagaagttcatctgcatatctgaccttcgggcccaaattgcaggatacctatatggggtgagcccaccagataacccccaggtgaaggagatccgctgcattgtgatggtgccgcagtggggcactcaccagaccgtgcacctgcctggccagctgccccagcatgagtacctcaaggagatggaacccttaggttggatccacactcagcccaatgagtccccgcagttatcaccccaggatgtcaccacccatgccaagatcatggctgacaacccatcttgggatggcgagaagaccattatcatcacatgcagcttcacgccaggctcctgtacactgacggcctacaagctgacccccagtggctacgaatggggccgccagaacacagacaagggcaacaaccccaagggctacctgccttcacactatgagagggtgcagatgctgctgtcggaccgtttccttggcttcttcatggtccctgcccagtcctcgtggaactacaacttcatgggtgttcggcatgaccccaacatgaaatatgagctacagctggcgaaccccaaagagttctaccacgaggtgcacaggccctctcacttcctcaactttgctctcctgcaggagggggaggtttactctgcggatcgggaggacctgtatgcctgaccgtttccctgcctcctgcttcagcctcccgaggccgaagcctcagcccctccagacaggccgctgacattcagcagtttggcctctttccctctgtctgtgcttgtgttgttgacctcctgatggcttgtcatcctgaataaaatataataataaattttgtataaatagg

SEQ ID NO: 24967 - DNA, 1063 bp, Homo sapiens
  source 1..1063: mol_type = unassigned DNA
tgtgaccagaaaatggaggcgaatctgtatttccagttaactgctcagaagagagatgctgaagagctgtagtcgtgcatccttctcaccctccgttagaaagcctcctctcatcctcagaagactactgtcagaggatgtaggaatggacatcccctttgaagagggcgtgctgagtcccagtgctgcagacatgaggcctgaacctcctaattctctggatcttaatgacactcatcctcggagaatcaagctcacagccccaaatatcaatctttctctggaccaaagtgaaggatctattctctctgatgataacttggacagtccagatgaaattgacatcaatgtggatgaacttgatacccccgatgaagcagattcttttgagtacactggccatgaagatcccacagccaacaaagattctggccaagagtcagagtctattccagaatatacggccgaagaggaacgggaggacaaccggctttggaggacagtggtcattggagaacaagagcagcgcattgacatgaaggtcatcgagccctacaggagagtcatttctcacggaggatactatggggacggtctaaatgccatcattgtgtttgccgcctgttttctgccagacagcagtcgggcggattaccactatgtcatggaaaatcttttcctatatgtaataagtactttagagttgatggtagctgaagactatatgattgtgtacttgaatggtgcaaccccaagaaggaggatgccagggctaggctggatgaagaaatgctaccagatgattgacagacggttgaggaagaatttgaaatcattcatcattgttcatccatcttggttcatcagaacaatccttgctgtgacacgaccttttataagttcaaaattcagcagtaaaattaaatatgtcaatagcttatcagaactcagtgggctgatcccaatggattgcatccacattccagagagcatcatcaatattgacttgaagctgaaagaaaagccttagttggccatgctggaagaagaggatgcttttctg

SEQ ID NO: 24968 - DNA, 4308 bp, Homo sapiens
  source 1..4308: mol_type = unassigned DNA
gaccagaaaatggaggcgaatctgtatttccagttaactgctcagaagagagatgctgaagagctgtagtcgtgcatccttctcaccctccgttagaaagcctcctctcatcctcagaagactactgtcagaggatgtaggaatggacatcccctttgaagagggcgtgctgagtcccagtgctgcagacatgaggcctgaacctcctaattctctggatcttaatgacactcatcctcggagaatcaagctcacagccccaaatatcaatctttctctggaccaaagtgaaggatctattctctctgatgataacttggacagtccagatgaaattgacatcaatgtggatgaacttgatacccccgatgaagcagattcttttgagtacactggccatgaagatcccacagccaacaaagattctggccaagagtcagagtctattccagaatatacggccgaagaggaacgggaggacaaccggctttggaggacagtggtcattggagaacaagagcagcgcattgacatgaaggtcatcgagccctacaggagagtcatttctcacggaggatactatggggacggtctaaatgccatcattgtgtttgccgcctgttttctgccagacagcagtcgggcggattaccactatgtcatggaaaatcttttcctatatgtaataagtactttagagttgatggtagctgaagactatatgattgtgtacttgaatggtgcaaccccaagaaggaggatgccagggctaggctggatgaagaaatgctaccagatgattgacagacggttgaggaagaatttgaaatcattcatcattgttcatccatcttggttcatcagaacaatccttgctgtgacacgaccttttataagttcaaaattcagcagtaaaattaaatatgtcaatagcttatcagaactcagtgggctgatcccaatggattgcatccacattccagagagcatcatcaaactggatgaagaactgagggaagcatcagaggcagctaaaactagctgcctttacaatgatccagaaatgtcttctatggagaaggatattgacttgaagctgaaagaaaagccttagttggccatgctggaagaagaggatgcttttctggttcatggttctgttgaaacatatctacctgaaagagacagggctgatgttacctttttccactttgcactacctggtgccattctaaatttctaaggggaaaaatagaaagtttgtttactcttaagatattttatgaaattgtgtgtactttcctattttgccaattatgtgcctcaaagattttagttgagccttagcaagaaagtaggaccttccatttcaatacttcattaacacggtgtagtgatactttgtcccttagactggtgtttaccagtaagatacctttaatccactgttaagtatgagtggatttgtttccatagattagctggatttccttttggtgattgcattaggtttaaagtacacaggtctcaactctccccaggaaagtttcccctgtttgactccacctttaaaatcctaagcctgactaggacagccacaaaccacacaaggtgtaaaaccatcatcagctaagtgcccgttttgttcttgtttaccagaatctcctttaacttctcaaagggaagccgggctttctaatccacgtcaactttattttagttgtcaaattgggcattatattttatgtaaattggtcttttaacatcattttcctgatgaatgttggtgaccaccacattgtgaaatttaagaatccgtgttgcatgtttggtagctctctgagtttcaggccataaactcagctccagaggttaccttttaagtgccaagaactcaagtgcaaggtggcctactcaaaaatcatttggtagcattcagttattcatgaattcctctctcgcatgcattataaaaagtgatctgctttaaaacaccgtaatctgatcataggcttaaaattaaatatgagtattactttcatgtacaaaatatttcctttatagtcttcatatgccctttaaaatgccaacaagatttcaagtctgtaggcctctagtgaggtggggtggcaaaccacagctaagtctcgctcaccactgcaagctaagaatggtttttacattttgggttggaaaaattttttttgaatatttcatgacacatgaaaattattcaaatgttagtgccgataaataaagtggtactgaaacacagccacacaaacttgtttttgtactgtctacagctactttcacactacagccgcagagctgagcagttcagcagaccgtatgtcccacaatgcctaaaacattgactatgtttacagaaaaagtttgctgacccctgctctagcaaacgcatcctttcctactccaccccaatttgtatttagatagtttctctaacagaacggacaaatgaggctgcaaactaatttatttttgtcaaaaatcaatgttttgacatccacagacagtgaaataaaagaaatggcttgctgaaaaacatgaggagtcctagccacaaaatcactgcttaggttgcaattgccaaaatgaagccttcttagaagcacttctttagtatatacaggtgttggctgaagtccgtgcctcactctgggaaccattcttagtctccagtgtctcctattacaaagaagctggcagaaataaaaatgaaggggtgagagcggttccaccctagtctcatggtggaaaattcattggggagagctgtccaggatatttggagtcctgggtagaaggagcttgtaactactttaaagtcgacatctttgcacaggtgattgagtttctctgacctcattgcttcacctctgtctcctcccgtccttccgcacgtgcccacacacacgcagttcagccctctttcctccataagcctccatcgttttctcttttctcctcttgatcctttcaagcgagtatcttgttgaattgtatgttctgttggatctcctccttcataacatctggcttgttggacagaaaaaccctacagcccaccccctcccacagcccacctccacttttgaaagcccaaattacacctctcccagaacacagtgttgacgtaaatacagttacccaatattcctgtttgttcacctatttgctactttcactcagtagcatcccattttgtaaaatgaattccatggtcaccctgtcacaggaagtaatgaaaaatccagtgttcagtgtagtggtgcaaacctgagggcatagagctgttcatagagggctcttgttatagccaaacagacacagcaacaatctcaccatttatatatatatttttaacttgtccagctcatctatggaaaactactcaggtggtatgctgtttgaagcctcatcttcctacatgaaaattatgggcatttgtcccaatgattttgtttcagctgttctgtaggctgcataaccactctgatatttaggtatctgctattttattatcttaaaagacaaattaatttaattgcatgtgctagggaaaagctaccatgtacattcaccccaagtaaatagaatcctagatgaatcctagaaaaataatccctaagcagataggtagacagaggtaaacattcacatgatttagctctctagctcttgcactctgaacattcttgctttggttctgacttctgggaactgctttgcatttctcctatagatctgtagttaagggaaccaaggggtcattggggcaaaagcattgtttctcaaagctccttgattaagagaaagaacagaaatttgcacagaagatagtgtcaaggagtgagaaagtttgtttgagggcagtagctcagtgtggaagaaaatcctgaagtttctgttgaagccatacaatgttctatggggttactctctaagacattctctgaggtgtgtgaggaagtcactactcctagcctttgttaagatgtaattttaaatattcagttatggtactatgtttgcaactctcgtcttatcacaatgcctcagtagtttgttcccttagaaacatttagatgtgcacaaattaatcttttatatatctaaaggtttttctatcatgcattggattgctcagaataaagtgtctgttagacttcgttttggtaaataaattctccataatgtagattaataatataaaagtctttaatgacacaatatatctatatagcctcactgtataattcagaaataaaaattgattctgca

SEQ ID NO: 24969 - DNA, 12584 bp, Homo sapiens
  source 1..12584: mol_type = unassigned DNA
ggagggagcagtcggtcgctgcgccccggcgggccactttcccgggaccccgctcgtcttccttgggccgagattttccactgcgcccctccgagtacccgggttccaaacccctagccacgacatggaagaatttttgcaacgcgccaaatctaaactgaatcgaagcaaacgcttggagaaggtccatgtggttattgggcctaaatcgtgtgacttggattctctcatttctaccttcacatatgcttactttctagacaaggtcagtccaccaggggttctgtgtttaccagtgctgaacataccaagaactgaattcaactacttcaccgagacgaggtttattttagaagagctaaatatttccgaatcattccacatattccgggatgaaattaacctgcatcagctaaatgatgaagggaagttatcgataacacttgttggcagcagtgtgctggcgagtgaagacaaaactttagaatcagcagttgtcaaagtcattaatccggttgagcagagcgatgccaacgttgagttccgagagtcttcctcttctctcgtgctaaaggagattctccaagaggctcctgagctcatcaccgagcaactggctcatcgcctcagaggtagcattcttttcaagtggatgaccatggaatcagagaagatctcagagaagcaggaggaaattctttctatcctggaagaaaaatttcctaacttgcctccaagagaggacatcatcaacgtcctacaggagacccagttcagtgctcagggtttaagtattgaacagacaatgttgaaagatctaaaggagctgtcagatggagaaataaaagtggccattagtactgtgagcatgaaccttgagaattgtctatttcacagcaatattaccagtgacttgaaagcatttacagacaagtttggttttgatgtcctcatcctgttctccagctatctgtcagaggagcagcagccgagacgacagattgctgtgtactcagaaaacatggagctgtgcagtcagatttgctgtgagctggaagagtgtcagaacccttgcctagaactggagccctttgactgtggctgtgatgagatcctggtgtaccaacaagaggacccttcagtgacttgtgatcaggtggttctcgttgtcaaggaagtcatcaacaggaggtgtccagagatggtctccaatagccggacatcctcaacagaagccgtggcaggcagtgcccccctctcccaggggtcttctgggattatggaattgtatggttctgacatagagccacaacccagctctgtgaatttcatagagaaccctccagatctcaatgattctaaccaggctcaggtggatgccaatgtagaccttgttagcccagacagcggactggctaccattaggagcagccgctcatccaaggagagctctgttttcctcagtgacgacagccccgtgggagaaggtgctgggcctcaccacacccttctcccagggcttgactcctacagccccatccctgaaggggcggtggcggaggaacatgcatggtctggagaacacggtgagcacttcgacctcttcaattttgacccagcacccatggcttctgggcagtcccagcaatcttctcattctgcagactactccccagcagatgacttcttccccaacagtgacctgtcagaaggacagctccccgctgggcctgaaggacttgatggcatgggaaccaacatgtctaattattcatccagttcacttttgtcaggggctggcaaagatagccttgtggaacatgatgaggagtttgtccagagacaagacagtcccagagataactctgaaagaaatttgagcctgacagattttgtgggagatgaatccccttccccagaaaggctaaaaaatactggaaagaggatcccaccaacacccatgaatagtttagtagaaagctcgccatccactgaagaaccagcctcactctatacagaagatatgacccaaaaagcaactgacacaggtcacatggggccacctcagacccatgcacggtgcagcagctggtggggtggtttggaaattgactccaaaaatattgcagatgcgtggagttccagtgaacaggaatctgttttccagagccctgaatcatggaaagagcataagccaagctccattgataggagagcctcagattctgtatttcaaccaaagagcctcgaatttacaaagtcaggtccctgggagtctgaatttggtcagcctgaactgggtagcaatgatattcaagacaaaaatgaggaaagcttgccgttccagaacctgcccatggagaagtcacctttgccaaatacatctccccaaggaacaaaccacctgatagaagactttgcttctttgtggcattctggtcgctctcccacagccatgcccgagccctggggaaatcctacagatgatggtgaaccagcagctgtggcgccattcccagcctggagtgcatttggtaaagaagatcatgatgaagctttaaaaaatacctggaatttgcacccaacaagcagcaagacaccttctgttagggacccgaatgagtgggccatggcaaaaagtgggtttgccttttcttcttcagaactactggacaattcacccagtgagataaacaatgaagcagctccagaaatctggggcaagaaaaacaatgactccagggatcacatctttgcacctggaaatcccagttctgatctggatcacacatggactaattctaagccaccaaaagaagatcagaatggtttagtggatcctaaaactaggggcaaggtatatgaaaaggtagattcctggaacctttttgaggagaatatgaagaaaggagggtcagatgtcctagttccttgggaagattccttcttatcttacaaatgttctgattacagtgcatccaacctaggagaagattcggtgccttcccccttagataccaattattccacctcagactcttacacatcaccaacatttgctggagacgaaaaggaaactgaacacaagccatttgctaaagaggaaggttttgagtcaaaagatggtaactccacggcagaggagactgacattcctcctcagtcactgcaacagtcatctcgaaatcgaatcagttcaggtcctgggaacctagacatgtgggcttcacctcatacagataacagttctgaaataaataccactcacaacctggatgaaaatgaactcaagacagagcacacagatggtaagaatatctccatggaggatgacgtcggggaaagcagccagtccagttacgacgaccccagcatgatgcaactgtacaatgaaacaaaccgacaactcacacttttgcacagcagcaccaactcccggcagacggcccctgacagtctcgacttgtggaacagagtgattttggaggatactcagtccactgcaacgatctcagatatggacaatgatttggactgggatgactgcagtgggggtgcggcaatccccagtgatggtcaaacagaaggatacatggctgaaggttccgagccggaaacccgatttacagtgagacagctggaaccctggggcttggagtatcaggaagcaaatcaggtagattgggagctccctgcctctgatgagcataccaaggacagtgctcccagtgaacatcacacattgaatgagaaaagtgggcagctaattgcaaacagtatttgggattctgtcatgagagataaagacatgtcatcattcatgttaccaggctcctcacatatcacagattcagagcaaagggaattgcctcctgaaatccccagccattcagcaaatgttaaagacactcattccccagatgcgccagcagcctctggaaccagtgaatcagaggcacttatatctcatcttgacaagcaggacacagagagggaaaccctgcaaagtgatgcagcatccttggcgactaggcttgagaatccagggtattttccacacccagatccatggaaaggtcatggcgatggacaaagtgaaagtgagaaggaagcccagggagccactgacagggggcaccttgatgaagaggaggtgatcgcctctggtgtggagaatgcctcagggatttctgaaaaagggcagagtgaccaggaactgtcttctctggttgcatctgaacatcaggaaatctgcattaaatcaggcaaaatcagctctcttgctgtcactttcagtcctcaaaccgaggaaccagaggaagttttagagtatgaggaggggtcttacaatctagactcccgtgatgtgcaaacagggatgtccgcagataacctgcagccaaaagatacccatgaaaaacacctcatgagtcaaagaaattcaggtgaaactactgagacttcagatgggatgaatttcacaaaatatgtatctgtacctgaaaaggatcttgagaaaactgaagaatgtaactttctagagccagagaacgtgggtggagggccacctcacagagttccccgaagtcttgattttggggacgtccctatagacagtgatgtgcatgtcagcagcacatgttctgagataaccaaaaatcttgacgttaaggggtctgaaaatagccttccaggagccggttcgtctggaaattttgacagagatactatttctagtgagtatactcattcaagtgcatcaagtcctgagttaaatgactcttcagttgcactgtcctcctggggccagcaacccagttctgggtatcaagaagaaaaccaaggcaactggagtgaacagaatcaccaagaatctgaactaattaccactgatggccaagtagaaatagttaccaaagtgaaggatttagagaaaaacagaataaatgagtttgaaaagagctttgatcgcaaaactcctacatttttagagatctggaatgactcagttgatggtgattccttttcctctttatccagtcctgaaacaggcaaatattctgaacattcagggacacatcaggaaagcaatctaattgctagctaccaggagaaaaatgaacatgacatttctgcaactgtgcagccagaggatgccagggtcatttcaacaagctcaggttctgatgatgacagtgtcggtggtgaagagtcaatagaggaagagatccaggtggccaactgccacgttgctgaggatgaatccagagcttgggattcattgaatgaatctaataagttcttggtcacagctgatcctaagtctgaaaatatttatgactacctagacagctcagagccagcagagaatgagaataagtcaaacccattctgtgacaatcaacaaagcagccctgatccctggactttctcaccattaacggagactgaaatgcagattacagcagtggagaaggagaagagatcttctccagaaacagggacaacaggagatgttgcatggcaaatatctcccaaagcttcgttcccaaagaacgaagataattctcaactggaaatgctgggcttctcagctgatagcactgagtggtggaaggcctcaccccaggaagggagactaattgaaagtccatttgaaagggagctgtctgactccagtggtgtgttggagataaattcttcagtacaccaaaatgccagtccctggggagtaccagttcagggtgatattgagcccgtggaaacacactatactaatccttttagtgacaaccatcagtcaccctttctggaaggtaatgggaagaactcccatgagcaactctggaacattcaaccaaggcagccagacccagatgctgacaagttcagccagcttgtaaaattagaccaaattaaagaaaaggactcaagagagcaaacctttgtgtctgctgctggtgatgagctgactcctgaaacacctacccaagagcagtgtcaggacaccatgctgccagtctgtgatcatccggacacagcctttactcacgcagaggaaaatagttgtgttacatctaatgtttcaactaatgaaggtcaagaaacaaatcagtgggaacaagaaaaatcatacctaggtgagatgacaaattcaagcattgccacagaaaattttcctgctgtcagttctcccacccaactgataatgaagccaggctctgaatgggatggctctaccccaagtgaggactcccgaggtacctttgtgccagatattttacatggcaactttcaagagggtgggcagctggcctctgccgcgcctgacttgtggatagatgctaagaagcccttcagtttgaaagcagatggtgagaatcctgatatcctgacgcactgcgaacatgacagcaattctcaggcttccgacagccctgatatatgtcacgattctgaagcaaagcaagagactgagaagcacctcagtgcttgcatgggacctgaagtggaatccagtgagctttgtctcactgagccagagatagatgaagaacccatttatgagcctggacgggagtttgtcccatccaatgcagaactcgattctgaaaacgcaactgtgctgcctccaattggctatcaagcagacataaagggctcctctcagcccgcctctcataaaggttcacctgaaccttctgaaataaacggtgacaacagtacaggtttacaagtatcagaaaaaggagccagcccagatatggcaccaattttggaaccagttgacagaagaatcccaaggattgaaaatgtggcaactagcatttttgtaactcaccaagagccaactccagaaggtgacggttcttggatatcagacagcttttctcctgaaagtcagcctggtgcaagagctttgtttgatggtgatccacatttatccacagagaatcctgccttggttcctgatgctttgctagcctcagacacttgtctggatataagcgaagctgcctttgaccacagtttcagcgatgcctcaggtctcaacacatccacgggaacaatagatgacatgagtaaactgacattatccgaaggccatccggaaacgccagttgatggggacctagggaagcaagatatctgctcatctgaagcctcgtggggtgattttgaatatgatgtaatgggccagaatatcgatgaagatttactgagagagcctgaacacttcctgtatggtggtgaccctcctttggaggaagattctctgaagcagtcgctggcaccgtacacacctccctttgatttgtcttatctcacagaacctgcccagagtgctgaaacaatagaggaagctgggtctccagaggatgaatctctgggatgcagagcagcagagatagtgctttctgcacttcctgatcgaagaagtgagggaaaccaggctgagaccaaaaacagactgcctggatcccagctggctgtgctgcatattcgtgaagaccctgagtccgtttatttgccggtaggagcaggctccaacattttgtctccatcaaacgttgactgggaagtagaaacagataattctgatttaccagcaggtggagacataggaccaccaaatggtgccagcaaggaaatatcagaattggaagaagaaaaaacaattcctaccaaagagcctgagcagataaaatcagaatacaaggaagaaagatgtacagagaagaatgaagatcgtcatgcactacacatggattacatacttgtaaaccgtgaagaaaattcacactcaaagccagagacctgtgaagaaagagaaagcatagctgaattagaattgtatgtaggttccaaagaaacagggctgcagggaactcagttagcaagcttcccagacacatgtcagccagcctccttaaatgaaagaaaaggtctctctgcagagaaaatgtcttctaaaagcgatacgagatcatcttttgaaagccctgcacaagaccagagttggatgttcttgggccatagtgaggttggtgatccatcactggatgccagggactcagggcctgggtggtctggcaagactgtggagccgttctctgaactcggcttgggtgagggtccccagctgcagattctggaagaaatgaagcctctagaatctttggcactagaggaagcctctggtccagtcagccaatcacagaagagtaagagccgaggcagggctggcccggatgcagttacgttgcaggctgtcacccatgacaatgaatgggaaatgctttcaccacagcctgttcagaaaaacatgatccctgacacggaaatggaggaggagacagagttccttgagctcggaaccaggatatcaagaccaaatggactactgtcagaggatgtaggaatggacatcccctttgaagagggcgtgctgagtcccagtgctgcagacatgaggcctgaacctcctaattctctggatcttaatgacactcatcctcggagaatcaagctcacagccccaaatatcaatctttctctggaccaaagtgaaggatctattctctctgatgataacttggacagtccagatgaaattgacatcaatgtggatgaacttgatacccccgatgaagcagattcttttgagtacactggccatgatcccacagccaacaaagattctggccaagagtcagagtctattccagaatatacggccgaagaggaacgggaggacaaccggctttggaggacagtggtcattggagaacaagagcagcgcattgacatgaaggtcatcgagccctacaggagagtcatttctcacggaggatactatggggacggtctaaatgccatcattgtgtttgccgcctgttttctgccagacagcagtcgggcggattaccactatgtcatggaaaatcttttcctatatgtaataagtactttagagttgatggtagctgaagactatatgattgtgtacttgaatggtgcaaccccaagaaggaggatgccagggctaggctggatgaagaaatgctaccagatgattgacagacggttgaggaagaatttgaaatcattcatcattgttcatccatcttggttcatcagaacaatccttgctgtgacacgaccttttataagttcaaaattcagcagtaaaattaaatatgtcaatagcttatcagaactcagtgggctgatcccaatggattgcatccacattccagagagcatcatcaaactggatgaagaactgagggaagcatcagaggcagctaaaactagctgcctttacaatgatccagaaatgtcttctatggagaaggatattgacttgaagctgaaagaaaagccttagttggccatgctggaagaagaggatgcttttctggttcatggttctgttgaaacatatctacctgaaagagacagggctgatgttacctttttccactttgcactacctggtgccattctaaatttctaaggggaaaaatagaaagtttgtttactcttaagatattttatgaaattgtgtgtactttcctattttgccaattatgtgcctcaaagattttagttgagccttagcaagaaagtaggaccttccatttcaatacttcattaacacggtgtagtgatactttgtcccttagactggtgtttaccagtaagatacctttaatccactgttaagtatgagtggatttgtttccatagattagctggatttccttttggtgattgcattaggtttaaagtacacaggtctcaactctccccaggaaagtttcccctgtttgactccacctttaaaatcctaagcctgactaggacagccacaaaccacacaaggtgtaaaaccatcatcagctaagtgcccgttttgttcttgtttaccagaatctcctttaacttctcaaagggaagccgggctttctaatccacgtcaactttattttagttgtcaaattgggcattatattttatgtaaattggtcttttaacatcattttcctgatgaatgttggtgaccaccacattgtgaaatttaagaatccgtgttgcatgtttggtagctctctgagtttcaggccataaactcagctccagaggttaccttttaagtgccaagaactcaagtgcaaggtggcctactcaaaaatcatttggtagcattcagttattcatgaattcctctctcgcatgcattataaaaagtgatctgctttaaaacaccgtaatctgatcataggcttaaaattaaatatgagtattactttcatgtacaaaatatttcctttatagtcttcatatgccctttaaaatgccaacaagatttcaagtctgtaggcctctagtgaggtggggtggcaaaccacagctaagtctcgctcaccactgcaagctaagaatggtttttacattttgggttggaaaaattttttttgaatatttcatgacacatgaaaattattcaaatgttagtgccgataaataaagtggtactgaaacacagccacacaaacttgtttttgtactgtctacagctactttcacactacagccgcagagctgagcagttcagcagaccgtatgtcccacaatgcctaaaacattgactatgtttacagaaaaagtttgctgacccctgctctagcaaacgcatcctttcctactccaccccaatttgtatttagatagtttctctaacagaacggacaaatgaggctgcaaactaatttatttttgtcaaaaatcaatgttttgacatccacagacagtgaaataaaagaaatggcttgctgaaaaacatgaggagtcctagccacaaaatcactgcttaggttgcaattgccaaaatgaagccttcttagaagcacttctttagtatatacaggtgttggctgaagtccgtgcctcactctgggaaccattcttagtctccagtgtctcctattacaaagaagctggcagaaataaaaatgaaggggtgagagcggttccaccctagtctcatggtggaaaattcattggggagagctgtccaggatatttggagtcctgggtagaaggagcttgtaactactttaaagtcgacatctttgcacaggtgattgagtttctctgacctcattgcttcacctctgtctcctcccgtccttccgcacgtgcccacacacacgcagttcagccctctttcctccataagcctccatcgttttctcttttctcctcttgatcctttcaagcgagtatcttgttgaattgtatgttctgttggatctcctccttcataacatctggcttgttggacagaaaaaccctacagcccaccccctcccacagcccacctccacttttgaaagcccaaattacacctctcccagaacacagtgttgacgtaaatacagttacccaatattcctgtttgttcacctatttgctactttcactcagtagcatcccattttgtaaaatgaattccatggtcaccctgtcacaggaagtaatgaaaaatccagtgttcagtgtagtggtgcaaacctgagggcatagagctgttcatagagggctcttgttatagccaaacagacacagcaacaatctcaccatttatatatatatttttaacttgtccagctcatctatggaaaactactcaggtggtatgctgtttgaagcctcatcttcctacatgaaaattatgggcatttgtcccaatgattttgtttcagctgttctgtaggctgcataaccactctgatatttaggtatctgctattttattatcttaaaagacaaattaatttaattgcatgtgctagggaaaagctaccatgtacattcaccccaagtaaatagaatcctagatgaatcctagaaaaataatccctaagcagataggtagacagaggtaaacattcacatgatttagctctctagctcttgcactctgaacattcttgctttggttctgacttctgggaactgctttgcatttctcctatagatctgtagttaagggaaccaaggggtcattggggcaaaagcattgtttctcaaagctccttgattaagagaaagaacagaaatttgcacagaagatagtgtcaaggagtgagaaagtttgtttgagggcagtagctcagtgtggaagaaaatcctgaagtttctgttgaagccatacaatgttctatggggttactctctaagacattctctgaggtgtgtgaggaagtcactactcctagcctttgttaagatgtaattttaaatattcagttatggtactatgtttgcaactctcgtcttatcacaatgcctcagtagtttgttcccttagaaacatttagatgtgcacaaattaatcttttatatatctaaaggtttttctatcatgcattggattgctcagaataaagtgtctgttagacttcgttttggtaaataaattctccataatgtagattaataatataaaagtctttaatgacacaatatatctatatagcctcactgtataattcagaaataaaaattgattctgc

SEQ ID NO: 24970 - DNA, 9162 bp, Homo sapiens
  source 1..9162: mol_type = unassigned DNA
aggaacttgatgcataggatgaaggaaagtgagaatcgaagcaaacgcttggagaaggtccatgtggttattgggcctaaatcgtgtgacttggattctctcatttctaccttcacatatgcttactttctagacaaggtcagtccaccaggggttctgtgtttaccagtgctgaacataccaagaactgaattcaactacttcaccgagacgaggtttattttagaagagctaaatatttccgaatcattccacatattccgggatgaaattaacctgcatcagctaaatgatgaagggaagttatcgataacacttgttggcagcagtgtgctggcgagtgaagacaaaactttagaatcagcagttgtcaaagtcattaatccggttgagcagagcgatgccaacgttgagttccgagagtcttcctcttctctcgtgctaaaggagattctccaagaggctcctgagctcatcaccgagcaactggctcatcgcctcagaggtagcattcttttcaagtggatgaccatggaatcagagaagatctcagagaagcaggaggaaattctttctatcctggaagaaaaatttcctaacttgcctccaagagaggacatcatcaacgtcctacaggagacccagttcagtgctcagggtttaagtattgaacagacaatgttgaaagatctaaaggagctgtcagatggagaaataaaagtggccattagtactgtgagcatgaaccttgagaattgtctatttcacagcaatattaccagtgacttgaaagcatttacagacaagtttggttttgatgtcctcatcctgttctccagctatctgtcagaggagcagcagccgagacgacagattgctgtgtactcagaaaacatggagctgtgcagtcagatttgctgtgagctggaagagtgtcagaacccttgcctagaactggagccctttgactgtggctgtgatgagatcctggtgtaccaacaagaggacccttcagtgacttgtgatcaggtggttctcgttgtcaaggaagtcatcaacaggaggtgtccagagatggtctccaatagccggacatcctcaacagaagccgtggcaggcagtgcccccctctcccaggggtcttctgggattatggaattgtatggttctgacatagagccacaacccagctctgtgaatttcatagagaaccctccagatctcaatgattctaaccaggctcaggtggatgccaatgtagaccttgttagcccagacagcggactggctaccattaggagcagccgctcatccaaggagagctctgttttcctcagtgacgacagccccgtgggagaaggtgctgggcctcaccacacccttctcccagggcttgactcctacagccccatccctgaaggggcggtggcggaggaacatgcatggtctggagaacacggtgagcacttcgacctcttcaattttgacccagcacccatggcttctgggcagtcccagcaatcttctcattctgcagactactccccagcagatgacttcttccccaacagtgacctgtcagaaggacagctccccgctgggcctgaaggacttgatggcatgggaaccaacatgtctaattattcatccagttcacttttgtcaggggctggcaaagatagccttgtggaacatgatgaggagtttgtccagagacaagacagtcccagagataactctgaaagaaatttgagcctgacagattttgtgggagatgaatccccttccccagaaaggctaaaaaatactggaaagaggatcccaccaacacccatgaatagtttagtagaaagctcgccatccactgaagaaccagcctcactctatacagaagatatgacccaaaaagcaactgacacaggtcacatggggccacctcagacccatgcacggtgcagcagctggtggggtggtttggaaattgactccaaaaatattgcagatgcgtggagttccagtgaacaggaatctgttttccagagccctgaatcatggaaagagcataagccaagctccattgataggagagcctcagattctgtatttcaaccaaagagcctcgaatttacaaagtcaggtccctgggagtctgaatttggtcagcctgaactgggtagcaatgatattcaagacaaaaatgaggaaagcttgccgttccagaacctgcccatggagaagtcacctttgccaaatacatctccccaaggaacaaaccacctgatagaagactttgcttctttgtggcattctggtcgctctcccacagccatgcccgagccctggggaaatcctacagatgatggtgaaccagcagctgtggcgccattcccagcctggagtgcatttggtaaagaagatcatgatgaagctttaaaaaatacctggaatttgcacccaacaagcagcaagacaccttctgttagggacccgaatgagtgggccatggcaaaaagtgggtttgccttttcttcttcagaactactggacaattcacccagtgagataaacaatgaagcagctccagaaatctggggcaagaaaaacaatgactccagggatcacatctttgcacctggaaatcccagttctgatctggatcacacatggactaattctaagccaccaaaagaagatcagaatggtttagtggatcctaaaactaggggcaaggtatatgaaaaggtagattcctggaacctttttgaggagaatatgaagaaaggagggtcagatgtcctagttccttgggaagattccttcttatcttacaaatgttctgattacagtgcatccaacctaggagaagattcggtgccttcccccttagataccaattattccacctcagactcttacacatcaccaacatttgctggagacgaaaaggaaactgaacacaagccatttgctaaagaggaaggttttgagtcaaaagatggtaactccacggcagaggagactgacattcctcctcagtcactgcaacagtcatctcgaaatcgaatcagttcaggtcctgggaacctagacatgtgggcttcacctcatacagataacagttctgaaataaataccactcacaacctggatgaaaatgaactcaagacagagcacacagatggtaagaatatctccatggaggatgacgtcggggaaagcagccagtccagttacgacgaccccagcatgatgcaactgtacaatgaaacaaaccgacaactcacacttttgcacagcagcaccaactcccggcagacggcccctgacagtctcgacttgtggaacagagtgattttggaggatactcagtccactgcaacgatctcagatatggacaatgatttggactgggatgactgcagtgggggtgcggcaatccccagtgatggtcaaacagaaggatacatggctgaaggttccgagccggaaacccgatttacagtgagacagctggaaccctggggcttggagtatcaggaagcaaatcaggtagattgggagctccctgcctctgatgagcataccaaggacagtgctcccagtgaacatcacacattgaatgagaaaagtgggcagctaattgcaaacagtatttgggattctgtcatgagagataaagacatgtcatcattcatgttaccaggctcctcacatatcacagattcagagcaaagggaattgcctcctgaaatccccagccattcagcaaatgttaaagacactcattccccagatgcgccagcagcctctggaaccagtgaatcagaggcacttatatctcatcttgacaagcaggacacagagagggaaaccctgcaaagtgatgcagcatccttggcgactaggcttgagaatccagggtattttccacacccagatccatggaaaggtcatggcgatggacaaagtgaaagtgagaaggaagcccagggagccactgacagggggcaccttgatgaagaggaggtgatcgcctctggtgtggagaatgcctcagggatttctgaaaaagggcagagtgaccaggaactgtcttctctggttgcatctgaacatcaggaaatctgcattaaatcaggcaaaatcagctctcttgctgtcactttcagtcctcaaaccgaggaaccagaggaagttttagagtatgaggaggggtcttacaatctagactcccgtgatgtgcaaacagggatgtccgcagataacctgcagccaaaagatacccatgaaaaacacctcatgagtcaaagaaattcaggtgaaactactgagacttcagatgggatgaatttcacaaaatatgtatctgtacctgaaaaggatcttgagaaaactgaagaatgtaactttctagagccagagaacgtgggtggagggccacctcacagagttccccgaagtcttgattttggggacgtccctatagacagtgatgtgcatgtcagcagcacatgttctgagataaccaaaaatcttgacgttaaggggtctgaaaatagccttccaggagccggttcgtctggaaattttgacagagatactatttctagtgagtatactcattcaagtgcatcaagtcctgagttaaatgactcttcagttgcactgtcctcctggggccagcaacccagttctgggtatcaagaagaaaaccaaggcaactggagtgaacagaatcaccaagaatctgaactaattaccactgatggccaagtagaaatagttaccaaagtgaaggatttagagaaaaacagaataaatgagtttgaaaagagctttgatcgcaaaactcctacatttttagagatctggaatgactcagttgatggtgattccttttcctctttatccagtcctgaaacaggcaaatattctgaacattcagggacacatcaggaaagcaatctaattgctagctaccaggagaaaaatgaacatgacatttctgcaactgtgcagccagaggatgccagggtcatttcaacaagctcaggttctgatgatgacagtgtcggtggtgaagagtcaatagaggaagagatccaggtggccaactgccacgttgctgaggatgaatccagagcttgggattcattgaatgaatctaataagttcttggtcacagctgatcctaagtctgaaaatatttatgactacctagacagctcagagccagcagagaatgagaataagtcaaacccattctgtgacaatcaacaaagcagccctgatccctggactttctcaccattaacggagactgaaatgcagattacagcagtggagaaggagaagagatcttctccagaaacagggacaacaggagatgttgcatggcaaatatctcccaaagcttcgttcccaaagaacgaagataattctcaactggaaatgctgggcttctcagctgatagcactgagtggtggaaggcctcaccccaggaagggagactaattgaaagtccatttgaaagggagctgtctgactccagtggtgtgttggagataaattcttcagtacaccaaaatgccagtccctggggagtaccagttcagggtgatattgagcccgtggaaacacactatactaatccttttagtgacaaccatcagtcaccctttctggaaggtaatgggaagaactcccatgagcaactctggaacattcaaccaaggcagccagacccagatgctgacaagttcagccagcttgtaaaattagaccaaattaaagaaaaggactcaagagagcaaacctttgtgtctgctgctggtgatgagctgactcctgaaacacctacccaagagcagtgtcaggacaccatgctgccagtctgtgatcatccggacacagcctttactcacgcagaggaaaatagttgtgttacatctaatgtttcaactaatgaaggtcaagaaacaaatcagtgggaacaagaaaaatcatacctaggtgagatgacaaattcaagcattgccacagaaaattttcctgctgtcagttctcccacccaactgataatgaagccaggctctgaatgggatggctctaccccaagtgaggactcccgaggtacctttgtgccagatattttacatggcaactttcaagagggtgggcagctggcctctgccgcgcctgacttgtggatagatgctaagaagcccttcagtttgaaagcagatggtgagaatcctgatatcctgacgcactgcgaacatgacagcaattctcaggcttccgacagccctgatatatgtcacgattctgaagcaaagcaagagactgagaagcacctcagtgcttgcatgggacctgaagtggaatccagtgagctttgtctcactgagccagagatagatgaagaacccatttatgagcctggacgggagtttgtcccatccaatgcagaactcgattctgaaaacgcaactgtgctgcctccaattggctatcaagcagacataaagggctcctctcagcccgcctctcataaaggttcacctgaaccttctgaaataaacggtgacaacagtacaggtttacaagtatcagaaaaaggagccagcccagatatggcaccaattttggaaccagttgacagaagaatcccaaggattgaaaatgtggcaactagcatttttgtaactcaccaagagccaactccagaaggtgacggttcttggatatcagacagcttttctcctgaaagtcagcctggtgcaagagctttgtttgatggtgatccacatttatccacagagaatcctgccttggttcctgatgctttgctagcctcagacacttgtctggatataagcgaagctgcctttgaccacagtttcagcgatgcctcaggtctcaacacatccacgggaacaatagatgacatgagtaaactgacattatccgaaggccatccggaaacgccagttgatggggacctagggaagcaagatatctgctcatctgaagcctcgtggggtgattttgaatatgatgtaatgggccagaatatcgatgaagatttactgagagagcctgaacacttcctgtatggtggtgaccctcctttggaggaagattctctgaagcagtcgctggcaccgtacacacctccctttgatttgtcttatctcacagaacctgcccagagtgctgaaacaatagaggaagctgggtctccagaggatgaatctctgggatgcagagcagcagagatagtgctttctgcacttcctgatcgaagaagtgagggaaaccaggctgagaccaaaaacagactgcctggatcccagctggctgtgctgcatattcgtgaagaccctgagtccgtttatttgccggtaggagcaggctccaacattttgtctccatcaaacgttgactgggaagtagaaacagataattctgatttaccagcaggtggagacataggaccaccaaatggtgccagcaaggaaatatcagaattggaagaagaaaaaacaattcctaccaaagagcctgagcagataaaatcagaatacaaggaagaaagatgtacagagaagaatgaagatcgtcatgcactacacatggattacatacttgtaaaccgtgaagaaaattcacactcaaagccagagacctgtgaagaaagagaaagcatagctgaattagaattgtatgtaggttccaaagaaacagggctgcagggaactcagttagcaagcttcccagacacatgtcagccagcctccttaaatgaaagaaaaggtctctctgcagagaaaatgtcttctaaaagcgatacgagatcatcttttgaaagccctgcacaagaccagagttggatgttcttgggccatagtgaggttggtgatccatcactggatgccagggactcagggcctgggtggtctggcaagactgtggagccgttctctgaactcggcttgggtgagggtccccagctgcagattctggaagaaatgaagcctctagaatctttggcactagaggaagcctctggtccagtcagccaatcacagaagagtaagagccgaggcagggctggcccggatgcagttacgttgcaggctgtcacccatgacaatgaatgggaaatgctttcaccacagcctgttcagaaaaacatgatccctgacacggaaatggaggaggagacagagttccttgagctcggaaccaggatatcaagaccaaatggactactgtcagaggatgtaggaatggacatcccctttgaagagggcgtgctgagtcccagtgctgcagacatgaggcctgaacctcctaattctctggatcttaatgacactcatcctcggagaatcaagctcacagccccaaatatcaatctttctctggaccaaagtgaaggatctattctctctgatgataacttggacagtccagatgaaattgacatcaatgtggatgaacttgatacccccgatgaagcagattcttttgagtacactggccatgaagatcccacagccaacaaagattctggccaagagtcagagtctattccagaatatacggccgaagaggaacgggaggacaaccggctttggaggacagtggtcattggagaacaagagcagcgcattgacatgaaggtcatcgagccctacaggagagtcatttctcacggaggtagtcgaggatactatggggacggtctaaatgccatcattgtgtttgccgcctgttttctgccagacagcagtcgggcggattaccactatgtcatggaaaatcttttcctatatgtaataagtactttagagttgatggtagctgaagactatatgattgtgtacttgaatggtgcaaccccaagaaggaggatgccagggctaggctggatgaagaaatgctaccagatgattgacagacggttgaggaagaatttgaaatcattcatcattgttcatccatcttggttcatcagaacaatccttgctgtgacacgaccttttataagttcaaaattcagcagtaaaattaaatatgtcaatagcttatcagaactcagtgggctgatcccaatggattgcatccacattccagagagcatcatcaattat

SEQ ID NO: 24971 - DNA, 903 bp, Homo sapiens
  source 1..903: mol_type = unassigned DNA
attgacatcaatgtggatgaacttgatacccccgatgaagcagattcttttgagtacactggccatgatcccacagccaacaaagattctggccaagagtcagagtctattccagaatatacggccgaagaggaacgggaggacaaccggctttggaggacagtggtcattggagaacaagagcagcgcattgacatgaaggtcatcgagccctacaggagagtcatttctcacggaggagattcaggatactatggggacggtctaaatgccatcattgtgtttgccgcctgttttctgccagacagcagtcgggcggattaccactatgtcatggaaaatcttttcctatatgtaataagtactttagagttgatggtagctgaagactatatgattgtgtacttgaatggtgcaaccccaagaaggaggatgccagggctaggctggatgaagaaatgctaccagatgattgacagacggttgaggaagaatttgaaatcattcatcattgttcatccatcttggttcatcagaacaatccttgctgtgacacgaccttttataagttcaaaattcagcagtaaaattaaatatgtcaatagcttatcagaactcagtgggctgatcccaatggattgcatccacattccagagagcatcatcaagtacgatgaagagagatcttataagagaagtgtgagaactagctgcctttacaatgatccagaaatgtcttctatggagaaggatattgacttgaagctgaaagaaaagccttagttggccatgctggaagaagaggatgcttttctggttcatggttctgttgaaacatatctacctgaaagagacagggctgatgttacctttttccactttgcactacctggtgccattcta

SEQ ID NO: 24972 - DNA, 7434 bp, Homo sapiens
  source 1..7434: mol_type = unassigned DNA
tttccagagccctgaatcatggaaagagcataagccaagctccattgataggagagcctcagattctgtatttcaaccaaagagcctcgaatttacaaagtcaggtccctgggagtctgaatttggtcagcctgaactgggtagcaatgatattcaagacaaaaatgaggaaagcttgccgttccagaacctgcccatggagaagtcacctttgccaaatacatctccccaaggaacaaaccacctgatagaagactttgcttctttgtggcattctggtcgctctcccacagccatgcccgagccctggggaaatcctacagatgatggtgaaccagcagctgtggcgccattcccagcctggagtgcatttggtaaagaagatcatgatgaagctttaaaaaatacctggaatttgcacccaacaagcagcaagacaccttctgttagggacccgaatgagtgggccatggcaaaaagtgggtttgccttttcttcttcagaactactggacaattcacccagtgagataaacaatgaagcagctccagaaatctggggcaagaaaaacaatgactccagggatcacatctttgcacctggaaatcccagttctgatctggatcacacatggactaattctaagccaccaaaagaagatcagaatggtttagtggatcctaaaactaggggcaaggtatatgaaaaggtagattcctggaacctttttgaggagaatatgaagaaaggagggtcagatgtcctagttccttgggaagattccttcttatcttacaaatgttctgattacagtgcatccaacctaggagaagattcggtgccttcccccttagataccaattattccacctcagactcttacacatcaccaacatttgctggagacgaaaaggaaactgaacacaagccatttgctaaagaggaaggttttgagtcaaaagatggtaactccacggcagaggagactgacattcctcctcagtcactgcaacagtcatctcgaaatcgaatcagttcaggtcctgggaacctagacatgtgggcttcacctcatacagataacagttctgaaataaataccactcacaacctggatgaaaatgaactcaagacagagcacacagatggtaagaatatctccatggaggatgacgtcggggaaagcagccagtccagttacgacgaccccagcatgatgcaactgtacaatgaaacaaaccgacaactcacacttttgcacagcagcaccaactcccggcagacggcccctgacagtctcgacttgtggaacagagtgattttggaggatactcagtccactgcaacgatctcagatatggacaatgatttggactgggatgactgcagtgggggtgcggcaatccccagtgatggtcaaacagaaggatacatggctgaaggttccgagccggaaacccgatttacagtgagacagctggaaccctggggcttggagtatcaggaagcaaatcaggtagattgggagctccctgcctctgatgagcataccaaggacagtgctcccagtgaacatcacacattgaatgagaaaagtgggcagctaattgcaaacagtatttgggattctgtcatgagagataaagacatgtcatcattcatgttaccaggctcctcacatatcacagattcagagcaaagggaattgcctcctgaaatccccagccattcagcaaatgttaaagacactcattccccagatgcgccagcagcctctggaaccagtgaatcagaggcacttatatctcatcttgacaagcaggacacagagagggaaaccctgcaaagtgatgcagcatccttggcgactaggcttgagaatccagggtattttccacacccagatccatggaaaggtcatggcgatggacaaagtgaaagtgagaaggaagcccagggagccactgacagggggcaccttgatgaagaggaggtgatcgcctctggtgtggagaatgcctcagggatttctgaaaaagggcagagtgaccaggaactgtcttctctggttgcatctgaacatcaggaaatctgcattaaatcaggcaaaatcagctctcttgctgtcactttcagtcctcaaaccgaggaaccagaggaagttttagagtatgaggaggggtcttacaatctagactcccgtgatgtgcaaacagggatgtccgcagataacctgcagccaaaagatacccatgaaaaacacctcatgagtcaaagaaattcaggtgaaactactgagacttcagatgggatgaatttcacaaaatatgtatctgtacctgaaaaggatcttgagaaaactgaagaatgtaactttctagagccagagaacgtgggtggagggccacctcacagagttccccgaagtcttgattttggggacgtccctatagacagtgatgtgcatgtcagcagcacatgttctgagataaccaaaaatcttgacgttaaggggtctgaaaatagccttccaggagccggttcgtctggaaattttgacagagatactatttctagtgagtatactcattcaagtgcatcaagtcctgagttaaatgactcttcagttgcactgtcctcctggggccagcaacccagttctgggtatcaagaagaaaaccaaggcaactggagtgaacagaatcaccaagaatctgaactaattaccactgatggccaagtagaaatagttaccaaagtgaaggatttagagaaaaacagaataaatgagtttgaaaagagctttgatcgcaaaactcctacatttttagagatctggaatgactcagttgatggtgattccttttcctctttatccagtcctgaaacaggcaaatattctgaacattcagggacacatcaggaaagcaatctaattgctagctaccaggagaaaaatgaacatgacatttctgcaactgtgcagccagaggatgccagggtcatttcaacaagctcaggttctgatgatgacagtgtcggtggtgaagagtcaatagaggaagagatccaggtggccaactgccacgttgctgaggatgaatccagagcttgggattcattgaatgaatctaataagttcttggtcacagctgatcctaagtctgaaaatatttatgactacctagacagctcagagccagcagagaatgagaataagtcaaacccattctgtgacaatcaacaaagcagccctgatccctggactttctcaccattaacggagactgaaatgcagattacagcagtggagaaggagaagagatcttctccagaaacagggacaacaggagatgttgcatggcaaatatctcccaaagcttcgttcccaaagaacgaagataattctcaactggaaatgctgggcttctcagctgatagcactgagtggtggaaggcctcaccccaggaagggagactaattgaaagtccatttgaaagggagctgtctgactccagtggtgtgttggagataaattcttcagtacaccaaaatgccagtccctggggagtaccagttcagggtgatattgagcccgtggaaacacactatactaatccttttagtgacaaccatcagtcaccctttctggaaggtaatgggaagaactcccatgagcaactctggaacattcaaccaaggcagccagacccagatgctgacaagttcagccagcttgtaaaattagaccaaattaaagaaaaggactcaagagagcaaacctttgtgtctgctgctggtgatgagctgactcctgaaacacctacccaagagcagtgtcaggacaccatgctgccagtctgtgatcatccggacacagcctttactcacgcagaggaaaatagttgtgttacatctaatgtttcaactaatgaaggtcaagaaacaaatcagtgggaacaagaaaaatcatacctaggtgagatgacaaattcaagcattgccacagaaaattttcctgctgtcagttctcccacccaactgataatgaagccaggctctgaatgggatggctctaccccaagtgaggactcccgaggtacctttgtgccagatattttacatggcaactttcaagagggtgggcagctggcctctgccgcgcctgacttgtggatagatgctaagaagcccttcagtttgaaagcagatggtgagaatcctgatatcctgacgcactgcgaacatgacagcaattctcaggcttccgacagccctgatatatgtcacgattctgaagcaaagcaagagactgagaagcacctcagtgcttgcatgggacctgaagtggaatccagtgagctttgtctcactgagccagagatagatgaagaacccatttatgagcctggacgggagtttgtcccatccaatgcagaactcgattctgaaaacgcaactgtgctgcctccaattggctatcaagcagacataaagggctcctctcagcccgcctctcataaaggttcacctgaaccttctgaaataaacggtgacaacagtacaggtttacaagtatcagaaaaaggagccagcccagatatggcaccaattttggaaccagttgacagaagaatcccaaggattgaaaatgtggcaactagcatttttgtaactcaccaagagccaactccagaaggtgacggttcttggatatcagacagcttttctcctgaaagtcagcctggtgcaagagctttgtttgatggtgatccacatttatccacagagaatcctgccttggttcctgatgctttgctagcctcagacacttgtctggatataagcgaagctgcctttgaccacagtttcagcgatgcctcaggtctcaacacatccacgggaacaatagatgacatgagtaaactgacattatccgaaggccatccggaaacgccagttgatggggacctagggaagcaagatatctgctcatctgaagcctcgtggggtgattttgaatatgatgtaatgggccagaatatcgatgaagatttactgagagagcctgaacacttcctgtatggtggtgaccctcctttggaggaagattctctgaagcagtcgctggcaccgtacacacctccctttgatttgtcttatctcacagaacctgcccagagtgctgaaacaatagaggaagctgggtctccagaggatgaatctctgggatgcagagcagcagagatagtgctttctgcacttcctgatcgaagaagtgagggaaaccaggctgagaccaaaaacagactgcctggatcccagctggctgtgctgcatattcgtgaagaccctgagtccgtttatttgccggtaggagcaggctccaacattttgtctccatcaaacgttgactgggaagtagaaacagataattctgatttaccagcaggtggagacataggaccaccaaatggtgccagcaaggaaatatcagaattggaagaagaaaaaacaattcctaccaaagagcctgagcagataaaatcagaatacaaggaagaaagatgtacagagaagaatgaagatcgtcatgcactacacatggattacatacttgtaaaccgtgaagaaaattcacactcaaagccagagacctgtgaagaaagagaaagcatagctgaattagaattgtatgtaggttccaaagaaacagggctgcagggaactcagttagcaagcttcccagacacatgtcagccagcctccttaaatgaaagaaaaggtctctctgcagagaaaatgtcttctaaaagcgatacgagatcatcttttgaaagccctgcacaagaccagagttggatgttcttgggccatagtgaggttggtgatccatcactggatgccagggactcagggcctgggtggtctggcaagactgtggagccgttctctgaactcggcttgggtgagggtccccagctgcagattctggaagaaatgaagcctctagaatctttggcactagaggaagcctctggtccagtcagccaatcacagaagagtaagagccgaggcagggctggcccggatgcagttacgttgcaggctgtcacccatgacaatgaatgggaaatgctttcaccacagcctgttcagaaaaacatgatccctgacacggaaatggaggaggagacagagttccttgagctcggaaccaggatatcaagaccaaatggactactgtcagaggatgtaggaatggacatcccctttgaagagggcgtgctgagtcccagtgctgcagacatgaggcctgaacctcctaattctctggatcttaatgacactcatcctcggagaatcaagctcacagccccaaatatcaatctttctctggaccaaagtgaaggatctattctctctgatgataacttggacagtccagatgaaattgacatcaatgtggatgaacttgatacccccgatgaagcagattcttttgagtacactggccatgatcccacagccaacaaagattctggccaagagtcagagtctattccagaatatacggccgaagaggaacgggaggacaaccggctttggaggacagtggtcattggagaacaagagcagcgcattgacatgaaggtcatcgagccctacaggagagtcatttctcacggaggagattcaggatactatggggacggtctaaatgccatcattgtgtttgccgcctgttttctgccagacagcagtcgggcggattaccactatgtcatggaaaatcttttcctatatgtaataagtactttagagttgatggtagctgaagactatatgattgtgtacttgaatggtgcaaccccaagaaggaggatgccagggctaggctggatgaagaaatgctaccagatgattgacagacggttgaggaagaatttgaaatcattcatcattgttcatccatcttggttcatcagaacaatccttgctgtgacacgaccttttataagttcaaaattcagcagtaaaattaaatatgtcaatagcttatcagaactcagtgggctgatcccaatggattgcatccacattccagagagcatcatcaatattgacttgaagctgaaagaaaagccttagttggccatgctggaagaagaggatgcttttctggttcatggttctgttgaaacatatctacctgaaagagacagggctgatgttacctttttccactttgcactacctggtgccattctaaatttctaaggggaaaaatagaaagtttgtttactcttaagatattttatgaaattgtgtgtactttcctattttgccaattatgtgcctcaaagattttagttgagccttagcaagaaagtaggaccttccatttcaatacttcattaacacggtgtagt

SEQ ID NO: 24973 - DNA, 12587 bp, Homo sapiens
  source 1..12587: mol_type = unassigned DNA
ggagggagcagtcggtcgctgcgccccggcgggccactttcccgggaccccgctcgtcttccttgggccgagattttccactgcgcccctccgagtacccgggttccaaacccctagccacgacatggaagaatttttgcaacgcgccaaatctaaactgaatcgaagcaaacgcttggagaaggtccatgtggttattgggcctaaatcgtgtgacttggattctctcatttctaccttcacatatgcttactttctagacaaggtcagtccaccaggggttctgtgtttaccagtgctgaacataccaagaactgaattcaactacttcaccgagacgaggtttattttagaagagctaaatatttccgaatcattccacatattccgggatgaaattaacctgcatcagctaaatgatgaagggaagttatcgataacacttgttggcagcagtgtgctggcgagtgaagacaaaactttagaatcagcagttgtcaaagtcattaatccggttgagcagagcgatgccaacgttgagttccgagagtcttcctcttctctcgtgctaaaggagattctccaagaggctcctgagctcatcaccgagcaactggctcatcgcctcagaggtagcattcttttcaagtggatgaccatggaatcagagaagatctcagagaagcaggaggaaattctttctatcctggaagaaaaatttcctaacttgcctccaagagaggacatcatcaacgtcctacaggagacccagttcagtgctcagggtttaagtattgaacagacaatgttgaaagatctaaaggagctgtcagatggagaaataaaagtggccattagtactgtgagcatgaaccttgagaattgtctatttcacagcaatattaccagtgacttgaaagcatttacagacaagtttggttttgatgtcctcatcctgttctccagctatctgtcagaggagcagcagccgagacgacagattgctgtgtactcagaaaacatggagctgtgcagtcagatttgctgtgagctggaagagtgtcagaacccttgcctagaactggagccctttgactgtggctgtgatgagatcctggtgtaccaacaagaggacccttcagtgacttgtgatcaggtggttctcgttgtcaaggaagtcatcaacaggaggtgtccagagatggtctccaatagccggacatcctcaacagaagccgtggcaggcagtgcccccctctcccaggggtcttctgggattatggaattgtatggttctgacatagagccacaacccagctctgtgaatttcatagagaaccctccagatctcaatgattctaaccaggctcaggtggatgccaatgtagaccttgttagcccagacagcggactggctaccattaggagcagccgctcatccaaggagagctctgttttcctcagtgacgacagccccgtgggagaaggtgctgggcctcaccacacccttctcccagggcttgactcctacagccccatccctgaaggggcggtggcggaggaacatgcatggtctggagaacacggtgagcacttcgacctcttcaattttgacccagcacccatggcttctgggcagtcccagcaatcttctcattctgcagactactccccagcagatgacttcttccccaacagtgacctgtcagaaggacagctccccgctgggcctgaaggacttgatggcatgggaaccaacatgtctaattattcatccagttcacttttgtcaggggctggcaaagatagccttgtggaacatgatgaggagtttgtccagagacaagacagtcccagagataactctgaaagaaatttgagcctgacagattttgtgggagatgaatccccttccccagaaaggctaaaaaatactggaaagaggatcccaccaacacccatgaatagtttagtagaaagctcgccatccactgaagaaccagcctcactctatacagaagatatgacccaaaaagcaactgacacaggtcacatggggccacctcagacccatgcacggtgcagcagctggtggggtggtttggaaattgactccaaaaatattgcagatgcgtggagttccagtgaacaggaatctgttttccagagccctgaatcatggaaagagcataagccaagctccattgataggagagcctcagattctgtatttcaaccaaagagcctcgaatttacaaagtcaggtccctgggagtctgaatttggtcagcctgaactgggtagcaatgatattcaagacaaaaatgaggaaagcttgccgttccagaacctgcccatggagaagtcacctttgccaaatacatctccccaaggaacaaaccacctgatagaagactttgcttctttgtggcattctggtcgctctcccacagccatgcccgagccctggggaaatcctacagatgatggtgaaccagcagctgtggcgccattcccagcctggagtgcatttggtaaagaagatcatgatgaagctttaaaaaatacctggaatttgcacccaacaagcagcaagacaccttctgttagggacccgaatgagtgggccatggcaaaaagtgggtttgccttttcttcttcagaactactggacaattcacccagtgagataaacaatgaagcagctccagaaatctggggcaagaaaaacaatgactccagggatcacatctttgcacctggaaatcccagttctgatctggatcacacatggactaattctaagccaccaaaagaagatcagaatggtttagtggatcctaaaactaggggcaaggtatatgaaaaggtagattcctggaacctttttgaggagaatatgaagaaaggagggtcagatgtcctagttccttgggaagattccttcttatcttacaaatgttctgattacagtgcatccaacctaggagaagattcggtgccttcccccttagataccaattattccacctcagactcttacacatcaccaacatttgctggagacgaaaaggaaactgaacacaagccatttgctaaagaggaaggttttgagtcaaaagatggtaactccacggcagaggagactgacattcctcctcagtcactgcaacagtcatctcgaaatcgaatcagttcaggtcctgggaacctagacatgtgggcttcacctcatacagataacagttctgaaataaataccactcacaacctggatgaaaatgaactcaagacagagcacacagatggtaagaatatctccatggaggatgacgtcggggaaagcagccagtccagttacgacgaccccagcatgatgcaactgtacaatgaaacaaaccgacaactcacacttttgcacagcagcaccaactcccggcagacggcccctgacagtctcgacttgtggaacagagtgattttggaggatactcagtccactgcaacgatctcagatatggacaatgatttggactgggatgactgcagtgggggtgcggcaatccccagtgatggtcaaacagaaggatacatggctgaaggttccgagccggaaacccgatttacagtgagacagctggaaccctggggcttggagtatcaggaagcaaatcaggtagattgggagctccctgcctctgatgagcataccaaggacagtgctcccagtgaacatcacacattgaatgagaaaagtgggcagctaattgcaaacagtatttgggattctgtcatgagagataaagacatgtcatcattcatgttaccaggctcctcacatatcacagattcagagcaaagggaattgcctcctgaaatccccagccattcagcaaatgttaaagacactcattccccagatgcgccagcagcctctggaaccagtgaatcagaggcacttatatctcatcttgacaagcaggacacagagagggaaaccctgcaaagtgatgcagcatccttggcgactaggcttgagaatccagggtattttccacacccagatccatggaaaggtcatggcgatggacaaagtgaaagtgagaaggaagcccagggagccactgacagggggcaccttgatgaagaggaggtgatcgcctctggtgtggagaatgcctcagggatttctgaaaaagggcagagtgaccaggaactgtcttctctggttgcatctgaacatcaggaaatctgcattaaatcaggcaaaatcagctctcttgctgtcactttcagtcctcaaaccgaggaaccagaggaagttttagagtatgaggaggggtcttacaatctagactcccgtgatgtgcaaacagggatgtccgcagataacctgcagccaaaagatacccatgaaaaacacctcatgagtcaaagaaattcaggtgaaactactgagacttcagatgggatgaatttcacaaaatatgtatctgtacctgaaaaggatcttgagaaaactgaagaatgtaactttctagagccagagaacgtgggtggagggccacctcacagagttccccgaagtcttgattttggggacgtccctatagacagtgatgtgcatgtcagcagcacatgttctgagataaccaaaaatcttgacgttaaggggtctgaaaatagccttccaggagccggttcgtctggaaattttgacagagatactatttctagtgagtatactcattcaagtgcatcaagtcctgagttaaatgactcttcagttgcactgtcctcctggggccagcaacccagttctgggtatcaagaagaaaaccaaggcaactggagtgaacagaatcaccaagaatctgaactaattaccactgatggccaagtagaaatagttaccaaagtgaaggatttagagaaaaacagaataaatgagtttgaaaagagctttgatcgcaaaactcctacatttttagagatctggaatgactcagttgatggtgattccttttcctctttatccagtcctgaaacaggcaaatattctgaacattcagggacacatcaggaaagcaatctaattgctagctaccaggagaaaaatgaacatgacatttctgcaactgtgcagccagaggatgccagggtcatttcaacaagctcaggttctgatgatgacagtgtcggtggtgaagagtcaatagaggaagagatccaggtggccaactgccacgttgctgaggatgaatccagagcttgggattcattgaatgaatctaataagttcttggtcacagctgatcctaagtctgaaaatatttatgactacctagacagctcagagccagcagagaatgagaataagtcaaacccattctgtgacaatcaacaaagcagccctgatccctggactttctcaccattaacggagactgaaatgcagattacagcagtggagaaggagaagagatcttctccagaaacagggacaacaggagatgttgcatggcaaatatctcccaaagcttcgttcccaaagaacgaagataattctcaactggaaatgctgggcttctcagctgatagcactgagtggtggaaggcctcaccccaggaagggagactaattgaaagtccatttgaaagggagctgtctgactccagtggtgtgttggagataaattcttcagtacaccaaaatgccagtccctggggagtaccagttcagggtgatattgagcccgtggaaacacactatactaatccttttagtgacaaccatcagtcaccctttctggaaggtaatgggaagaactcccatgagcaactctggaacattcaaccaaggcagccagacccagatgctgacaagttcagccagcttgtaaaattagaccaaattaaagaaaaggactcaagagagcaaacctttgtgtctgctgctggtgatgagctgactcctgaaacacctacccaagagcagtgtcaggacaccatgctgccagtctgtgatcatccggacacagcctttactcacgcagaggaaaatagttgtgttacatctaatgtttcaactaatgaaggtcaagaaacaaatcagtgggaacaagaaaaatcatacctaggtgagatgacaaattcaagcattgccacagaaaattttcctgctgtcagttctcccacccaactgataatgaagccaggctctgaatgggatggctctaccccaagtgaggactcccgaggtacctttgtgccagatattttacatggcaactttcaagagggtgggcagctggcctctgccgcgcctgacttgtggatagatgctaagaagcccttcagtttgaaagcagatggtgagaatcctgatatcctgacgcactgcgaacatgacagcaattctcaggcttccgacagccctgatatatgtcacgattctgaagcaaagcaagagactgagaagcacctcagtgcttgcatgggacctgaagtggaatccagtgagctttgtctcactgagccagagatagatgaagaacccatttatgagcctggacgggagtttgtcccatccaatgcagaactcgattctgaaaacgcaactgtgctgcctccaattggctatcaagcagacataaagggctcctctcagcccgcctctcataaaggttcacctgaaccttctgaaataaacggtgacaacagtacaggtttacaagtatcagaaaaaggagccagcccagatatggcaccaattttggaaccagttgacagaagaatcccaaggattgaaaatgtggcaactagcatttttgtaactcaccaagagccaactccagaaggtgacggttcttggatatcagacagcttttctcctgaaagtcagcctggtgcaagagctttgtttgatggtgatccacatttatccacagagaatcctgccttggttcctgatgctttgctagcctcagacacttgtctggatataagcgaagctgcctttgaccacagtttcagcgatgcctcaggtctcaacacatccacgggaacaatagatgacatgagtaaactgacattatccgaaggccatccggaaacgccagttgatggggacctagggaagcaagatatctgctcatctgaagcctcgtggggtgattttgaatatgatgtaatgggccagaatatcgatgaagatttactgagagagcctgaacacttcctgtatggtggtgaccctcctttggaggaagattctctgaagcagtcgctggcaccgtacacacctccctttgatttgtcttatctcacagaacctgcccagagtgctgaaacaatagaggaagctgggtctccagaggatgaatctctgggatgcagagcagcagagatagtgctttctgcacttcctgatcgaagaagtgagggaaaccaggctgagaccaaaaacagactgcctggatcccagctggctgtgctgcatattcgtgaagaccctgagtccgtttatttgccggtaggagcaggctccaacattttgtctccatcaaacgttgactgggaagtagaaacagataattctgatttaccagcaggtggagacataggaccaccaaatggtgccagcaaggaaatatcagaattggaagaagaaaaaacaattcctaccaaagagcctgagcagataaaatcagaatacaaggaagaaagatgtacagagaagaatgaagatcgtcatgcactacacatggattacatacttgtaaaccgtgaagaaaattcacactcaaagccagagacctgtgaagaaagagaaagcatagctgaattagaattgtatgtaggttccaaagaaacagggctgcagggaactcagttagcaagcttcccagacacatgtcagccagcctccttaaatgaaagaaaaggtctctctgcagagaaaatgtcttctaaaagcgatacgagatcatcttttgaaagccctgcacaagaccagagttggatgttcttgggccatagtgaggttggtgatccatcactggatgccagggactcagggcctgggtggtctggcaagactgtggagccgttctctgaactcggcttgggtgagggtccccagctgcagattctggaagaaatgaagcctctagaatctttggcactagaggaagcctctggtccagtcagccaatcacagaagagtaagagccgaggcagggctggcccggatgcagttacgttgcaggctgtcacccatgacaatgaatgggaaatgctttcaccacagcctgttcagaaaaacatgatccctgacacggaaatggaggaggagacagagttccttgagctcggaaccaggatatcaagaccaaatggactactgtcagaggatgtaggaatggacatcccctttgaagagggcgtgctgagtcccagtgctgcagacatgaggcctgaacctcctaattctctggatcttaatgacactcatcctcggagaatcaagctcacagccccaaatatcaatctttctctggaccaaagtgaaggatctattctctctgatgataacttggacagtccagatgaaattgacatcaatgtggatgaacttgatacccccgatgaagcagattcttttgagtacactggccatgaagatcccacagccaacaaagattctggccaagagtcagagtctattccagaatatacggccgaagaggaacgggaggacaaccggctttggaggacagtggtcattggagaacaagagcagcgcattgacatgaaggtcatcgagccctacaggagagtcatttctcacggaggatactatggggacggtctaaatgccatcattgtgtttgccgcctgttttctgccagacagcagtcgggcggattaccactatgtcatggaaaatcttttcctatatgtaataagtactttagagttgatggtagctgaagactatatgattgtgtacttgaatggtgcaaccccaagaaggaggatgccagggctaggctggatgaagaaatgctaccagatgattgacagacggttgaggaagaatttgaaatcattcatcattgttcatccatcttggttcatcagaacaatccttgctgtgacacgaccttttataagttcaaaattcagcagtaaaattaaatatgtcaatagcttatcagaactcagtgggctgatcccaatggattgcatccacattccagagagcatcatcaaactggatgaagaactgagggaagcatcagaggcagctaaaactagctgcctttacaatgatccagaaatgtcttctatggagaaggatattgacttgaagctgaaagaaaagccttagttggccatgctggaagaagaggatgcttttctggttcatggttctgttgaaacatatctacctgaaagagacagggctgatgttacctttttccactttgcactacctggtgccattctaaatttctaaggggaaaaatagaaagtttgtttactcttaagatattttatgaaattgtgtgtactttcctattttgccaattatgtgcctcaaagattttagttgagccttagcaagaaagtaggaccttccatttcaatacttcattaacacggtgtagtgatactttgtcccttagactggtgtttaccagtaagatacctttaatccactgttaagtatgagtggatttgtttccatagattagctggatttccttttggtgattgcattaggtttaaagtacacaggtctcaactctccccaggaaagtttcccctgtttgactccacctttaaaatcctaagcctgactaggacagccacaaaccacacaaggtgtaaaaccatcatcagctaagtgcccgttttgttcttgtttaccagaatctcctttaacttctcaaagggaagccgggctttctaatccacgtcaactttattttagttgtcaaattgggcattatattttatgtaaattggtcttttaacatcattttcctgatgaatgttggtgaccaccacattgtgaaatttaagaatccgtgttgcatgtttggtagctctctgagtttcaggccataaactcagctccagaggttaccttttaagtgccaagaactcaagtgcaaggtggcctactcaaaaatcatttggtagcattcagttattcatgaattcctctctcgcatgcattataaaaagtgatctgctttaaaacaccgtaatctgatcataggcttaaaattaaatatgagtattactttcatgtacaaaatatttcctttatagtcttcatatgccctttaaaatgccaacaagatttcaagtctgtaggcctctagtgaggtggggtggcaaaccacagctaagtctcgctcaccactgcaagctaagaatggtttttacattttgggttggaaaaattttttttgaatatttcatgacacatgaaaattattcaaatgttagtgccgataaataaagtggtactgaaacacagccacacaaacttgtttttgtactgtctacagctactttcacactacagccgcagagctgagcagttcagcagaccgtatgtcccacaatgcctaaaacattgactatgtttacagaaaaagtttgctgacccctgctctagcaaacgcatcctttcctactccaccccaatttgtatttagatagtttctctaacagaacggacaaatgaggctgcaaactaatttatttttgtcaaaaatcaatgttttgacatccacagacagtgaaataaaagaaatggcttgctgaaaaacatgaggagtcctagccacaaaatcactgcttaggttgcaattgccaaaatgaagccttcttagaagcacttctttagtatatacaggtgttggctgaagtccgtgcctcactctgggaaccattcttagtctccagtgtctcctattacaaagaagctggcagaaataaaaatgaaggggtgagagcggttccaccctagtctcatggtggaaaattcattggggagagctgtccaggatatttggagtcctgggtagaaggagcttgtaactactttaaagtcgacatctttgcacaggtgattgagtttctctgacctcattgcttcacctctgtctcctcccgtccttccgcacgtgcccacacacacgcagttcagccctctttcctccataagcctccatcgttttctcttttctcctcttgatcctttcaagcgagtatcttgttgaattgtatgttctgttggatctcctccttcataacatctggcttgttggacagaaaaaccctacagcccaccccctcccacagcccacctccacttttgaaagcccaaattacacctctcccagaacacagtgttgacgtaaatacagttacccaatattcctgtttgttcacctatttgctactttcactcagtagcatcccattttgtaaaatgaattccatggtcaccctgtcacaggaagtaatgaaaaatccagtgttcagtgtagtggtgcaaacctgagggcatagagctgttcatagagggctcttgttatagccaaacagacacagcaacaatctcaccatttatatatatatttttaacttgtccagctcatctatggaaaactactcaggtggtatgctgtttgaagcctcatcttcctacatgaaaattatgggcatttgtcccaatgattttgtttcagctgttctgtaggctgcataaccactctgatatttaggtatctgctattttattatcttaaaagacaaattaatttaattgcatgtgctagggaaaagctaccatgtacattcaccccaagtaaatagaatcctagatgaatcctagaaaaataatccctaagcagataggtagacagaggtaaacattcacatgatttagctctctagctcttgcactctgaacattcttgctttggttctgacttctgggaactgctttgcatttctcctatagatctgtagttaagggaaccaaggggtcattggggcaaaagcattgtttctcaaagctccttgattaagagaaagaacagaaatttgcacagaagatagtgtcaaggagtgagaaagtttgtttgagggcagtagctcagtgtggaagaaaatcctgaagtttctgttgaagccatacaatgttctatggggttactctctaagacattctctgaggtgtgtgaggaagtcactactcctagcctttgttaagatgtaattttaaatattcagttatggtactatgtttgcaactctcgtcttatcacaatgcctcagtagtttgttcccttagaaacatttagatgtgcacaaattaatcttttatatatctaaaggtttttctatcatgcattggattgctcagaataaagtgtctgttagacttcgttttggtaaataaattctccataatgtagattaataatataaaagtctttaatgacacaatatatctatatagcctcactgtataattcagaaataaaaattgattctgc

SEQ ID NO: 24974 - DNA, 5674 bp, Homo sapiens
  source 1..5674: mol_type = unassigned DNA
gctttgtttgatggtgatccacatttatccacagagaatcctgccttggttcctgatgctttgctagcctcagacacttgtctggatataagcgaagctgcctttgaccacagtttcagcgatgcctcaggtctcaacacatccacgggaacaatagatgacatgagtaaactgacattatccgaaggccatccggaaacgccagttgatggggacctagggaagcaagatatctgctcatctgaagcctcgtggggtgattttgaatatgatgtaatgggccagaatatcgatgaagatttactgagagagcctgaacacttcctgtatggtggtgaccctcctttggaggaagattctctgaagcagtcgctggcaccgtacacacctccctttgatttgtcttatctcacagaacctgcccagagtgctgaaacaatagaggaagctgggtctccagaggatgaatctctgggatgcagagcagcagagatagtgctttctgcacttcctgatcgaagaagtgagggaaaccaggctgagaccaaaaacagactgcctggatcccagctggctgtgctgcatattcgtgaagaccctgagtccgtttatttgccggtaggagcaggctccaacattttgtctccatcaaacgttgactgggaagtagaaacagataattctgatttaccagcaggtggagacataggaccaccaaatggtgccagcaaggaaatatcagaattggaagaagaaaaaacaattcctaccaaagagcctgagcagataaaatcagaatacaaggaagaaagatgtacagagaagaatgaagatcgtcatgcactacacatggattacatacttgtaaaccgtgaagaaaattcacactcaaagccagagacctgtgaagaaagagaaagcatagctgaattagaattgtatgtaggttccaaagaaacagggctgcagggaactcagttagcaagcttcccagacacatgtcagccagcctccttaaatgaaagaaaaggtctctctgcagagaaaatgtcttctaaaagcgatacgagatcatcttttgaaagccctgcacaagaccagagttggatgttcttgggccatagtgaggttggtgatccatcactggatgccagggactcagggcctgggtggtctggcaagactgtggagccgttctctgaactcggcttgggtgagggtccccagctgcagattctggaagaaatgaagcctctagaatctttggcactagaggaagcctctggtccagtcagccaatcacagaagagtaagagccgaggcagggctggcccggatgcagttacgttgcaggctgtcacccatgacaatgaatgggaaatgctttcaccacagcctgttcagaaaaacatgatccctgacacggaaatggaggaggagacagagttccttgagctcggaaccaggatatcaagaccaaatggactactgtcagaggatgtaggaatggacatcccctttgaagagggcgtgctgagtcccagtgctgcagacatgaggcctgaacctcctaattctctggatcttaatgacactcatcctcggagaatcaagctcacagccccaaatatcaatctttctctggaccaaagtgaaggatctattctctctgatgataacttggacagtccagatgaaattgacatcaatgtggatgaacttgatacccccgatgaagcagattcttttgagtacactggccatgatcccacagccaacaaagattctggccaagagtcagagtctattccagaatatacggccgaagaggaacgggaggacaaccggctttggaggacagtggtcattggagaacaagagcagcgcattgacatgaaggtcatcgagccctacaggagagtcatttctcacggaggtaagctaagatactatggggacggtctaaatgccatcattgtgtttgccgcctgttttctgccagacagcagtcgggcggattaccactatgtcatggaaaatcttttcctatatgtaataagtactttagagttgatggtagctgaagactatatgattgtgtacttgaatggtgcaaccccaagaaggaggatgccagggctaggctggatgaagaaatgctaccagatgattgacagacggttgaggaagaatttgaaatcattcatcattgttcatccatcttggttcatcagaacaatccttgctgtgacacgaccttttataagttcaaaattcagcagtaaaattaaatatgtcaatagcttatcagaactcagtgggctgatcccaatggattgcatccacattccagagagcatcatcaagtacgatgaagagagatcttataagagaagtgtgagaactagctgcctttacaatgatccagaaatgtcttctatggagaaggatattgacttgaagctgaaagaaaagccttagttggccatgctggaagaagaggatgcttttctggttcatggttctgttgaaacatatctacctgaaagagacagggctgatgttacctttttccactttgcactacctggtgccattctaaatttctaaggggaaaaatagaaagtttgtttactcttaagatattttatgaaattgtgtgtactttcctattttgccaattatgtgcctcaaagattttagttgagccttagcaagaaagtaggaccttccatttcaatacttcattaacacggtgtagtgatactttgtcccttagactggtgtttaccagtaagatacctttaatccactgttaagtatgagtggatttgtttccatagattagctggatttccttttggtgattgcattaggtttaaagtacacaggtctcaactctccccaggaaagtttcccctgtttgactccacctttaaaatcctaagcctgactaggacagccacaaaccacacaaggtgtaaaaccatcatcagctaagtgcccgttttgttcttgtttaccagaatctcctttaacttctcaaagggaagccgggctttctaatccacgtcaactttattttagttgtcaaattgggcattatattttatgtaaattggtcttttaacatcattttcctgatgaatgttggtgaccaccacattgtgaaatttaagaatccgtgttgcatgtttggtagctctctgagtttcaggccataaactcagctccagaggttaccttttaagtgccaagaactcaagtgcaaggtggcctactcaaaaatcatttggtagcattcagttattcatgaattcctctctcgcatgcattataaaaagtgatctgctttaaaacaccgtaatctgatcataggcttaaaattaaatatgagtattactttcatgtacaaaatatttcctttatagtcttcatatgccctttaaaatgccaacaagatttcaagtctgtaggcctctagtgaggtggggtggcaaaccacagctaagtctcgctcaccactgcaagctaagaatggtttttacattttgggttggaaaaattttttttgaatatttcatgacacatgaaaattattcaaatgttagtgccgataaataaagtggtactgaaacacagccacacaaacttgtttttgtactgtctacagctactttcacactacagccgcagagctgagcagttcagcagaccgtatgtcccacaatgcctaaaacattgactatgtttacagaaaaagtttgctgacccctgctctagcaaacgcatcctttcctactccaccccaatttgtatttagatagtttctctaacagaacggacaaatgaggctgcaaactaatttatttttgtcaaaaatcaatgttttgacatccacagacagtgaaataaaagaaatggcttgctgaaaaacatgaggagtcctagccacaaaatcactgcttaggttgcaattgccaaaatgaagccttcttagaagcacttctttagtatatacaggtgttggctgaagtccgtgcctcactctgggaaccattcttagtctccagtgtctcctattacaaagaagctggcagaaataaaaatgaaggggtgagagcggttccaccctagtctcatggtggaaaattcattggggagagctgtccaggatatttggagtcctgggtagaaggagcttgtaactactttaaagtcgacatctttgcacaggtgattgagtttctctgacctcattgcttcacctctgtctcctcccgtccttccgcacgtgcccacacacacgcagttcagccctctttcctccataagcctccatcgttttctcttttctcctcttgatcctttcaagcgagtatcttgttgaattgtatgttctgttggatctcctccttcataacatctggcttgttggacagaaaaaccctacagcccaccccctcccacagcccacctccacttttgaaagcccaaattacacctctcccagaacacagtgttgacgtaaatacagttacccaatattcctgtttgttcacctatttgctactttcactcagtagcatcccattttgtaaaatgaattccatggtcaccctgtcacaggaagtaatgaaaaatccagtgttcagtgtagtggtgcaaacctgagggcatagagctgttcatagagggctcttgttatagccaaacagacacagcaacaatctcaccatttatatatatatttttaacttgtccagctcatctatggaaaactactcaggtggtatgctgtttgaagcctcatcttcctacatgaaaattatgggcatttgtcccaatgattttgtttcagctgttctgtaggctgcataaccactctgatatttaggtatctgctattttattatcttaaaagacaaattaatttaattgcatgtgctagggaaaagctaccatgtacattcaccccaagtaaatagaatcctagatgaatcctagaaaaataatccctaagcagataggtagacagaggtaaacattcacatgatttagctctctagctcttgcactctgaacattcttgctttggttctgacttctgggaactgctttgcatttctcctatagatctgtagttaagggaaccaaggggtcattggggcaaaagcattgtttctcaaagctccttgattaagagaaagaacagaaatttgcacagaagatagtgtcaaggagtgagaaagtttgtttgagggcagtagctcagtgtggaagaaaatcctgaagtttctgttgaagccatacaatgttctatggggttactctctaagacattctctgaggtgtgtgaggaagtcactactcctagcctttgttaagatgtaattttaaatattcagttatggtactatgtttgcaactctcgtcttatcacaatgcctcagtagtttgttcccttagaaacatttagatgtgcacaaattaatcttttatatatctaaaggtttttctatcatgcattggattgctcagaataaagtgtctgttagacttcgttttggtaaataaattctccataatgtagattaataatataaaagtctttaatgacacaatatatctatatagcctcactgtataattcagaaataaaaattgattctgc

SEQ ID NO: 24975 - DNA, 1530 bp, Homo sapiens
  source 1..1530: mol_type = unassigned DNA
atgtgaccagaaaatggaggcgaatctgtatttccagttaactgctcagaagagagatgctgaagagctgtagtcgtgcatccttctcaccctccgttagaaagcctcctctcatcctcagaagattttaaattctctgagagcagaatgtgtctctgatccattctttttgtaatacagcctcccccgaggctaacactttccatatggctctaggactcaaatgtttgttgaactcctaccggaatgaatggcctgagaaacaaacaactactgtcagaggatgtaggaatggacatcccctttgaagagggcgtgctgagtcccagtgctgcagacatgaggcctgaacctcctaattctctggatcttaatgacactcatcctcggagaatcaagctcacagccccaaatatcaatctttctctggaccaaagtgaaggatctattctctctgatgataacttggacagtccagatgaaattgacatcaatgtggatgaacttgatacccccgatgaagcagattcttttgagtacactggccatgatcccacagccaacaaagattctggccaagagtcagagtctattccagaatatacggccgaagaggaacgggaggacaaccggctttggaggacagtggtcattggagaacaagagcagcgcattgacatgaaggtcatcgagccctacaggagagtcatttctcacggaggatactatggggacggtctaaatgccatcattgtgtttgccgcctgttttctgccagacagcagtcgggcggattaccactatgtcatggaaaatcttttcctatatgtaataagtactttagagttgatggtagctgaagactatatgattgtgtacttgaatggtgcaaccccaagaaggaggatgccagggctaggctggatgaagaaatgctaccagatgattgacagacggttgaggaagaatttgaaatcattcatcattgttcatccatcttggttcatcagaacaatccttgctgtgacacgaccttttataagttcaaaattcagcagtaaaattaaatatgtcaatagcttatcagaactcagtgggctgatcccaatggattgcatccacattccagagagcatcatcaaactggatgaagaactgagggaagcatcagaggcagctaaaactagctgcctttacaatgatccagaaatgtcttctatggagaaggatattgacttgaagctgaaagaaaagccttagttggccatgctggaagaagaggatgcttttctggttcatggttctgttgaaacatatctacctgaaagagacagggctgatgttacctttttccactttgcactacctggtgccattctaaatttctaaggggaaaaatagaaagtttgtttactcttaagatattttatgaaattgtgtgtactttcctattttgccaattatgtgcctcaaagattttagttgagccttagcaagaaagtaggaccttccatttcaatacttcattaa

SEQ ID NO: 24976 - DNA, 1207 bp, Homo sapiens
  source 1..1207: mol_type = unassigned DNA
ttccgccttcgcccacgtggtccggctccggctcagtcagccgcctcgccgcgcatggccgggaacgcggagccgccgcccgccggagccgcatgcccccaggaccggaggtcctgcagcggccgggccgggggcgaccgcgtctgggaggacggagaacatccggcgaagaagctcaagagcggtggcgacgaggagcggcgcgagaagccgcccaagcggaagatcgtgctgctcatggcctattcgggcaagggctaccacggcatgcagaggaatgtcgggtcctcacaattcaaaacaattgaagatgacttggtgtccgccctcgtccggtcaggctgtattcctgaaaatcatggtgaggacatgaggaaaatgtccttccagcgctgcgcccggacagacaagggtgtgtccgcagccggccaggtggtatccctgaaggtgtggctgattgacgacattctagaaaagatcaacagccaccttccctctcacattcggattctgggactgaagcgggtcacgggcgggtttaactccaagaacagatgtgatgccaggacctattgctacctgctgcccacgtttgcctttgcgcacaaggaccgggacgttcaggatgagacctaccgcctgagcgccgagacgctgcagcaggtcaacaggctcctggcctgctacaagggcacgcacaacttccacaatttcacctcgcagaaggggccgcaggatcccagtgcctgccgctacatcctggagatgtactgcgaggaaccctttgtgcgggagggcctggagtttgcggtgatcagggtgaagggccagagcttcatgatgcatcagatccggaagatggtcggcctggtggtggccattgtgaagggttatgcccctgagagcgtgctggagcgcagctggggcacagagaaggtggacgtgcccaaggcgcccggactcggcctggtcctggagagggtgcacttcgagaagtacaaccagcgctttggcaacgatgggctgcatgagccgctggactgggcgcaggaggaaggaaaggtcgcagccttcaaggaggagcacatctaccccaccatcatcggcaccgagcgggacgaacgctccatggcccagtggctgagcaccttgcccatccacaacttcagtgccaccgctctcacggcaggtggcacgggcgccaagg

SEQ ID NO: 24977 - DNA, 2057 bp, Homo sapiens
  source 1..2057: mol_type = unassigned DNA
gtgcagtcggtcgttccacttccgccttcgcccacgtggtccggctccggctcagtcagccgcgtcgcgaatggggcaggagcgagcctctctggtcccgacgcgggtggcccgggtctcctcgactcctgaggaaagcccaccgggcggggcgggaggtgaagaggctggggaagtcagaggttaacctgggcgtcaggggacgttggagttgatccgtcagggtcccggggcggtctgggggcagtagagacggggcttgggcgcggggcctgagaggtcaggggtcagcaggagtgaggctggggcgtccaggtccgagaggtcaggggtcagctggagaggggctggggcgccggtttcccggaggtcaggggtcagaaggaacagggctgcagcgtcagggtccgagaggttaggggtcggcagaggcggagctggggcactgggggtcaggggtcggggatcagggcggggtcgggtgcactggtagcctgcgcatgggcctccagcttcgcgcgctgttgggagccttcggacggtggaccctgcgcctgggaccgcgtccgtcctgctcgccgcgcatggccgggaacgcggagccgccgcccgccggagccgcatgcccccaggaccggaggtcctgcagcggccgggccgggggcgaccgcgtctgggaggacggagaacatccggcgaagaagctcaagagcggtggcgacgaggagcggcgcgagaagccgcccaagcggaagatcgtgctgctcatggcctattcgggcaagggctaccacggcatgcagaggaatgtcgggtcctcacaattcaaaacaattgaagatgacttggtgtccgccctcgtccggtcaggctgtattcctgaaaatcatggtgaggacatgaggaaaatgtccttccagcgctgcgcccggacagacaagggtgtgtccgcagccggccaggtggtatccctgaaggtgtggctgattgacgacattctagaaaagatcaacagccaccttccctctcacattcggattctgggactgaagcgggtcacgggcgggtttaactccaagaacagatgtgatgccaggacctattgctacctgctgcccacgtttgcctttgcgcacaaggaccgggacgttcaggatgagacctaccgcctgagcgccgagacgctgcagcaggtcaacaggctcctggcctgctacaagggcacgcacaacttccacaatttcacctcgcagaaggggccgcaggatcccagtgcctgccgctacatcctggagatgtactgcgaggaaccctttgtgcgggagggcctggagtttgcggtgatcagggtgaagggccagagcttcatgatgcatcagatccggaagatggtcggcctggtggtggccattgtgaagggttatgcccctgagagcgtgctggagcgcagctggggcacagagaaggtggacgtgcccaaggcgcccggactcggcctggtcctggagagggtgcacttcgagaagtacaaccagcgctttggcaacgatgggctgcatgagccgctggactgggcgcaggaggaaggaaaggtcgcagccttcaaggaggagcacatctaccccaccatcatcggcaccgagcgggacgaacgctccatggcccagtggctgagcaccttgcccatccacaacttcagtgccaccgctctcacggcaggtggcacgggcgccaaggtgcccagtcccctggaaggcagtgaaggggacggagacactgactgaggcgatgggagctgcccaccagagtgcctctgagcagctcacagtgtgtgcccagatgtgccacccctgtgggcagcaagaagctgggatcgctgcagccatgttttcccggccatgccggcgttgtaacctcaggaccttcccttgtaggaacagcctttctcgaatctgttttcagctcttgcattgcatagatgaacctcagcatgtaaagaactatttttttaaagaagtgattttcttattaaacaagtacaaattttgcttagtcaa

SEQ ID NO: 24978 - DNA, 1637 bp, Homo sapiens
  source 1..1637: mol_type = unassigned DNA
cccacgtggtccggctccggctcagtcagccgcgtcgcgaatggggcaggagcgagcctctctggtcccgacgcgggtggcccgggtctcctcgactcctgaggaaagcccaccgggcggggcgggaggtgaagaggctggggaagtcagagctcgccgcgcatggccgggaacgcggagccgccgcccgccggagccgcatgcccccaggaccggaggtcctgcagcggccgggccgggggcgaccgcgtctgggaggacggagaacatccggcgaagaagctcaagagcggtggcgacgaggagcggcgcgagaagccgcccaagcggaagatcgtgctgctcatggcctattcgggcaagggctaccacggcatgcagaggaatgtcgggtcctcacaattcaaaacaattgaagatgacttggtgtccgccctcgtccggtcaggctgtattcctgaaaatcatggtgaggacatgaggaaaatgtccttccagcgctgcgcccggacagacaagggtgtgtccgcagccggccaggtggtatccctgaaggtgtggctgattgacgacattctagaaaagatcaacagccaccttccctctcacattcggattctgggactgaagcgggtcacgggcgggtttaactccaagaacagatgtgatgccaggacctattgctacctgctgcccacgtttgcctttgcgcacaaggaccgggacgttcaggatgagacctaccgcctgagcgccgagacgctgcagcaggtcaacaggctcctggcctgctacaagggcacgcacaacttccacaatttcacctcgcagaaggggccgcaggatcccagtgcctgccgctacatcctggagatgtactgcgaggaaccctttgtgcgggagggcctggagtttgcggtgatcagggtgaagggccagagcttcatgatgcatcagatccggaagatggtcggcctggtggtggccattgtgaagggttatgcccctgagagcgtgctggagcgcagctggggcacagagaaggtggacgtgcccaaggcgcccggactcggcctggtcctggagagggtgcacttcgagaagtacaaccagcgctttggcaacgatgggctgcatgagccgctggactgggcgcaggaggaaggaaaggtcgcagccttcaaggaggagcacatctaccccaccatcatcggcaccgagcgggacgaacgctccatggcccagtggctgagcaccttgcccatccacaacttcagtgccaccgctctcacggcaggtggcacgggcgccaaggtgcccagtcccctggaaggcagtgaaggggacggagacactgactgaggcgatgggagctgcccaccagagtgcctctgagcagctcacagtgtgtgcccagatgtgccacccctgtgggcagcaagaagctgggatcgctgcagccatgttttcccggccatgccggcgttgtaacctcaggaccttcccttgtaggaacagcctttctcgaatctgttttcagctcttgcattgcatagatgaacctcagcatgtaaagaactatttttttaaagaagtgattttcttattaaacaagtacaaattttgcttagtcaatc

SEQ ID NO: 24979 - DNA, 1664 bp, Homo sapiens
  source 1..1664: mol_type = unassigned DNA
agttttgtccgcgctcggccgccgtgcagtcggtcgttccacttccgccttcgcccacgtggtccggctccggctcagtcagccgcgtcgcgaatggggcaggagcgagcctctctggtcccgacgcgggtggcccgggtctcctcgactcctgaggaaagcccaccgggcggggcgggagctcgccgcgcatggccgggaacgcggagccgccgcccgccggagccgcatgcccccaggaccggaggtcctgcagcggccgggccgggggcgaccgcgtctgggaggacggagaacatccggcgaagaagctcaagagcggtggcgacgaggagcggcgcgagaagccgcccaagcggaagatcgtgctgctcatggcctattcgggcaagggctaccacggcatgcagaggaatgtcgggtcctcacaattcaaaacaattgaagatgacttggtgtccgccctcgtccggtcaggctgtattcctgaaaatcatggtgaggacatgaggaaaatgtccttccagcgctgcgcccggacagacaagggtgtgtccgcagccggccaggtggtatccctgaaggtgtggctgattgacgacattctagaaaagatcaacagccaccttccctctcacattcggattctgggactgaagcgggtcacgggcgggtttaactccaagaacagatgtgatgccaggacctattgctacctgctgcccacgtttgcctttgcgcacaaggaccgggacgttcaggatgagacctaccgcctgagcgccgagacgctgcagcaggtcaacaggctcctggcctgctacaagggcacgcacaacttccacaatttcacctcgcagaaggggccgcaggatcccagtgcctgccgctacatcctggagatgtactgcgaggaaccctttgtgcgggagggcctggagtttgcggtgatcagggtgaagggccagagcttcatgatgcatcagatccggaagatggtcggcctggtggtggccattgtgaagggttatgcccctgagagcgtgctggagcgcagctggggcacagagaaggtggacgtgcccaaggcgcccggactcggcctggtcctggagagggtgcacttcgagaagtacaaccagcgctttggcaacgatgggctgcatgagccgctggactgggcgcaggaggaaggaaaggtcgcagccttcaaggaggagcacatctaccccaccatcatcggcaccgagcgggacgaacgctccatggcccagtggctgagcaccttgcccatccacaacttcagtgccaccgctctcacggcaggtggcacgggcgccaaggtgcccagtcccctggaaggcagtgaaggggacggagacactgactgaggcgatgggagctgcccaccagagtgcctctgagcagctcacagtgtgtgcccagatgtgccacccctgtgggcagcaagaagctgggatcgctgcagccatgttttcccggccatgccggcgttgtaacctcaggaccttcccttgtaggaacagcctttctcgaatctgttttcagctcttgcattgcatagatgaacctcagcatgtaaagaactatttttttaaagaagtgattttcttattaaacaagtacaaattttgcttagtcaa

SEQ ID NO: 24980 - DNA, 632 bp, Homo sapiens
  source 1..632: mol_type = unassigned DNA
ccgcgtcgcgaatggggcaggagcgagcctctctggtcccgacgcgggtggcccgggtctcctcgactcctgaggaaagcccaccgggcggggcgggagcttcgcgcgctgttgggagccttcggacggtggaccctgcgcctgggaccgcgtccgtcctgctcgccgcgcatggccgggaacgcggagccgccgcccgccggagccgcatgcccccaggaccggaggtcctgcagcggccgggccgggggcgaccgcgtctgggaggacggagaacatccggcgaagaagctcaagagcggtggcgacgaggagcggcgcgagaagccgcccaagcggaagatcgtgctgctcatggcctattcgggcaagggctaccacggcatgcagaggaatgtcgggtcctcacaattcaaaacaattgaagatgacttggtgtccgccctcgtccggtcaggctgtattcctgaaaatcatggtgaggacatgaggaaaatgtccttccagcgctgcgcccggacagacaagggtgtgtccgcagccggccaggtggtatccctgaaggtgtggctgattgacgacattctagaaaagatcaacagccaccttccctctcacattcggattctggg

SEQ ID NO: 24981 - DNA, 1318 bp, Homo sapiens
  source 1..1318: mol_type = unassigned DNA
aactacaacgtccggctttctgagttgggtggcgggaaaggcgatgagtaaaggccgggcagaagctgcggcgggagccgccgggatcctcctgaggtacctgcaggagcagaaccggccctacagctcccaggatgtgttcgggaacctacagcgggaacacggactgggcaaggcggtggtggtgaagacgctggagcagctggcgcaacaaggcaagatcaaagagaagatgtacggcaagcagaagatctattttgcggatcaggaccagtttgacatggtgagtgatgctgaccttcaagtcctagatggcaaaatcgtggccctcactgctaaggtgcagagcttgcagcagagctgccgctacatggaggctgagatgcagaaagaaatccaggagttaaagaaggaatgcgctggctacagagagagattgaagaacattaaagcagctaccaatcatgtgactccagaagagaaagagcaggtgtacagagagaggcagaagtactgtaaggagtggaggaagaggaagaggatggctacagagctgtctgatgcaatacttgaaggataccccaagagcaagaagcagttctttgaggaagttgggatagagacggatgaagattacaacgtcacactcccagacccctgaggggcccacggtcaggactggtggggactgcaggatgtcagaagagtgagatgtcttgcactggctaccttgtttttggttggcttttgttgttgttcctgctactttcacctttaagcagagcagtcaggagacaagcataaaccagagcactgggtagagaggatgagggctggtggctgggggtagacccagcccatttcattgtctaaattgcagtagcttgaggttaacatttagacttggaacaatgctaaaggaaagcatttggcaatatttattataatttaattttatataaaaatatttaatttcctctggatagtcaaacctgccagatatcaaacctgaggaaggcagaagtgaatttggagaactagggtagagagaggttgctataaaacgagcatttggagggcccacggcttcactcaggacctgctgggcttgtgtaccccaggagcccttttaagtatcttttgtacgcttttcaccccacccccaagtcctgggagaaatgcaggcaacactgagacatgggagaggccaagatatgcttgacagaaagggtgattttgaggctcagttaatatttcaaaattgtaaccgtagcaaaactgcattggtatttagaaaaataaaaaatttccaatatgt

SEQ ID NO: 24982 - DNA, 1354 bp, Homo sapiens
  source 1..1354: mol_type = unassigned DNA
aactacaacgtccggctttctgagttgggtggcgggaaaggcgatgagtaaaggccgggcagaagctgcggcgggagccgccgggatcctcctgaggtacctgcaggagcagaaccggccctacagctcccaggatgtgttcgggaacctacagcgggaacacggactgggcaaggcggtggtggtgaagacgctggagcagctggcgcaacaaggcaagatcaaagagaagatgtacggcaagcagaagatctattttgcggatcaggaccagtttgacatggtgagtgatgctgaccttcaagtcctagatggcaaaatcgtggccctcactgctaaggtgcagagcttgcagcagagctgccgctacatggaggctgagctcaaggaattatctagtgccctgaccacaccagagatgcagaaagaaatccaggagttaaagaaggaatgcgctggctacagagagagattgaagaacattaaagcagctaccaatcatgtgactccagaagagaaagagcaggtgtacagagagaggcagaagtactgtaaggagtggaggaagaggaagaggatggctacagagctgtctgatgcaatacttgaaggataccccaagagcaagaagcagttctttgaggaagttgggatagagacggatgaagattacaacgtcacactcccagacccctgaggggcccacggtcaggactggtggggactgcaggatgtcagaagagtgagatgtcttgcactggctaccttgtttttggttggcttttgttgttgttcctgctactttcacctttaagcagagcagtcaggagacaagcataaaccagagcactgggtagagaggatgagggctggtggctgggggtagacccagcccatttcattgtctaaattgcagtagcttgaggttaacatttagacttggaacaatgctaaaggaaagcatttggcaatatttattataatttaattttatataaaaatatttaatttcctctggatagtcaaacctgccagatatcaaacctgaggaaggcagaagtgaatttggagaactagggtagagagaggttgctataaaacgagcatttggagggcccacggcttcactcaggacctgctgggcttgtgtaccccaggagcccttttaagtatcttttgtacgcttttcaccccacccccaagtcctgggagaaatgcaggcaacactgagacatgggagaggccaagatatgcttgacagaaagggtgattttgaggctcagttaatatttcaaaattgtaaccgtagcaaaactgcattggtatttagaaaaataaaaaatttccaatatgt

SEQ ID NO: 24983 - DNA, 1381 bp, Homo sapiens
  source 1..1381: mol_type = unassigned DNA
cgggaaaggcgatgagtaaaggccgggcagaagctgcggcgggaggtaacggcgccgtgggcgcggggaagacccgggagggcagtgggtgaggaggtcggttgagtggccccctcccctgcctttctctccgtagccgccgggatcctcctgaggtacctgcaggagcagaaccggccctacagctcccaggatgtgttcgggaacctacagcgggaacacggactgggcaaggcggtggtggtgaagacgctggagcagctggcgcaacaaggcaagatcaaagagaagatgtacggcaagcagaagatctattttgcggatcaggaccagtttgacatggtgagtgatgctgaccttcaagtcctagatggcaaaatcgtggccctcactgctaaggtgcagagcttgcagcagagctgccgctacatggaggctgagctcaaggaattatctagtgccctgaccacaccagagatgcagaaagaaatccaggagttaaagaaggaatgcgctggctacagagagagattgaagaacattaaagcagctaccaatcatgtgactccagaagagaaagagcaggtgtacagagagaggcagaagtactgtaaggagtggaggaagaggaagaggatggctacagagctgtctgatgcaatacttgaaggataccccaagagcaagaagcagttctttgaggaagttgggatagagacggatgaagattacaacgtcacactcccagacccctgaggggcccacggtcaggactggtggggactgcaggatgtcagaagagtgagatgtcttgcactggctaccttgtttttggttggcttttgttgttgttcctgctactttcacctttaagcagagcagtcaggagacaagcataaaccagagcactgggtagagaggatgagggctggtggctgggggtagacccagcccatttcattgtctaaattgcagtagcttgaggttaacatttagacttggaacaatgctaaaggaaagcatttggcaatatttattataatttaattttatataaaaatatttaatttcctctggatagtcaaacctgccagatatcaaacctgaggaaggcagaagtgaatttggagaactagggtagagagaggttgctataaaacgagcatttggagggcccacggcttcactcaggacctgctgggcttgtgtaccccaggagcccttttaagtatcttttgtacgcttttcaccccacccccaagtcctgggagaaatgcaggcaacactgagacatgggagaggccaagatatgcttgacagaaagggtgattttgaggctcagttaatatttcaaaattgtaaccgtagcaaaactgcattg

SEQ ID NO: 24984 - DNA, 6926 bp, Homo sapiens
  source 1..6926: mol_type = unassigned DNA
acgctagtggagcggaagatggcggcggcggcggcggccgctgcagccgggacttcagttgggctgaggcggaggagccgccgcttctgacctcgctctggctccggtgcgcgcggctgagcgcgtgcgaggccccgcgcgtcgggcaggggcggcggcggccactgcgcgccgccctgaggagcgccccagcggcggcgcgactgcggctgaggagagagccggctccgggcctccgcgtcctcctgctcccccggccccccgcctcctcgggggggcggcggcggcgatgttctcggtcctctcgtacgggcggctggtggcccgcgccgtgctcggcggcctctcgcagaccgaccccagggccggcggcggcggcggcggcgactacggactggtgacggccggctgcggcttcgggaaggacttccgtaagggcctcctcaagaagggcgcgtgctacggggacgacgcgtgcttcgtggcccggcaccgttccgcggacgtgctcggggttgcagatggtgtaggaggctggagagactatggagttgatccatctcaattctcagggactttaatgcggacgtgtgaacgtttagtaaaagaaggacggttcgtacctagtaatcccattggaattctcaccacaagctactgtgagttgctgcaaaataaagtccctttgctcggtagcagcaccgcctgcattgtggtgctggacagaaccagccaccgcttacacacagcaaacctgggcgattcaggcttcctggttgtcaggggtggtgaagtcgtgcaccgatcagatgagcagcagcattacttcaacactccattccagctctcaatcgctccccctgaagccgagggagtcgtcttgagcgacagtccggatgctgctgatagcacgtctttcgatgtccagctaggagacattatcctgacggcaacagatggactctttgacaacatgcctgattatatgattcttcaggagctaaaaaagttaaagaattcaaattatgagagtatacaacagactgccagaagcattgctgagcaagctcatgagctggcctatgacccaaattatatgtcaccttttgcacagtttgcatgtgacaatggattgaatgtgagaggtggaaagccagatgacatcaccgtccttctttcaatagtggctgagtatacagactagctgaggtgtcaagtcctgcctttcctttcatcatcccaaatttcccctgccatgtgtgctgatcctgctggcaggaccacatttctttgccactgatctcaatggccagtgatgtaagtcttttgcctgtcttcttgagactcgttgagatctttgttgagaaccactactatcattcactagctcatatctgccggcagcaattgaagagatccaatatttgaagattggccttcatttctcgatgttctttccatgatggggatggaggtgttcagtgccaccgtggctgttacttttcaaagtagttgaagtattgaaaatgagtaatgttggtaaagtgaattcaaaatcctagtatgctaaagggatggtacaagtctaacacaaattgtacgtaatgatacatctactagaaacatacattattcatcaaaagaaatgttacatgtgtactccacaggcatagtctttgttatgatgattggtgtggctttatgtctttgttataaactcctatttttcaggggcttatgattctgctctaaaacattgctctgggttatacagttttgatcccaaaagcttttttgttacaaatcgggagaaaaatccattttagttctatggatggaaatatttcatgcttttaaaaagatgtttgtgttcctgtggttaaagttttggcagtttattgattagtccaaatcacaggctaaggcctgatctccaggaggggtaggggagacactttaccagtatttttttatggaaataatactcaaggttgtaaaacccctcaaagcctagaaatttaattgttatggctgaaattcctcctagttgtctgatagaatgcccctgaatgggaactctaggtcccaaggcctgaagggttgagaacagacagctgtaactttgaattttgttggctttcagtggtcatgctacctacccatactcgtactctcagaccttttattagtagccttgctttctatagagcatgcaccaaatccagtgagtccatgtggagagagcactgtgtgcgcagcggcagcagcacagacgtccatgaggaaaactcccagtgatgatctgacatttacaattaccccacatggaaatttaggggtttctgaatcaagcttaatgtttacagtttccaaatagccattttgcagtgtatagtttccttacaaaactaccccgcattcagttttcacattatctgcaagctgaaacttatttttaagttttgtgtacaagttgactgctgtaaagatatatatttttgggtcagtttttttccttcattaacttggtggtagaaaaaaatatatacttagaaatccttaaattaaagccatgttttatatataagtcaggtaacattggtgtatagatgagaatgcaattaaacctgatgagaatctacttgagaatatagaaagtctttctctaaaggagatactgactccctggtttattgcattaaaatttatgtttgaggttacctcaacttgttttaaaagattttgttttgtgaatttgtactgtatatttgagtaactgtcaggcttttatttaaaattgtttaacatgtaccatgtacatgtcattactatatttcaatgcatcatgcttgtaacaggcatttcatttataataagaatgagttattcatttgtaagccgttcagtaatttatctactattcctaaattggcataatgttagataatctattttgaatcacctttaattacatgtcagaatgccttaactaccctaacttgacaaaacagaattctttggtagacgcggtgggggcggggtggggggtctggacggagtctctatttaaggagaaatcatcatgctatgataaaacacagaagcatgagtggcaagtggcggggtatttattttgcacaaactatttgcagtctctgtgtatttaaaaagtaaagaaagttgcatccagaagggttttgttagaatgaatacatttatattaggactgacaacttcagctcttttgtttaggttttcaattatttttggtaagagtatgtagccttatgatctggatatattttgcattcattttccaacgcctacatttaattcctggtaagagcagtgctcgtcaagtttctggtttttctctgctctcatttaacccgtcaaacacaatctttgtaaagctagattggtggtgttttatacaacttatttactcagcttacctttttgagaaacgattgttagaaattgacgatgtgtttgttccagtgatactgaaagtagtgggggcaagaattgagtttcacagtggaattggctttggatctggcctatagattagtgacataaaatattttctctattttcccctgttctttttgtgttatgcacttaattttatgactgccgggggggtcagctggagtgctgcttaacaagtatctctcctactctcagtggtcagaggctgtgttggacccatagtagaattttccaggtcacagacccaagcttccatgggttgttactgtgctgtaccacttggtgggtctgattctgaacctgatgtgtgtgttaattatattttaagcaacacacacacacacacacgcctcatgtaatggacttttataacaaaagaaaaaatttggatttctaatttacaaatggcaaattatttatccctctctggatgcaccaaagaccagtaaagtttatagcttttccatctatatttataaagcaatactgtattataaaaatcaatatttttatcacatgcttgaaatttttattttgttgttttaaaatgtgcactctaaacatatcagaaccttatttcttcctatgaacttaagctgcctgcgcacaaaaaaaaaaaaaatttaccaaatggagatgcagtagagtccataggctctaaaaactaaaagaaatgggatgcagggggaacaagttatttgtcctgagttactgtacttgcttgacatggttgttgggtactaaatcacaaaagaatccattccaggtatgcatgtctgggggttgggctgtgtctagattagaaactgggtttcaagctttgcatgatgggagagcgtcctctcctctatcagctgcgtgtgttctggataggacagtagcccggagatggaaaccaccttcagtaccattagcccaccataccaagtaacaagttaggcaggaatcgtgggaatttattgagtcagctttgagtgtttgagagaatgtaaacaagattggctcgaattgtaaacgtttgtactttggatgagttcatggttctttaggtcaccttaataccagctatctttggtagaagctacagcattcagtttctctggaaactgtatcacatttttgcattttaaaaattttacagtatcaaaaaaccaaaatctgcttatgaaacaaaacatgaagcaggacatatttggattctatttatttaaaattaaattctttgcaaaattgaacttctcaactaaaacgtgtccatgtcagaattttaactgttagcaggtagtttgtggcaaagatggctaaataatgaagcaaattagaatctgtgtgtatactaatgagctgctttttttctgttgagactatcattatttgtcttattacccaagaggcaattacctgaatttggatgtctgaattataacttatgcaggaatagttctgtaaatacatttaaataaactgtaaagatatttaataaatatagtatttatactaatctgtgtgcttcttttggtttgaatagtaactaaatgagacaccagcccttgacattgagtttgttggtcactatcaggtcctcatttccaagcctcctagtcattctagcactgattatatgctgctactttaactggctccagctgcttcactacatcagtttagcttcctcagaaattcatcaaaatggacggacaattaaatgtaaattatagaactttttcccagctgaggctttgcaccttccgtatagtatagagggaagctacaaaaaaaatctgctgtacagtcagtcgtgttgtttaacagagatgttctgacagatgcatccttagcaatttcatcattgtgtactgacacaagcctagatggtctagcctactacacatctgggctatatgaatagcctgttgctcctaggcgacaaacctgtataacatgttactgtactgaatactgtaggcagttgtaacacaacagtaagcatctgtatatctaaacatagaaatgtttcagcaaaactatggtatgaaagacaaaaaaatggtacacctgtatagggcagctccattatcttatgggaccaccactgtctgtgcagtccatcgttgaccaaaacgttgttatgcagcacatgactgtatttcagcttagcactctgtatccaaattctaaaatccaaagtgcccagctaatttttgtagagatgggatctcaccatgttgcccaggctagtcttgaactgctgggctcaactgatccgcccacctgggcctcccaaagtgctgggattacaggcatgagccactacaccccgccagtattaactataataatagtccaatgctgcatccaggctattactgatgatgatgcctttaagacctaaacccctctgcctacttcaatgaatgaaccagaaatgttatcctcagcaaagagacctacagagttacttttgtgtataaaagctccctgtgtaggcatctgcatttgttagaaataccagaaattcagtgttaatcatcagtgtaagcataagatacatatatcttcccctaccatgtgatgaaaggacttagttgaaattatgtgggcattgccagttaccacaaaaagcttggttaaggcccattttcattcactaaggaacatcttgggatgaacttgagtttttattaggttattgtgggtagctatgactcattactaagctacaagagccaaattaattctggtttcagttagaactctattcacagttctaaagcatgcaaatccactcagccacctttatgaatttctcacaaagtctaaagtacaactgcttgccagttaacacttccttacggtttgaaggtttcagaaagatgtaacaataatatgttacaaaagtctcgtttgtcaggttataattgactgtaaacaggtttgggggagggagaggcacacatcataagacattacataacaatgttttgtgccagattttttagtccatttgtgcaggtaaaaagctaactcttaaagggccaaagaacagagacatttgtcttccaccttattccactccaaactcaggctgtcttggcagtggaggatactgttctatgtcagataatacagaaatatttggcatcacttccattaaattctttcctgcagcacactgcaaaataaaaaatcacatctgaaaatcagaacaatttgaggttaggaaataaaattttacaatatgtaaaaacactccaggttgggcgcagtggctcaagtctgtaatcccagcactttgggaggccgaggtgggcagatcacttgaggccaggagttcaagaccaccctggccaacatggcgaaaccctgtctctacaaaataccagaaattagccaggcatggtggcacgcacctgcaatcccagctgcacggg

SEQ ID NO: 24985 - DNA, 2660 bp, Homo sapiens
  source 1..2660: mol_type = unassigned DNA
cgcagaggcaccgccccaagtttgttgtgaccggcgggggacgccggtggtggcggcagcggcggctgcgggggcaccgggccgcggcgccaccatggcggtgcgacaggcgctgggccgcggcctgcagctgggtcgagcgctgctgctgcgcttcacgggcaagcccggccgggcctacggcttggggcggccgggcccggcggcgggctgtgtccgcggggagcgtccaggctgggccgcaggaccgggcgcggagcctcgcagggtcgggctcgggctccctaaccgtctccgcttcttccgccagtcggtggccgggctggcggcgcggttgcagcggcagttcgtggtgcgggcctggggctgcgcgggcccttgcggccgggcagtctttctggccttcgggctagggctgggcctcatcgaggaaaaacaggcggagagccggcgggcggtctcggcctgtcaggagatccaggcaatttttacccagaaaagcaagccggggcctgacccgttggacacgagacgcttgcagggctttcggctggaggagtatctgatagggcagtccattggtaagggctgcagtgctgctgtgtatgaagccaccatgcctacattgccccagaacctggaggtgacaaagagcaccgggttgcttccagggagaggcccaggtaccagtgcaccaggagaagggcaggagcgagctccgggggcccctgccttccccttggccatcaagatgatgtggaacatctcggcaggttcctccagcgaagccatcttgaacacaatgagccaggagctggtcccagcgagccgagtggccttggctggggagtatggagcagtcacttacagaaaatccaagagaggtcccaagcaactagcccctcaccccaacatcatccgggttctccgcgccttcacctcttccgtgccgctgctgccaggggccctggtcgactaccctgatgtgctgccctcacgcctccaccctgaaggcctgggccatggccggacgctgttcctcgttatgaagaactatccctgtaccctgcgccagtacctttgtgtgaacacacccagcccccgcctcgccgccatgatgctgctgcagctgctggaaggcgtggaccatctggttcaacagggcatcgcgcacagagacctgaaatccgacaacatccttgtggagctggacccagacggctgcccctggctggtgatcgcagattttggctgctgcctggctgatgagagcatcggcctgcagttgcccttcagcagctggtacgtggatcggggcggaaacggctgtctgatggccccagaggtgtccacggcccgtcctggccccagggcagtgattgactacagcaaggctgatgcctgggcagtgggagccatcgcctatgaaatcttcgggcttgtcaatcccttctacggccagggcaaggcccaccttgaaagccgcagctaccaagaggctcagctacctgcactgcccgagtcagtgcctccagacgtgagacagttggtgagggcactgctccagcgagaggccagcaagagaccatctgcccgagtagccgcaaatgtgcttcatctaagcctctggggtgaacatattctagccctgaagaatctgaagttagacaagatggttggctggctcctccaacaatcggccgccactttgttggccaacaggctcacagagaagtgttgtgtggaaacaaaaatgaagatgctctttctggctaacctggagtgtgaaacgctctgccaggcagccctcctcctctgctcatggagggcagccctgtgatgtccctgcatggagctggtgaattactaaaagaacatggcatcctctgtgtcgtgatggtctgtgaatggtgagggtgggagtcaggagacaagacagcgcagagagggctggttagccggaaaaggcctcgggcttggcaaatggaagaacttgagtgagagttcagtctgcagtcctctgctcacagacatctgaaaagtgaatggccaagctggtctagtagatgaggctggactgaggaggggtaggcctgcatccacagagaggatccaggccaaggcactggctgtcagtggcagagtttggctgtgacctttgcccctaacacgaggaactcgtttgaagggggcagcgtagcatgtctgatttgccacctggatgaaggcagacatcaacatgggtcagcacgttcagttacgggagtgggaaattacatgaggcctgggcctctgcgttcccaagctgtgcgttctggaccagctactgaattattaatctcacttagcgaaagtgacggatgagcagtaagtaagtaagtgtggggatttaaacttgagggtttccctcctgactagcctctcttacaggaattgtgaaatattaaatgcaaatttacaactgcagatgacgtatgtgccttgaactgaatatttggctttaagaatgattcttatactctgaaggtgagaatattttgtgggcaggtatcaacattggggaagagatttcatgtctaactaactaactttatacatgatttttaggaagctattgcctaaatcagcgtcaacatgcagtaaaggttgtcttcaactga

SEQ ID NO: 24986 - DNA, 1223 bp, Homo sapiens
  source 1..1223: mol_type = unassigned DNA
agagtccacctggcggccaagggcgctggcgaccgctgaagctcctgggggtgttcggggtccgggctgcgcctgtgcccgcgggaaggctgggcgcttcccacacacagaccccgctccgggccagccccgcagggagactaccagggctggcggtagctgggcgtggtcgggtcgggggcggctgtgggcggccggcaggcagcgcgcggggcagccctcggcagacggccaatggcggcggtgctcggggcgctcggggcgacgcggcgcttgttggcggcgctgcgaggccagagcctagggctagcggccatgtcatcaggtactcacaggttgactgcagaggagaggaaccaagctatacttgaccttaaagcagcaggatggtcggaattaagtgagagagatgccatctacaaagaattctccttccacaattttaatcaggcatttggctttatgtcccgagttgccctacaagcagagaagatgaatcatcacccagaatggttcaatgtatacaacaaggtccagataactctcacctcacatgactgtggtgaactgaccaaaaaagatgtgaagctggccaagtttattgaaaaagcagctgcttctgtgtgatttcttccaaaatacatgtaaaatcttgtacacatcttagctgcaatgtatgttgaaggaaatttatgtgaacaaatagagttgttctttttctcttttttttaagacagagtgttgctctgtcgcccaggccagagtgcagtggtatgatctcggctcactgtaacctccgcctcccaggttcaggtgattctcctgcctcagcctcctgagtagctgggattacaagcacgtgtcaccacgcctggctaatttttgtatttttagtatagacagggttttaccacgttggtcaggctggtctcgaactcctgacctcgtgatccgcctgcctcagcctcccaaagtgctgggattacaggcatgagccaccatgcctggctgttgaattgttcttaaggcatcatatctagaagcaaagaaaaaagaaaaataacaatttaagttgtgtaaattgtttgcctttatatattacatttggtaaaatcagtgcttaaatacgcaatgatttaaactggaacctgaggtatttttcatgctatctaatcatatacctaagataaaccaacccagttacttatattaataatattcag

SEQ ID NO: 24987 - DNA, 5621 bp, Homo sapiens
  source 1..5621: mol_type = unassigned DNA
cagccctcggcagacggccaatggcggcggtgctcggggcgctcggggcgacgcggcgcttgttggcggcgctgcgaggccagagcctagggctagcggccatgtcatcaggtactcacaggttgactgcagaggagaggaaccaagctatacttgaccttaaagcagcaggatggtcggaattaagtgagagagatgccatctacaaagaattctccttccacaattttaatcaggcatttggctttatgtcccgagttgccctacaagcagagaagatgaatcatcacccagaatggttcaatgtatacaacaaggtccagataactctcacctcacatgactgtggtgaactgaccaaaaaagatgtgaagctggccaagtttattgaaaaagcagctgcttctgtgtgatttcttccaaaatacataagtctgagaggctaaacttgatggctgtgttaacatatgtcacgtgtagcacagtggagaaagcaggatatggctcataatgacagtggtgaagacctgcgaatgaagttgctagttatcacctacattagggtttgacataggtctatgttatgggtcgctgcatctgctggaactcacagactttactatagagaatcaaagatcccgtatccgaagtctatggaaatgctcatggtggtaaattccaacagaatgaaacaccaaacttgcttaaagtaactcacgtttcaatttgaaagagatattgtcaaaattggaggcccccaggttcctgtctgttccaaatctttgcatgatgacagtggtttctctgatgtggtaagctttggctttcttctgttttctttctaaaagatcactggagtagagaggagttaaacagacatgacctttgacctcttgcatgacctccacagatagcaaaccgggccgacacatggttgacgatgtccttttctacaatgaagttaatgaaagttctgaaaatagtgattactttctgacattgataggatttaggaaacctctggataaatagcttaagcatggctgtttatgtttttgctatagacaaaaagcagcagcatgtacattgtatttggacacaagcctgcctcggttaatatattgaactattggaccactagggttagtagggagcggtctgtacactttctgattcagcattcagaaacattctaggtggactctgtagctttcagttttgtaaagttatcagaaaaacatcgggagggtttggccatcatatgtgagctttgtgtttcaatgccagttactcaggattagtaaattaatgactgtccagaggacttcagggtcaccaagctgctgcacctgccattggctgactctccccggctatctgtggctgagatggtgctgcttaggtcacgcagagcatgagctgctgctgaaagggcacaggagatggcccttgggcttctcatcccaggatgcctgccctgcccaccaatccatgagaagatatgtatgatttcagtaggccctggatcagcttgtcacctctggtttcctgtttgctttccactcactcagctggagtttcatttccagactaaagtcttcatcattggcttcagaaacagcattcatctgtggctgtgctgatgtagtacaccaagaacaactgggctcttctctgtcactttcagtgggctaccttccctcacctctccaagcagcatgaaagaattctttacatttttaatctcttttttgtttttccctgaaagtatgctttggtgcttaaagagagaagtcacaaaagtatactactgagtttcctggagatgaaatcctgttgtccctagctatgtgaatgagcacagggatccctgatgccattattttgtatattcatacggcacacacttactgagggccttctgtgtgccctaggggattgagcacagtgacatatcagggcaggtagaaacagatggagagctgatgcgggctgtcttagagcagctgccccaggaggcccctgtggatggatgttgggcaggagccctgagacgttaggggcatataactaaaggacatagcaggagttataggaggagctgatccctgagggaaacaatgaagacggagaagatggggctaaagtttgaattgtggggacattaatcacagtgattcttaaaactttgctgttgatgattttaaatggagaaaatgagtacgtaagatgttatttcccagttcagtatattggttgcccacaaagtattttcctaccatgaatggtcatatatacttgttgtagaataccagggacagcagagatggtggggtagttacttccttttcttacagcccaagaactttggtgtccaggagattgaccaatttagccactgagcatttaatacaacacagggctacccagatcccactgtcctgatttgccctgaaagccaaaggagttaggagaaggtgagtggggagaatatattaatcctgagagttgaacagagcaaaaatccctattacttttgtacttaaaacatctctgccacatgtgctcactctttatattctgtttaggtggtttatatgtgcacatcccatcctatgcctgcagttagccaactcagggtttatattgcctcctttctttttttctttttttttttttttttaagagatggggtctcattctatcatgcagactggagtgcagtggtgtgatcacagctcattgtaacctccaacgcctggactaaagtgatcctcctaccttggcctctctggtagctgggactacaggtgcatgccaccacacccacctaattttttttatttttattttttgtagagacagtctcactatcttgctcaggctagtcctgaactcctgggctcaagttatcttgctgcctcagcctcccatgggtaatttttatttcctttttttttttttttggagatggagtttcgctcttgtcgcccaggctggagtgcaatggcacgatcttggctcactgcagtctccacctcctgggttcaagtgattctccatcctcagcctcctgagtagctgagattacaggcaactgccaccatgcgcggctaatttatgtatttttttttagtaagagatggggtttcaccatgttggccagactagtcttaaactcctgacctcaagcgacctgcctgccttggcctcccaaagtgctgggattacaggcatgagccgctatgcctcgtcgctgatttttatttcttattttttttttagagatgggggtctcactatgttgctcaggctgatctcaaactcctggcctcaagtgatcctcccaccttagcctcccaagttgctgggattataagtgtgagccactatccctacctcactattaccttctttgcttctcttgttttcttttgttctaagtcaaacccatcacaatcttttcttgtccttccaggtgttttccagtgctgtgccctggatgtgctctctttctcttagagcccagagaacttgcttttcccccttatatatgacccttaactttttctaacacattattaagggcctgtgtctatcagctgggggcacttcttgaagggagggcctttgtgtggtctgtttctagtgacttccagctttaacccagagcctcatgattgctgggtgcccatagcctttttgctgaatggaggcactcagtctccttgggaagagagaatccatgatagacccacttgggagctccccacttcaggggcctacacactggtaatgcaacagaatgcccaagagtgacctcataaagcaaggattcccttcgtggccccttctctgctgcctctcagaatccagacgctaaggaaaatccctaagcagagattttctgttggatgctaaaagcaaggaataaaagttgaaaatttggaaaatgtctcaacaccgtcaccagcgccactcgagagtcatttctagttcaccagttgacactacatcggtgggattttgcccaacattcaagaaatttaagtaaatattatctatctccattgcctgttaagaaatgtgctagtagaagtgtgagggcagggtgtcagtgttctctcagcctcttccctcagatactcgtctgcttaccaaaataagttgcatgtccttgacaatctggtttctatgattggtgaggctggcatgctattacctttatgtgccctgtagacttgaatgaccagtttgaccagtttgactgttagataatctgaaggcttttctctttttttataatagaccccatctcaaatcagataatgaaaattacatatcttgatatattagaaaagtatatacattctggctgggcacggtggctcacacctgtaatccctgcactttgagaggctggggcggatcacttgaggtcaggagtttgagaccagcctggccaacgtggcgaaaccccatctctactaaaaatacacagattagcccggagtgatggtgtgcacctgttgtcccagctactcaggatgctgaggcaggagaatccctttaacctggggggcgaaggttgcagtgagccaagattgcaccactgcactccagcctgggtgacagaacgagactctgtctcagaaaaaaaaaaaaagaaaaggaaaaagaaaaatatatattctatatttttttaacttatgagaatgtgttcatttcatttgtaacatataatgggaaacagtaatacgtactctgagaaaaattgcaaagcacagataaatggaaataaacaggaaaaagaatcacctataacctcaccatccatagacagacactgttaaaattttggcatatttcctgctgattttttctactgctgatttttgcacaggtgagataattttgaacagagaattttgtatctttggtttttgtgttttgctgcacacaaaaacaaaagatataaaaatggatcataaacatttttctaaatcctgaaaaatgcatagacatattttagtgcctgtatttcacaagatggacataccataatttacttacacagtcctttttgttagatgtttaagttgttttcaagcttctcagtgctggaaaaaatactgagatagacatgtttagttgaagttatttcatttcaggttatattatcttgggtcagagaatgaatggttctcaggcttttcaaaagagctggtcagtttttatgcctctggcagtttttgagagtgctcaatcatactacactgttgccagcattagatcttatcacatttaagtcattgctaattttataaacaaaaacaatggttttactttgcatctccctgattggtattgctgtagaacatatttggagaagtttgtttgtctttggtgtttatttcatgaatagattgtgtgcccattttctcttggggtattcagttttttattactgatgtgagcatgtgtatgggtgattatttgatgattatcagttttgcttagtagactggcaatatttagtcttgctgtcactgtgttcccagtgcctactagattgcttgatatgtagttgccactcaataaagatttgttgagtcaatgaa

SEQ ID NO: 24988 - DNA, 4272 bp, Homo sapiens
  source 1..4272: mol_type = unassigned DNA
ggcggggcttggcggcggcggcggcggcgcgcggggactcggaggtactgggcgcgcgcggctccggctcgggacgcctcgggacgcctcggggtcgggctccggctgcggctgctgctgcggcgcccgcgctccggtgcgctccgcctcctgtgcccgccgcggagcgcagtctgcgcgcccgccgtgcgccctcagctccttttcctgagcccgccgcgatgggagctgcgcggggatccccggccagaccccgccggttgcctctgctcagcgtcctgctgctgccgctgctgggcggtacccagacagccattgtcttcatcaagcagccgtcctcccaggatgcactgcaggggcgccgggcgctgcttcgctgtgaggttgaggctccgggcccggtacatgtgtactggctgctcgatggggcccctgtccaggacacggagcggcgtttcgcccagggcagcagcctgagctttgcagctgtggaccggctgcaggactctggcaccttccagtgtgtggctcgggatgatgtcactggagaagaagcccgcagtgccaacgcctccttcaacatcaaatggattgaggcaggtcctgtggtcctgaagcatccagcctcggaagctgagatccagccacagacccaggtcacacttcgttgccacattgatgggcaccctcggcccacctaccaatggttccgagatgggacccccctttctgatggtcagagcaaccacacagtcagcagcaaggagcggaacctgacgctccggccagctggtcctgagcatagtgggctgtattcctgctgcgcccacagtgcttttggccaggcttgcagcagccagaacttcaccttgagcattgctgatgaaagctttgccagggtggtgctggcaccccaggacgtggtagtagcgaggtatgaggaggccatgttccattgccagttctcagcccagccacccccgagcctgcagtggctctttgaggatgagactcccatcactaaccgcagtcgccccccacacctccgcagagccacagtgtttgccaacgggtctctgctgctgacccaggtccggccacgcaatgcagggatctaccgctgcattggccaggggcagaggggcccacccatcatcctggaagccacacttcacctagcagagattgaagacatgccgctatttgagccacgggtgtttacagctggcagcgaggagcgtgtgacctgccttccccccaagggtctgccagagcccagcgtgtggtgggagcacgcgggagtccggctgcccacccatggcagggtctaccagaagggccacgagctggtgttggccaatattgctgaaagtgatgctggtgtctacacctgccacgcggccaacctggctggtcagcggagacaggatgtcaacatcactgtggccactgtgccctcctggctgaagaagccccaagacagccagctggaggagggcaaacccggctacttggattgcctgacccaggccacaccaaaacctacagttgtctggtacagaaaccagatgctcatctcagaggactcacggttcgaggtcttcaagaatgggaccttgcgcatcaacagcgtggaggtgtatgatgggacatggtaccgttgtatgagcagcaccccagccggcagcatcgaggcgcaagcccgtgtccaagtgctggaaaagctcaagttcacaccaccaccccagccacagcagtgcatggagtttgacaaggaggccacggtgccctgttcagccacaggccgagagaagcccactattaagtgggaacgggcagatgggagcagcctcccagagtgggtgacagacaacgctgggaccctgcattttgcccgggtgactcgagatgacgctggcaactacacttgcattgcctccaacgggccgcagggccagattcgtgcccatgtccagctcactgtggcagtttttatcaccttcaaagtggaaccagagcgtacgactgtgtaccagggccacacagccctactgcagtgcgaggcccagggggaccccaagccgctgattcagtggaaaggcaaggaccgcatcctggaccccaccaagctgggacccaggatgcacatcttccagaatggctccctggtgatccatgacgtggcccctgaggactcaggccgctacacctgcattgcaggcaacagctgcaacatcaagcacacggaggcccccctctatgtcgtggacaagcctgtgccggaggagtcggagggccctggcagccctcccccctacaagatgatccagaccattgggttgtcggtgggtgccgctgtggcctacatcattgccgtgctgggcctcatgttctactgcaagaagcgctgcaaagccaagcggctgcagaagcagcccgagggcgaggagccagagatggaatgcctcaacggtgggcctttgcagaacgggcagccctcagcagagatccaagaagaagtggccttgaccagcttgggctccggccccgcggccaccaacaaacgccacagcacaagtgataagatgcacttcccacggtctagcctgcagcccatcaccacgctggggaagagtgagtttggggaggtgttcctggcaaaggctcagggcttggaggagggagtggcagagaccctggtacttgtgaagagcctgcagagcaaggatgagcagcagcagctggacttccggagggagttggagatgtttgggaagctgaaccacgccaacgtggtgcggctcctggggctgtgccgggaggctgagccccactacatggtgctggaatatgtggatctgggagacctcaagcagttcctgaggatttccaagagcaaggatgaaaaattgaagtcacagcccctcagcaccaagcagaaggtggccctatgcacccaggtagccctgggcatggagcacctgtccaacaaccgctttgtgcataaggacttggctgcgcgtaactgcctggtcagtgcccagagacaagtgaaggtgtctgccctgggcctcagcaaggatgtgtacaacagtgagtactaccacttccgccaggcctgggtgccgctgcgctggatgtcccccgaggccatcctggagggtgacttctctaccaagtctgatgtctgggccttcggtgtgctgatgtgggaagtgtttacacatggagagatgccccatggtgggcaggcagatgatgaagtactggcagatttgcaggctgggaaggctagacttcctcagcccgagggctgcccttccaaactctatcggctgatgcagcgctgctgggccctcagccccaaggaccggccctccttcagtgagattgccagcgccctgggagacagcaccgtggacagcaagccgtgaggagggagcccgctcaggatggcctgggcaggggaggacatctctagagggaagctcacagcatgatgggcaagatccctgtcctcctgggccctgaggcccctgccctagtgcaacaggcattgctgaggtctgagcagggcctggcctttcctcctcttcctcaccctcatcctttgggaggctgacttggacccaaactgggcgactagggctttgagctgggcagttttccctgccacctcttcctctatcagggacagtgtgggtgccacaggtaaccccaatttctggccttcaacttctccccttgaccgggtccaactctgccactcatctgccaactttgcctggggagggctaggcttgggatgagctgggtttgtggggagttccttaatattctcaagttctgggcacacagggttaatgagtctcttggcccactggtcccacttgggggtctagaccaggattatagaggacacagcaagtgagtcctccccactctgggcttgtgcacactgacccagacccacgtcttccccacccttctctcctttcctcatcctaagtgcctggcagatgaaggagttttcaggagcttttgacactatataaaccgccctttttgtatgcaccacgggcggcttttatatgtaattgcagcgtggggtgggtgggcatgggaggtaggggtgggccctggagatgaggagggtgggccatccttaccccacacttttattgttgtcgttttttgtttgttttgtttttttgtttttgtttttgtttttacactcgctgctctcaataaataagccttttttacaacctg

SEQ ID NO: 24989 - DNA, 3199 bp, Homo sapiens
  source 1..3199: mol_type = unassigned DNA
gcggcgcgcggggactcggaggtactgggcgcgcgcggctccggctcgggacgcctcgggacgcctcggggtcgggctccggctgcggctgctgctgcggcgcccgcgctccggtgcgctccgcctcctgtgcccgccgcggagcgcagtctgcgcgcccgccgtgcgccctcagctccttttcctgagcccgccgcgatgggagctgcgcggggatccccggccagaccccgccggttgcctctgctcagcgtcctgctgctgccgctgctgggcggtacccagacagccattgtcttcatcaagcagccgtcctcccaggatgcactgcaggggcgccgggcgctgcttcgctgtgaggttgaggctccgggcccggtacatgtgtactggctgctcgatggggcccctgtccaggacacggagcggcgtttcgcccagggcagcagcctgagctttgcagctgtggaccggctgcaggactctggcaccttccagtgtgtggctcgggatgatgtcactggagaagaagcccgcagtgccaacgcctccttcaacatcaaatggattgaggcaggtcctgtggtcctgaagcatccagcctcggaagctgagatccagccacagacccaggtcacacttcgttgccacattgatgggcaccctcggcccacctaccaatggttccgagatgggacccccctttctgatggtcagagcaaccacacagtcagcagcaaggagcggaacctgacgctccggccagctggtcctgagcatagtgggctgtattcctgctgcgcccacagtgcttttggccaggcttgcagcagccagaacttcaccttgagcattgctgatgaaagctttgccagggtggtgctggcaccccaggacgtggtagtagcgaggtatgaggaggccatgttccattgccagttctcagcccagccacccccgagcctgcagtggctctttgaggatgagactcccatcactaaccgcagtcgccccccacacctccgcagagccacagtgtttgccaacgggtctctgctgctgacccaggtccggccacgcaatgcagggatctaccgctgcattggccaggggcagaggggcccacccatcatcctggaagccacacttcacctagcagagattgaagacatgccgctatttgagccacgggtgtttacagctggcagcgaggagcgtgtgacctgccttccccccaagggtctgccagagcccagcgtgtggtgggagcacgcgggagtccggctgcccacccatggcagggtctaccagaagggccacgagctggtgttggccaatattgctgaaagtgatgctggtgtctacacctgccacgcggccaacctggctggtcagcggagacaggatgtcaacatcactgtggccactgtgccctcctggctgaagaagccccaagacagccagctggaggagggcaaacccggctacttggattgcctgacccaggccacaccaaaacctacagttgtctggtacagaaaccagatgctcatctcagaggactcacggttcgaggtgttcctggcaaaggctcagggcttggaggagggagtggcagagaccctggtacttgtgaagagcctgcagagcaaggatgagcagcagcagctggacttccggagggagttggagatgtttgggaagctgaaccacgccaacgtggtgcggctcctggggctgtgccgggaggctgagccccactacatggtgctggaatatgtggatctgggagacctcaagcagttcctgaggatttccaagagcaaggatgaaaaattgaagtcacagcccctcagcaccaagcagaaggtggccctatgcacccaggtagccctgggcatggagcacctgtccaacaaccgctttgtgcataaggacttggctgcgcgtaactgcctggtcagtgcccagagacaagtgaaggtgtctgccctgggcctcagcaaggatgtgtacaacagtgagtactaccacttccgccaggcctgggtgccgctgcgctggatgtcccccgaggccatcctggagggtgacttctctaccaagtctgatgtctgggccttcggtgtgctgatgtgggaagtgtttacacatggagagatgccccatggtgggcaggcagatgatgaagtactggcagatttgcaggctgggaaggctagacttcctcagcccgagggctgcccttccaaactctatcggctgatgcagcgctgctgggccctcagccccaaggaccggccctccttcagtgagattgccagcgccctgggagacagcaccgtggacagcaagccgtgaggagggagcccgctcaggatggcctgggcaggggaggacatctctagagggaagctcacagcatgatgggcaagatccctgtcctcctgggccctgaggcccctgccctagtgcaacaggcattgctgaggtctgagcagggcctggcctttcctcctcttcctcaccctcatcctttgggaggctgacttggacccaaactgggcgactagggctttgagctgggcagttttccctgccacctcttcctctatcagggacagtgtgggtgccacaggtaaccccaatttctggccttcaacttctccccttgaccgggtccaactctgccactcatctgccaactttgcctggggagggctaggcttgggatgagctgggtttgtggggagttccttaatattctcaagttctgggcacacagggttaatgagtctcttggcccactggtcccacttgggggtctagaccaggattatagaggacacagcaagtgagtcctccccactctgggcttgtgcacactgacccagacccacgtcttccccacccttctctcctttcctcatcctaagtgcctggcagatgaaggagttttcaggagcttttgacactatataaaccgccctttttgtatgcaccacgggcggcttttatatgtaattgcagcgtggggtgggtgggcatgggaggtaggggtgggccctggagatgaggagggtgggccatccttaccccacacttttattgttgtcgttttttgtttgttttgtttttttgtttttgtttttgtttttacactcgctgctctcaataaataagccttttttacaacctg

SEQ ID NO: 24990 - DNA, 4071 bp, Homo sapiens
  source 1..4071: mol_type = unassigned DNA
cgcctcgggacgcctcggggtcgggctccggctgcggctgctgctgcggcgcccgcgctccggtgcgctccgcctcctgtgcccgccgcggagcgcagtctgcgcgcccgccgtgcgccctcagctccttttcctgagcccgccgcgatgggagctgcgcggggatccccggccagaccccgccggttgcctctgctcagcgtcctgctgctgccgctgctgggcggtacccagacagccattgtcttcatcaagcagccgtcctcccaggatgcactgcaggggcgccgggcgctgcttcgctgtgaggttgaggctccgggcccggtacatgtgtactggctgctcgatggggcccctgtccaggacacggagcggcgtttcgcccagggcagcagcctgagctttgcagctgtggaccggctgcaggactctggcaccttccagtgtgtggctcgggatgatgtcactggagaagaagcccgcagtgccaacgcctccttcaacatcaaatggattgaggcaggtcctgtggtcctgaagcatccagcctcggaagctgagatccagccacagacccaggtcacacttcgttgccacattgatgggcaccctcggcccacctaccaatggttccgagatgggacccccctttctgatggtcagagcaaccacacagtcagcagcaaggagcggaacctgacgctccggccagctggtcctgagcatagtgggctgtattcctgctgcgcccacagtgcttttggccaggcttgcagcagccagaacttcaccttgagcattgctgatgaaagctttgccagggtggtgctggcaccccaggacgtggtagtagcgaggtatgaggaggccatgttccattgccagttctcagcccagccacccccgagcctgcagtggctctttgaggatgagactcccatcactaaccgcagtcgccccccacacctccgcagagccacagtgtttgccaacgggtctctgctgctgacccaggtccggccacgcaatgcagggatctaccgctgcattggccaggggcagaggggcccacccatcatcctggaagccacacttcacctagcagagattgaagacatgccgctatttgagccacgggtgtttacagctggcagcgaggagcgtgtgacctgccttccccccaagggtctgccagagcccagcgtgtggtgggagcacgcgggagtccggctgcccacccatggcagggtctaccagaagggccacgagctggtgttggccaatattgctgaaagtgatgctggtgtctacacctgccacgcggccaacctggctggtcagcggagacaggatgtcaacatcactgtggccactgtgccctcctggctgaagaagccccaagacagccagctggaggagggcaaacccggctacttggattgcctgacccaggccacaccaaaacctacagttgtctggtacagaaaccagatgctcatctcagaggactcacggttcgaggtcttcaagaatgggaccttgcgcatcaacagcgtggaggtgtatgatgggacatggtaccgttgtatgagcagcaccccagccggcagcatcgaggcgcaagcccgtgtccaagtgctggatgggagcagcctcccagagtgggtgacagacaacgctgggaccctgcattttgcccgggtgactcgagatgacgctggcaactacacttgcattgcctccaacgggccgcagggccagattcgtgcccatgtccagctcactgtggcagtttttatcaccttcaaagtggaaccagagcgtacgactgtgtaccagggccacacagccctactgcagtgcgaggcccagggggaccccaagccgctgattcagtggaaaggcaaggaccgcatcctggaccccaccaagctgggacccaggatgcacatcttccagaatggctccctggtgatccatgacgtggcccctgaggactcaggccgctacacctgcattgcaggcaacagctgcaacatcaagcacacggaggcccccctctatgtcgtggacaagcctgtgccggaggagtcggagggccctggcagccctcccccctacaagatgatccagaccattgggttgtcggtgggtgccgctgtggcctacatcattgccgtgctgggcctcatgttctactgcaagaagcgctgcaaagccaagcggctgcagaagcagcccgagggcgaggagccagagatggaatgcctcaacggtgggcctttgcagaacgggcagccctcagcagagatccaagaagaagtggccttgaccagcttgggctccggccccgcggccaccaacaaacgccacagcacaagtgataagatgcacttcccacggtctagcctgcagcccatcaccacgctggggaagagtgagtttggggaggtgttcctggcaaaggctcagggcttggaggagggagtggcagagaccctggtacttgtgaagagcctgcagagcaaggatgagcagcagcagctggacttccggagggagttggagatgtttgggaagctgaaccacgccaacgtggtgcggctcctggggctgtgccgggaggctgagccccactacatggtgctggaatatgtggatctgggagacctcaagcagttcctgaggatttccaagagcaaggatgaaaaattgaagtcacagcccctcagcaccaagcagaaggtggccctatgcacccaggtagccctgggcatggagcacctgtccaacaaccgctttgtgcataaggacttggctgcgcgtaactgcctggtcagtgcccagagacaagtgaaggtgtctgccctgggcctcagcaaggatgtgtacaacagtgagtactaccacttccgccaggcctgggtgccgctgcgctggatgtcccccgaggccatcctggagggtgacttctctaccaagtctgatgtctgggccttcggtgtgctgatgtgggaagtgtttacacatggagagatgccccatggtgggcaggcagatgatgaagtactggcagatttgcaggctgggaaggctagacttcctcagcccgagggctgcccttccaaactctatcggctgatgcagcgctgctgggccctcagccccaaggaccggccctccttcagtgagattgccagcgccctgggagacagcaccgtggacagcaagccgtgaggagggagcccgctcaggatggcctgggcaggggaggacatctctagagggaagctcacagcatgatgggcaagatccctgtcctcctgggccctgaggcccctgccctagtgcaacaggcattgctgaggtctgagcagggcctggcctttcctcctcttcctcaccctcatcctttgggaggctgacttggacccaaactgggcgactagggctttgagctgggcagttttccctgccacctcttcctctatcagggacagtgtgggtgccacaggtaaccccaatttctggccttcaacttctccccttgaccgggtccaactctgccactcatctgccaactttgcctggggagggctaggcttgggatgagctgggtttgtggggagttccttaatattctcaagttctgggcacacagggttaatgagtctcttggcccactggtcccacttgggggtctagaccaggattatagaggacacagcaagtgagtcctccccactctgggcttgtgcacactgacccagacccacgtcttccccacccttctctcctttcctcatcctaagtgcctggcagatgaaggagttttcaggagcttttgacactatataaaccgccctttttgtatgcaccacgggcggcttttatatgtaattgcagcgtggggtgggtgggcatgggaggtaggggtgggccctggagatgaggagggtgggccatccttaccccacacttttattgttgtcgttttttgtttgttttgtttttttgtttttgtttttgtttttacactcgctgctctcaataaataagcctttttta

SEQ ID NO: 24991 - DNA, 3801 bp, Homo sapiens
  source 1..3801: mol_type = unassigned DNA
cgcctcgggacgcctcggggtcgggctccggctgcggctgctgctgcggcgcccgcgctccggtgcgctccgcctcctgtgcccgccgcggagcgcagtctgcgcgcccgccgtgcgccctcagctccttttcctgagcccgccgcgatgggagctgcgcggggatccccggccagaccccgccggttgcctctgctcagcgtcctgctgctgccgctgctgggcggtacccagacagccattgtcttcatcaagcagccgtcctcccaggatgcactgcaggggcgccgggcgctgcttcgctgtgaggttgaggctccgggcccggtacatgtgtactggctgctcgatggggcccctgtccaggacacggagcggcgtttcgcccagggcagcagcctgagctttgcagctgtggaccggctgcaggactctggcaccttccagtgtgtggctcgggatgatgtcactggagaagaagcccgcagtgccaacgcctccttcaacatcaaatggattgaggcaggtcctgtggtcctgaagcatccagcctcggaagctgagatccagccacagacccaggtcacacttcgttgccacattgatgggcaccctcggcccacctaccaatggttccgagatgggacccccctttctgatggtcagagcaaccacacagtcagcagcaaggagcggaacctgacgctccggccagctggtcctgagcatagtgggctgtattcctgctgcgcccacagtgcttttggccaggcttgcagcagccagaacttcaccttgagcattgctgatgaaagctttgccagggtggtgctggcaccccaggacgtggtagtagcgaggtatgaggaggccatgttccattgccagttctcagcccagccacccccgagcctgcagtggctctttgaggatgagactcccatcactaaccgcagtcgccccccacacctccgcagagccacagtgtttgccaacgggtctctgctgctgacccaggtccggccacgcaatgcagggatctaccgctgcattggccaggggcagaggggcccacccatcatcctggaagccacacttcacctagcagagattgaagacatgccgctatttgagccacgggtgtttacagctggcagcgaggagcgtgtgacctgccttccccccaagggtctgccagagcccagcgtgtggtgggagcacgcgggagtccggctgcccacccatggcagggtctaccagaagggccacgagctggtgttggccaatattgctgaaagtgatgctggtgtctacacctgccacgcggccaacctggctggtcagcggagacaggatgtcaacatcactgtggccaatgggagcagcctcccagagtgggtgacagacaacgctgggaccctgcattttgcccgggtgactcgagatgacgctggcaactacacttgcattgcctccaacgggccgcagggccagattcgtgcccatgtccagctcactgtggcagtttttatcaccttcaaagtggaaccagagcgtacgactgtgtaccagggccacacagccctactgcagtgcgaggcccagggggaccccaagccgctgattcagtggaaaggcaaggaccgcatcctggaccccaccaagctgggacccaggatgcacatcttccagaatggctccctggtgatccatgacgtggcccctgaggactcaggccgctacacctgcattgcaggcaacagctgcaacatcaagcacacggaggcccccctctatgtcgtggacaagcctgtgccggaggagtcggagggccctggcagccctcccccctacaagatgatccagaccattgggttgtcggtgggtgccgctgtggcctacatcattgccgtgctgggcctcatgttctactgcaagaagcgctgcaaagccaagcggctgcagaagcagcccgagggcgaggagccagagatggaatgcctcaacggtgggcctttgcagaacgggcagccctcagcagagatccaagaagaagtggccttgaccagcttgggctccggccccgcggccaccaacaaacgccacagcacaagtgataagatgcacttcccacggtctagcctgcagcccatcaccacgctggggaagagtgagtttggggaggtgttcctggcaaaggctcagggcttggaggagggagtggcagagaccctggtacttgtgaagagcctgcagagcaaggatgagcagcagcagctggacttccggagggagttggagatgtttgggaagctgaaccacgccaacgtggtgcggctcctggggctgtgccgggaggctgagccccactacatggtgctggaatatgtggatctgggagacctcaagcagttcctgaggatttccaagagcaaggatgaaaaattgaagtcacagcccctcagcaccaagcagaaggtggccctatgcacccaggtagccctgggcatggagcacctgtccaacaaccgctttgtgcataaggacttggctgcgcgtaactgcctggtcagtgcccagagacaagtgaaggtgtctgccctgggcctcagcaaggatgtgtacaacagtgagtactaccacttccgccaggcctgggtgccgctgcgctggatgtcccccgaggccatcctggagggtgacttctctaccaagtctgatgtctgggccttcggtgtgctgatgtgggaagtgtttacacatggagagatgccccatggtgggcaggcagatgatgaagtactggcagatttgcaggctgggaaggctagacttcctcagcccgagggctgcccttccaaactctatcggctgatgcagcgctgctgggccctcagccccaaggaccggccctccttcagtgagattgccagcgccctgggagacagcaccgtggacagcaagccgtgaggagggagcccgctcaggatggcctgggcaggggaggacatctctagagggaagctcacagcatgatgggcaagatccctgtcctcctgggccctgaggcccctgccctagtgcaacaggcattgctgaggtctgagcagggcctggcctttcctcctcttcctcaccctcatcctttgggaggctgacttggacccaaactgggcgactagggctttgagctgggcagttttccctgccacctcttcctctatcagggacagtgtgggtgccacaggtaaccccaatttctggccttcaacttctccccttgaccgggtccaactctgccactcatctgccaactttgcctggggagggctaggcttgggatgagctgggtttgtggggagttccttaatattctcaagttctgggcacacagggttaatgagtctcttggcccactggtcccacttgggggtctagaccaggattatagaggacacagcaagtgagtcctccccactctgggcttgtgcacactgacccagacccacgtcttccccacccttctctcctttcctcatcctaagtgcctggcagatgaaggagttttcaggagcttttgacactatataaaccgccctttttgtatgcaccacgggcggcttttatatgtaattgcagcgtggggtgggtgggcatgggaggtaggggtgggccctggagatgaggagggtgggccatccttaccccacacttttattgttgtcgttttttgtttgttttgtttttttgtttttgtttttgtttttacactcgctgctctcaataaataagcctttttta

SEQ ID NO: 24992 - DNA, 4023 bp, Homo sapiens
  source 1..4023: mol_type = unassigned DNA
cgcctcgggacgcctcggggtcgggctccggctgcggctgctgctgcggcgcccgcgctccggtgcgctccgcctcctgtgcccgccgcggagcgcagtctgcgcgcccgccgtgcgccctcagctccttttcctgagcccgccgcgatgggagctgcgcggggatccccggccagaccccgccggttgcctctgctcagcgtcctgctgctgccgctgctgggcggtacccagacagccattgtcttcatcaagcagccgtcctcccaggatgcactgcaggggcgccgggcgctgcttcgctgtgaggttgaggctccgggcccggtacatgtgtactggctgctcgatggggcccctgtccaggacacggagcggcgtttcgcccagggcagcagcctgagctttgcagctgtggaccggctgcaggactctggcaccttccagtgtgtggctcgggatgatgtcactggagaagaagcccgcagtgccaacgcctccttcaacatcaaatggattgaggcaggtcctgtggtcctgaagcatccagcctcggaagctgagatccagccacagacccaggtcacacttcgttgccacattgatgggcaccctcggcccacctaccaatggttccgagatgggacccccctttctgatggtcagagcaaccacacagtcagcagcaaggagcggaacctgacgctccggccagctggtcctgagcatagtgggctgtattcctgctgcgcccacagtgcttttggccaggcttgcagcagccagaacttcaccttgagcattgctgatgaaagctttgccagggtggtgctggcaccccaggacgtggtagtagcgaggtatgaggaggccatgttccattgccagttctcagcccagccacccccgagcctgcagtggctctttgaggatgagactcccatcactaaccgcagtcgccccccacacctccgcagagccacagtgtttgccaacgggtctctgctgctgacccaggtccggccacgcaatgcagggatctaccgctgcattggccaggggcagaggggcccacccatcatcctggaagccacacttcacctagcagagattgaagacatgccgctatttgagccacgggtgtttacagctggcagcgaggagcgtgtgacctgccttccccccaagggtctgccagagcccagcgtgtggtgggagcacgcgggagtccggctgcccacccatggcagggtctaccagaagggccacgagctggtgttggccaatattgctgaaagtgatgctggtgtctacacctgccacgcggccaacctggctggtcagcggagacaggatgtcaacatcactgtggccactgtgccctcctggctgaagaagccccaagacagccagctggaggagggcaaacccggctacttggattgcctgacccaggccacaccaaaacctacagttgtctggtacagaaaccagatgctcatctcagaggactcacggttcgaggtcttcaagaatgggaccttgcgcatcaacagcgtggaggtgtatgatgggacatggtaccgttgtatgagcagcaccccagccggcagcatcgaggcgcaagcccgtgtccaagtgctggaaaagctcaagttcacaccaccaccccagccacagcagtgcatggagtttgacaaggaggccacggtgccctgttcagccacaggccgagagaagcccactattaagtgggaacgggcagatgggagcagcctcccagagtgggtgacagacaacgctgggaccctgcattttgcccgggtgactcgagatgacgctggcaactacacttgcattgcctccaacgggccgcagggccagattcgtgcccatgtccagctcactgtggcagtttttatcaccttcaaagtggaaccagagcgtacgactgtgtaccagggccacacagccctactgcagtgcgaggcccagggggaccccaagccgctgattcagtggaaagacaagcctgtgccggaggagtcggagggccctggcagccctcccccctacaagatgatccagaccattgggttgtcggtgggtgccgctgtggcctacatcattgccgtgctgggcctcatgttctactgcaagaagcgctgcaaagccaagcggctgcagaagcagcccgagggcgaggagccagagatggaatgcctcaacggtgggcctttgcagaacgggcagccctcagcagagatccaagaagaagtggccttgaccagcttgggctccggccccgcggccaccaacaaacgccacagcacaagtgataagatgcacttcccacggtctagcctgcagcccatcaccacgctggggaagagtgagtttggggaggtgttcctggcaaaggctcagggcttggaggagggagtggcagagaccctggtacttgtgaagagcctgcagagcaaggatgagcagcagcagctggacttccggagggagttggagatgtttgggaagctgaaccacgccaacgtggtgcggctcctggggctgtgccgggaggctgagccccactacatggtgctggaatatgtggatctgggagacctcaagcagttcctgaggatttccaagagcaaggatgaaaaattgaagtcacagcccctcagcaccaagcagaaggtggccctatgcacccaggtagccctgggcatggagcacctgtccaacaaccgctttgtgcataaggacttggctgcgcgtaactgcctggtcagtgcccagagacaagtgaaggtgtctgccctgggcctcagcaaggatgtgtacaacagtgagtactaccacttccgccaggcctgggtgccgctgcgctggatgtcccccgaggccatcctggagggtgacttctctaccaagtctgatgtctgggccttcggtgtgctgatgtgggaagtgtttacacatggagagatgccccatggtgggcaggcagatgatgaagtactggcagatttgcaggctgggaaggctagacttcctcagcccgagggctgcccttccaaactctatcggctgatgcagcgctgctgggccctcagccccaaggaccggccctccttcagtgagattgccagcgccctgggagacagcaccgtggacagcaagccgtgaggagggagcccgctcaggatggcctgggcaggggaggacatctctagagggaagctcacagcatgatgggcaagatccctgtcctcctgggccctgaggcccctgccctagtgcaacaggcattgctgaggtctgagcagggcctggcctttcctcctcttcctcaccctcatcctttgggaggctgacttggacccaaactgggcgactagggctttgagctgggcagttttccctgccacctcttcctctatcagggacagtgtgggtgccacaggtaaccccaatttctggccttcaacttctccccttgaccgggtccaactctgccactcatctgccaactttgcctggggagggctaggcttgggatgagctgggtttgtggggagttccttaatattctcaagttctgggcacacagggttaatgagtctcttggcccactggtcccacttgggggtctagaccaggattatagaggacacagcaagtgagtcctccccactctgggcttgtgcacactgacccagacccacgtcttccccacccttctctcctttcctcatcctaagtgcctggcagatgaaggagttttcaggagcttttgacactatataaaccgccctttttgtatgcaccacgggcggcttttatatgtaattgcagcgtggggtgggtgggcatgggaggtaggggtgggccctggagatgaggagggtgggccatccttaccccacacttttattgttgtcgttttttgtttgttttgtttttttgtttttgtttttgtttttacactcgctgctctcaataaataagcctttttta

SEQ ID NO: 24993 - DNA, 1736 bp, Homo sapiens
  source 1..1736: mol_type = unassigned DNA
gctcgagaactgccgagagttgctggctctcgggcccagatggggagtttcttgtcgggggagaaaagaccatccgcacccaccgtggggagcgcgatggagaaaaaggaattccccaccccacccggcagggtcggcccaggtacccagacagccattgtcttcatcaagcagccgtcctcccaggatgcactgcaggggcgccgggcgctgcttcgctgtgaggttgaggctccgggcccggtacatgtgtactggctgctcgatggggcccctgtccaggacacggagcggcgtttcgcccagggcagcagcctgagctttgcagctgtggaccggctgcaggactctggcaccttccagtgtgtggctcgggatgatgtcactggagaagaagcccgcagtgccaacgcctccttcaacatcaaatggattgaggcaggtcctgtggtcctgaagcatccagcctcggaagctgagatccagccacagacccaggtcacacttcgttgccacattgatgggcaccctcggcccacctaccaatggttccgagatgggacccccctttctgatggtcagagcaaccacacagtcagcagcaaggagcggaacctgacgctccggccagctggtcctgagcatagtgggctgtattcctgctgcgcccacagtgcttttggccaggcttgcagcagccagaacttcaccttgagcattgctgatgaaagctttgccagggtggtgctggcaccccaggacgtggtagtagcgaggtatgaggaggccatgttccattgccagttctcagcccagccacccccgagcctgcagtggctctttgaggatgagactcccatcactaaccgcagtcgccccccacacctccgcagagccacagtgtttgccaacgggtctctgctgctgacccaggtccggccacgcaatgcagggatctaccgctgcattggccaggggcagaggggcccacccatcatcctggaagccacacttcacctagcagagattgaagacatgccgctatttgagccacgggtgtttacagctggcagcgaggagcgtgtgacctgccttccccccatggcagggtctaccagaagggccacgagctggtgttggccaatattgctgaaagtgatgctggtgtctacacctgccacgcggccaacctggctggtcagcggagacaggatgtcaacatcactgtggccactgtgccctcctggctgaagaagccccaagacagccagctggaggagggcaaacccggctacttggattgcctgacccaggccacaccaaaacctacagttgtctggtacagaaaccagatgctcatctcagaggactcacggttcgaggtcttcaagaatgggaccttgcgcatcaacagcgtggaggtgtatgatgggacatggtaccgttgtatgagcagcaccccagccggcagcatcgaggcgcaagcccgtgtccaagtgctggaaaagctcaagttcacaccaccaccccagccacagcagtgcatggagtttgacaaggaggccacggtgccctgttcagccacaggccgagagaagcccactattaagtgggaacgggcagatgggagcagcctcccagagtgggtgacagacaacgctgggaccctgcattttgcccgggtgactcgagatgacgctggcaactacacttgcattgcctccaacgggccgcag

SEQ ID NO: 24994 - DNA, 807 bp, Homo sapiens
  source 1..807: mol_type = unassigned DNA
ttctcagcccagccacccccgagcctgcagtggctctttgaggatgagactcccatcactaaccgcagtcgccccccacacctccgcagagccacagtgtttgccaacgggtctctgctgctgacccaggtccggccacgcaatgcagggatctaccgctgcattggccaggggcagaggggcccacccatcatcctggaagccacacttcacctagcagagattgaagacatgccgctatttgagccacgggtgtttacagctggcagcgaggagcgtgtgacctgccttccccccaagggtctgccagagcccagcgtgtggtgggagcacgcgggagtccggctgcccacccatggcagggtctaccagaagggccacgagctggtgttggccaatattgctgaaagtgatgctggtgtctacacctgccacgcggccaacctggctggtcagcggagacaggatgtcaacatcactgtggccagtgagcacctttgccctgaaggtcaaggagaggtggaggggaacacaggtctgggtgtgatggacagaggcttccctgctgtgccctcctggctgaagaagccccaagacagccagctggaggagggcaaacccggctacttggattgcctgacccaggccacaccaaaacctacagttgtctggtacagaaaccagatgctcatctcagaggactcacggttcgaggtcttcaagaatgggaccttgcgcatcaacagcgtggaggtgtatgatgggacatggtaccgttgtatgagcagcaccccagccggcagcatc

SEQ ID NO: 24995 - DNA, 1238 bp, Homo sapiens
  source 1..1238: mol_type = unassigned DNA
aagaagaggagcacaccacaccagaaacagacatcttgcagtgtttcactgtctcaaccttatctgcacagtccgaggtcagtctgagagagcttctgagagacccaggatgaagggatgcagtgaggtcaagagcccaaccttctttcactgacacccacctctaaggactcagagagacatgaataaaatgggcctcaacaatcccaagagaccactcaaggacaatgggagccactgggcttggctttctactttcctggagacaagacaatttgaatggcactgactgccagggatgcaatattttatacttctctgagactacggggagcatgtgttctgaactttccttgaacagaggtcttgaggccagaaggaagaaggatcttaaagactcatttctctggagatatgggaaggttggctgtatctcacttccacttcgtgagatgaccgcctggattaacccaccccaaatttcagagattttccaaggctaccaccagagggtgcacggagctgatgcactgagcctgcaaaccaactctctgagaagcaggttatcttcacagtgcctcggacagagcttccttctcaggacactcgagagaggccgtggtttcagggcacttggggacatctgtggccacgttcatgaagaagactaagcctacttcatctcaggacccgcccaagagtggccgcggctttgggacacctggggtcgggtccaccatgaggataaaacctccttctcttctggacatgtccaggagtggccgttgctacaagtcacctggtgctacgaccagggtgagaataaagacgtctcctcaggaccctcccaggagagtacatggcattgagacatctggcggccaagtgaggaaaagacaccctgtctgcagcacccagaactgaggaggggcactgccctgggccttacttcccagccctggcctccaattctgaccttacaaaagtgtcccttgagtgaggcagtgaccacgcattgtcacagctaccaaagtgtggtttgcagatgatctgggcttgtttctggcagagattctggtacagagaaaggagaggcgctgagtggaaccacgatgggctgaggccaggggagacatcacaacctccaacaacactttttttcatgctttaataactcatttttcttagagaactaaagtagttgaaacaatatagaaacattttttaagtaggcatat

SEQ ID NO: 24996 - DNA, 443 bp, Homo sapiens
  source 1..443: mol_type = unassigned DNA
aagaagaggagcacaccacaccagaaacagacatcttgcagtgtttcactgtctcaaccttatctgcacagtccgaggtcagtctgagagagcttctgagagacccaggatgaagggatgcagtgaggtcaagagcccaaccttctttcactgacacccacctctaaggactcagagagacatgaataaaatgggcctcaacaatcccaagagaccactcaaggacaatgggagccactgggcttggctttctactttcctggagacaagacaatttgaatggcactgactgccagggatgcaatattttatacttctctgagactacggggagcatgtgttctgaactttccttgaacagaggtcttgaggccagaaggaagaaggatcttaaagactcatttctctggagagacggggtttcaccgtgtttaccatgctga

SEQ ID NO: 24997 - DNA, 1238 bp, Homo sapiens
  source 1..1238: mol_type = unassigned DNA
aagaagaggagcacaccacaccagaaacagacatcttgcagtgtttcactgtctcaaccttatctgcacagtccgaggtcagtctgagagagcttctgagagacccaggatgaagggatgcagtgaggtcaagagcccaaccttctttcactgacacccacctctaaggactcagagagacatgaataaaatgggcctcaacaatcccaagagaccactcaaggacaatgggagccactgggcttggctttctactttcctggagacaagacaatttgaatggcactgactgccagggatgcaatattttatacttctctgagactacggggagcatgtgttctgaactttccttgaacagaggtcttgaggccagaaggaagaaggatcttaaagactcatttctctggagatatgggaaggttggctgtatctcacttccacttcgtgagatgaccgcctggattaacccaccccaaatttcagagattttccaaggctaccaccagagggtgcacggagctgatgcactgagcctgcaaaccaactctctgagaagcaggttatcttcacagtgcctcggacagagcttccttctcaggacactcgagagaggccgtggtttcagggcacttggggacatctgtggccacgttcatgaagaagactaagcctacttcatctcaggacccgcccaagagtggccgcggctttgggacacctggggtcgggtccaccatgaggataaaacctccttctcttctggacatgtccaggagtggccgttgctacaagtcacctggtgctacgaccagggtgagaataaagacgtctcctcaggaccctcccaggagagtacatggcattgagacatctggcggccaagtgaggaaaagacaccctgtctgcagcacccagaactgaggaggggcactgccctgggccttacttcccagccctggcctccaattctgaccttacaaaagtgtcccttgagtgaggcagtgaccacgcattgtcacagctaccaaagtgtggtttgcagatgatctgggcttgtttctggcagagattctggtacagagaaaggagaggcgctgagtggaaccacgatgggctgaggccaggggagacatcgcaacctccaacaacactttttttcatgctttaataactcatttttcttagagaactaaagtagttgaaacaatatagaaacattttttaagtaggcatat

SEQ ID NO: 24998 - DNA, 443 bp, Homo sapiens; identical to SEQ ID NO: 24996
  source 1..443: mol_type = unassigned DNA

SEQ ID NO: 24999 - DNA, 5360 bp, Homo sapiens
  source 1..5360: mol_type = unassigned DNA
ggagtgaaaggtaagggggagcgagagcgccagagagagaagatcggggggctgaaatccatcttcatcctaccgctccgcccgtgttggtggaatgagcgttgcatgtgtcttgaagagaaaagcagtgctttggcaggactctttcagcccccacctgaaacatcaccctcaagaaccagctaatcccaacatgcctgttgttttgacatctggaacagggtcgcaagcgcagccacaaccagctgcaaatcaggctcttgcagctgggactcactccagccctgtcccaggatctataggagttgcaggccgttcccaggacgacgctatggtggactacttctttcagaggcagcatggtgagcagcttgggggaggaggaagtggaggaggcggctataataatagcaaacatcgatggcctactggggataacattcatgcagaacatcaggtgcgttccatggatgaactgaatcatgattttcaagcacttgctctggagggaagagcgatgggagagcagctcttgccaggtaaaaagttttgggaaacagatgaatccagcaaagatggaccaaaaggaatattcctgggtgatcaatggcgagacagtgcctggggaacatcagatcattcagtttcccagccaatcatggtgcagagaagacctggtcagagtttccatgtgaacagtgaggtcaattctgtactgtccccacgatcggagagtgggggactaggcgttagcatggtggagtatgtgttgagctcatccccgggcgattcctgtctaagaaaaggaggatttggcccaagggatgcagacagtgatgaaaacgacaaaggtgaaaagaagaacaagggtacgtttgatggagataagctaggagatttgaaggaggagggtgatgtgatggacaagaccaatggtttaccagtgcagaatgggattgatgcagacgtcaaagattttagccgtacccctggtaattgccagaactctgctaatgaagtggatcttctgggtccaaaccagaatggttctgagggcttagcccagctgaccagcaccaatggtgccaagcctgtggaggatttctccaacatggagtcccagagtgtccccttggaccccatggaacatgtgggcatggagcctcttcagtttgattattcaggcacgcaggtacctgtggactcagcagcagcaactgtgggactttttgactacaattctcaacaacagctgttccaaagacctaatgcgcttgctgtccagcagttgacagctgctcagcagcagcagtatgcactggcagctgctcatcagccgcacatcggtttagctcccgctgcgtttgtccccaatccatacatcatcagcgctgctcccccagggacggacccctacacagctggattggctgcagcagcgacactaggcccagctgtggtccctcaccagtattatggagttactccctggggagtctaccctgccagtcttttccagcagcaagctgccgctgccgctgcagcaactaattcagctaatcaacagaccaccccacaggctcagcaaggacagcagcaggttctccgtggaggagccagccaacgtcctttgaccccaaaccagaaccagcagggacagcaaacggatccccttgtggcagctgcagcagtgaattctgcccttgcatttggacaaggtctggcagcaggcatgccaggttatccggtgttggctcctgctgcttactatgaccaaactggtgcccttgtagtgaatgcaggcgcgagaaatggtcttggagctcctgttcgacttgtagctcctgccccagtcatcattagttcctcagctgcacaagcagctgttgcagcagccgcagcttcagcaaatggagcagctggtggtcttgctggaacaacaaatggaccatttcgccctttaggaacacagcagcctcagccccagccccagcagcagcccaataacaacctggcatccagttctttctacggcaacaactctctgaacagcaattcacagagcagctccctcttctcccagggctctgcccagcctgccaacacatccttgggattcggaagtagcagttctctcggcgccaccctgggatccgcccttggagggtttggaacagcagttgcaaactccaacactggcagtggctcccgccgtgactccctgactggcagcagtgacctttataagaggacatcgagcagcttgacccccattggacacagtttttataacggccttagcttttcctcctctcctggacccgtgggcatgcctctccctagtcagggaccaggacattcacagacaccacctccttccctctcttcacatggatcctcttcaagcttaaacctgggaggactcacgaatggcagtggaagatacatctctgctgctccaggcgctgaagccaagtaccgcagtgcaagcagcgcctccagcctcttcagcccgagcagcactcttttctcttcctctcgtttgcgatatggaatgtctgatgtcatgccttctggcaggagcaggcttttggaagattttcgaaacaaccggtaccccaatttacaactgcgggagattgctggacatataatggaattttcccaagaccagcatgggtccagattcattcagctgaaactggagcgtgccacaccagctgagcgccagcttgtcttcaatgaaatcctccaggctgcctaccaactcatggtggatgtgtttggtaattacgtcattcagaagttctttgaatttggcagtcttgaacagaagctggctttggcagaacggattcgaggccacgtcctgtcattggcactacagatgtatggctgccgtgttatccagaaagctcttgagtttattccttcagaccagcagaatgagatggttcgggaactagatggccatgtcttgaagtgtgtgaaagatcagaatggcaatcacgtggttcagaaatgcattgaatgtgtacagccccagtctttgcaatttatcatcgatgcgtttaagggacaggtatttgccttatccacacatccttatggctgccgagtgattcagagaatcctggagcactgtctccctgaccagacactccctattttagaggagcttcaccagcacacagagcagcttgtacaggatcaatatggaaattatgtaatccaacatgtactggagcacggtcgtcctgaggataaaagcaaaattgtagcagaaatccgaggcaatgtacttgtattgagtcagcacaaatttgcaagcaatgttgtggagaagtgtgttactcacgcctcacgtacggagcgcgctgtgctcatcgatgaggtgtgcaccatgaacgacggtccccacagtgccttatacaccatgatgaaggaccagtatgccaactacgtggtccagaagatgattgacgtggcggagccaggccagcggaagatcgtcatgcataagatccggccccacatcgcaactcttcgtaagtacacctatggcaagcacattctggccaagctggagaagtactacatgaagaacggtgttgacttagggcccatctgtggcccccctaatggtatcatctgaggcagtgtcacccgctgttccctcattcccgctgacctcactggcccactggcaaatccaaccagcaaccagaaatgttctagtgtagagtctgagacgggcaagtggttgctccaggattactccctcctccaaaaaaggaatcaaatccacgagtggaaaagcctttgtaaatttaattttattacacataacatgtactattttttttaattgactaattgccctgctgttttactggtgtataggatacttgtacataggtaaccaatgtacatgggaggccacatattttgttcactgttgtatctatatttcacatgtggaaactttcagggtggttggtttaacaaaaaaaaaaagctttaaaaaaaaaagaaaaaaaggaaaaggtttttagctcatttgcctggccggcaagttttgcaaatagctcttccccacctcctcattttagtaaaaaacaaacaaaaacaaaaaaacctgagaagtttgaattgtagttaaatgaccccaaactggcatttaacactgtttataaaaaatatatatatatatatatatatatataatgaaaaaggtttcagagttgctaaagcttcagtttgtgacattaagtttatgaaattctaaaaaatgccttttttggagactatattatgctgaagaaggctgttcgtgaggaggagatgcgagcacccagaacgtcttttgaggctgggcgggtgtgattgtttactgcctactggatttttttctattaacattgaaaggtaaaatctgattatttagcatgagaaaaaaaaatccaactctgcttttggtcttgcttctataaatatatagtgtatacttggtgtagactttgcatatatacaaatttgtagtattttcttgttttgatgtctaatctgtatctataatgtaccctagtagtcgaacatacttttgattgtacaattgtacatttgtatacctgtaatgtaaatgtggagaagtttgaatcaacataaacacgttttttggtaagaaaagagaattagccagccctgtgcattcagtgtatattctcaccttttatggtcgtagcatatagtgttgtatattgtaaattgtaatttcaaccagaagtaaatttttttcttttgaaggaataaatgttctttatacagcctagttaatgtttaaaaagaaaaaaatagcttggttttatttgtcatctagtctcaagtatagcgagattctttctaaatgttattcaagattgagttctcactagtgtttttttaatcctaaaaaagtaatgttttgattttgtgacagtcaaaaggacgtgcaaaagtctagccttgcccgagctttccttacaatcagagcccctctcaccttgtaaagtgtgaatcgcccttcccttttgtacagaagatgaactgtattttgcattttgtctacttgtaagtgaatgtaacatactgtcaattttccttgtttgaatatagaattgtaacactacacggtgtacatttccagagccttgtgtatatttccaatgaacttttttgcaagcacacttgtaaccatatgtgtataattaacaaacctgtgtatgcttatgcctgggcaactattttttgtaactcttgtgtagattgtctctaaacaatgtgtgatctttattttgaaaaatacagaactttggaatctg

SEQ ID NO: 25000 - DNA, 4486 bp, Homo sapiens
  source 1..4486: mol_type = unassigned DNA
atgagcgttgcatgtgtcttgaagagaaaagcagtgctttggcaggactctttcagcccccacctgaaacatcaccctcaagaaccagctaatcccaacatgcctgttgttttgacatctggaacagggtcgcaagcgcagccacaaccagctgcaaatcaggctcttgcagctgggactcactccagccctgtcccaggatctataggagttgcaggccgttcccaggacgacgctatggtggactacttctttcagaggcagcatggtgagcagcttgggggaggaggaagtggaggaggcggctataataatagcaaacatcgatggcctacaactgtgggactttttgactacaattctcaacaacagctgttccaaagacctaatgcgcttgctgtccagcagttgacagctgctcagcagcagcagtatgcactggcagctgctcatcagccgcacatcggtttagctcccgctgcgtttgtccccaatccatacatcatcagcgctgctcccccagggacggacccctacacagctggattggctgcagcagcgacactaggcccagctgtggtccctcaccagtattatggagttactccctggggagtctaccctgccagtcttttccagcagcaagctgccgctgccgctgcagcaactaattcagctaatcaacagaccaccccacaggctcagcaaggacagcagcaggttctccgtggaggagccagccaacgtcctttgaccccaaaccagaaccagcagggacagcaaacggatccccttgtggcagctgcagcagtgaattctgcccttgcatttggacaaggtctggcagcaggcatgccaggttatccggtgttggctcctgctgcttactatgaccaaactggtgcccttgtagtgaatgcaggcgcgagaaatggtcttggagctcctgttcgacttgtagctcctgccccagtcatcattagttcctcagctgcacaagcagctgttgcagcagccgcagcttcagcaaatggagcagctggtggtcttgctggaacaacaaatggaccatttcgccctttaggaacacagcagcctcagccccagccccagcagcagcccaataacaacctggcatccagttctttctacggcaacaactctctgaacagcaattcacagagcagctccctcttctcccagggctctgcccagcctgccaacacatccttgggattcggaagtagcagttctctcggcgccaccctgggatccgcccttggagggtttggaacagcagttgcaaactccaacactggcagtggctcccgccgtgactccctgactggcagcagtgacctttataagaggacatcgagcagcttgacccccattggacacagtttttataacggccttagcttttcctcctctcctggacccgtgggcatgcctctccctagtcagggaccaggacattcacagacaccacctccttccctctcttcacatggatcctcttcaagcttaaacctgggaggactcacgaatggcagtggaagatacatctctgctgctccaggcgctgaagccaagtaccgcagtgcaagcagcgcctccagcctcttcagcccgagcagcactcttttctcttcctctcgtttgcgatatggaatgtctgatgtcatgccttctggcaggagcaggcttttggaagattttcgaaacaaccggtaccccaatttacaactgcgggagattgctggacatataatggaattttcccaagaccagcatgggtccagattcattcagctgaaactggagcgtgccacaccagctgagcgccagcttgtcttcaatgaaatcctccaggctgcctaccaactcatggtggatgtgtttggtaattacgtcattcagaagttctttgaatttggcagtcttgaacagaagctggctttggcagaacggattcgaggccacgtcctgtcattggcactacagatgtatggctgccgtgttatccagaaagctcttgagtttattccttcagaccagcaggtaattaatgagatggttcgggaactagatggccatgtcttgaagtgtgtgaaagatcagaatggcaatcacgtggttcagaaatgcattgaatgtgtacagccccagtctttgcaatttatcatcgatgcgtttaagggacaggtatttgccttatccacacatccttatggctgccgagtgattcagagaatcctggagcactgtctccctgaccagacactccctattttagaggagcttcaccagcacacagagcagcttgtacaggatcaatatggaaattatgtaatccaacatgtactggagcacggtcgtcctgaggataaaagcaaaattgtagcagaaatccgaggcaatgtacttgtattgagtcagcacaaatttgcaagcaatgttgtggagaagtgtgttactcacgcctcacgtacggagcgcgctgtgctcatcgatgaggtgtgcaccatgaacgacggtccccacagtgccttatacaccatgatgaaggaccagtatgccaactacgtggtccagaagatgattgacgtggcggagccaggccagcggaagatcgtcatgcataagatccggccccacatcgcaactcttcgtaagtacacctatggcaagcacattctggccaagctggagaagtactacatgaagaacggtgttgacttagggcccatctgtggcccccctaatggtatcatctgaggcagtgtcacccgctgttccctcattcccgctgacctcactggcccactggcaaatccaaccagcaaccagaaatgttctagtgtagagtctgagacgggcaagtggttgctccaggattactccctcctccaaaaaaggaatcaaatccacgagtggaaaagcctttgtaaatttaattttattacacataacatgtactattttttttaattgactaattgccctgctgttttactggtgtataggatacttgtacataggtaaccaatgtacatgggaggccacatattttgttcactgttgtatctatatttcacatgtggaaactttcagggtggttggtttaacaaaaaaaaaaagctttaaaaaaaaaagaaaaaaaggaaaaggtttttagctcatttgcctggccggcaagttttgcaaatagctcttccccacctcctcattttagtaaaaaacaaacaaaaacaaaaaaacctgagaagtttgaattgtagttaaatgaccccaaactggcatttaacactgtttataaaaaatatatatatatatatatatatatataatgaaaaaggtttcagagttgctaaagcttcagtttgtgacattaagtttatgaaattctaaaaaatgccttttttggagactatattatgctgaagaaggctgttcgtgaggaggagatgcgagcacccagaacgtcttttgaggctgggcgggtgtgattgtttactgcctactggatttttttctattaacattgaaaggtaaaatctgattatttagcatgagaaaaaaaaatccaactctgcttttggtcttgcttctataaatatatagtgtatacttggtgtagactttgcatatatacaaatttgtagtattttcttgttttgatgtctaatctgtatctataatgtaccctagtagtcgaacatacttttgattgtacaattgtacatttgtatacctgtaatgtaaatgtggagaagtttgaatcaacataaacacgttttttggtaagaaaagagaattagccagccctgtgcattcagtgtatattctcaccttttatggtcgtagcatatagtgttgtatattgtaaattgtaatttcaaccagaagtaaatttttttcttttgaaggaataaatgttctttatacagcctagttaatgtttaaaaagaaaaaaatagcttggttttatttgtcatctagtctcaagtatagcgagattctttctaaatgttattcaagattgagttctcactagtgtttttttaatcctaaaaaagtaatgttttgattttgtgacagtcaaaaggacgtgcaaaagtctagccttgcccgagctttccttacaatcagagcccctctcaccttgtaaagtgtgaatcgcccttcccttttgtacagaagatgaactgtattttgcattttgtctacttgtaagtgaatgtaacatactgtcaattttccttgtttgaatatagaattgtaacactacacggtgtacatttccagagccttgtgtatatttccaatgaacttttttgcaagcacacttgtaaccatatgtgtataattaacaaacctgtgtatgcttatgcctgggcaactattttttgtaactcttgtgtagattgtctctaaacaatgtgtgatctttattttgaaaaatacagaactttggaatctg

SEQ ID NO: 25001 - DNA, 3572 bp, Homo sapiens
  source 1..3572: mol_type = unassigned DNA
gaaaggtaagggggagcgagagcgccagagagagaagatcggggggctgaaatccatcttcatcctaccgctccgcccgtgttggtggaatgagcgttgcatgtgtcttgaagagaaaagcagtgctttggcaggactctttcagcccccacctgaaacatcaccctcaagaaccagctaatcccaacatgcctgttgttttgacatctggaacagggtcgcaagcgcagccacaaccagctgcaaatcaggctcttgcagctgggactcactccagccctgtcccaggatctataggagttgcaggccgttcccaggacgacgctatggtggactacttctttcagaggcagcatggtgagcagcttgggggaggaggaagtggaggaggcggctataataatagcaaacatcgatggcctactggggataacattcatgcagaacatcaggtgcgttccatggatgaactgaatcatgattttcaagcacttgctctggagggaagagcgatgggagagggcccaagggatgcagacagtgatgaaaacgacaaaggtgaaaagaagaacaagggtacgtttgatggagataagctaggagatttgaaggaggagggtgatgtgatggacaagaccaatggtttaccagtgcagaatgggattgatgcagacgtcaaagattttagccgtacccctggtaattgccagaactctgctaatgaagtggatcttctgggtccaaaccagaatggttctgagggcttagcccagctgaccagcaccaatggtgccaagcctgtggaggatttctccaacatggagtcccagagtgtccccttggaccccatggaacatgtgggcatggagcctcttcagtttgattattcaggcacgcaggtacctgtggactcagcagcagcaactgtgggactttttgactacaattctcaacaacagctgttccaaagacctaatgcgcttgctgtccagcagttgacagctgctcagcagcagcagtatgcactggcagctgctcatcagccgcacatcggtttagctcccgctgcgtttgtccccaatccatacatcatcagcgctgctcccccagggacggacccctacacagctggattggctgcagcagcgacactaggcccagctgtggtccctcaccagtattatggagttactccctggggagtctaccctgccagtcttttccagcagcaagctgccgctgccgctgcagcaactaattcagctaatcaacagaccaccccacaggctcagcaaggacagcagcaggttctccgtggaggagccagccaacgtcctttgaccccaaaccagaaccagcagggacagcaaacggatccccttgtggcagctgcagcagtgaattctgcccttgcatttggacaaggtctggcagcaggcatgccagctgttgcagcagccgcagcttcagcaaatggagcagctggtggtcttgctggaacaacaaatggaccatttcgccctttaggaacacagcagcctcagccccagccccagcagcagcccaataacaacctggcatccagttctttctacggcaacaactctctgaacagcaattcacagagcagctccctcttctcccagggctctgcccagcctgccaacacatccttgggattcggaagtagcagttctctcggcgccaccctgggatccgcccttggagggtttggaacagcagttgcaaactccaacactggcagtggctcccgccgtgactccctgactggcagcagtgacctttataagaggacatcgagcagcttgacccccattggacacagtttttataacggccttagcttttcctcctctcctggacccgtgggcatgcctctccctagtcagggaccaggacattcacagacaccacctccttccctctcttcacatggatcctcttcaagcttaaacctgggaggactcacgaatggcagtggaagatacatctctgctgctccaggcgctgaagccaagtaccgcagtgcaagcagcgcctccagcctcttcagcccgagcagcactcttttctcttcctctcgtttgcgatatggaatgtctgatgtcatgccttctggcaggagcaggcttttggaagattttcgaaacaaccggtaccccaatttacaactgcgggagattgctggacatataatggaattttcccaagaccagcatgggtccagattcattcagctgaaactggagcgtgccacaccagctgagcgccagcttgtcttcaatgaaatcctccaggctgcctaccaactcatggtggatgtgtttggtaattacgtcattcagaagttctttgaatttggcagtcttgaacagaagctggctttggcagaacggattcgaggccacgtcctgtcattggcactacagatgtatggctgccgtgttatccagaaagctcttgagtttattccttcagaccagcaggtaattaatgagatggttcgggaactagatggccatgtcttgaagtgtgtgaaagatcagaatggcaatcacgtggttcagaaatgcattgaatgtgtacagccccagtctttgcaatttatcatcgatgcgtttaagggacaggtatttgccttatccacacatccttatggctgccgagtgattcagagaatcctggagcactgtctccctgaccagacactccctattttagaggagcttcaccagcacacagagcagcttgtacaggatcaatatggaaattatgtaatccaacatgtactggagcacggtcgtcctgaggataaaagcaaaattgtagcagaaatccgaggcaatgtacttgtattgagtcagcacaaatttgcaagcaatgttgtggagaagtgtgttactcacgcctcacgtacggagcgcgctgtgctcatcgatgaggtgtgcaccatgaacgacggtccccacagtgccttatacaccatgatgaaggaccagtatgccaactacgtggtccagaagatgattgacgtggcggagccaggccagcggaagatcgtcatgcataagatccggccccacatcgcaactcttcgtaagtacacctatggcaagcacattctggccaagctggagaagtactacatgaagaacggtgttgacttagggcccatctgtggcccccctaatggtatcatctgaggcagtgtcacccgctgttccctcattcccgctgacctcactggcccactggcaaatccaaccagcaaccagaaatgttctagtgtagagtctgagacgggcaagtggttgctccaggattactccctcctccaaaaaaggaatcaaatccacgagtggaaaagcctttgtaaatttaattttattacacataacatgtactattttttttaattgactaattgccctgctgttttactggtgtataggatacttgtacataggtaaccaatgtacatgggaggccacatattttgttcactgttgtatctatatttcacatgtggaaactttcagggtggttggttt

SEQ ID NO: 25002 - DNA, 4043 bp, Homo sapiens
  source 1..4043: mol_type = unassigned DNA
gtgaaaggtaagggggagcgagagcgccagagagagaagatcggggggctgaaatccatcttcatcctaccgctccgcccgtgttggtggaatgagcgttgcatgtgtcttgaagagaaaagcagtgctttggcaggactctttcagcccccacctgaaacatcaccctcaagaaccagctaatcccaacatgcctgttgttttgacatctggaacagggtcgcaagcgcagccacaaccagctgcaaatcaggctcttgcagctgggactcactccagccctgtcccaggatctataggagttgcaggccgttcccaggacgacgctatggtggactacttctttcagaggcagcatggtgagcagcttgggggaggaggaagtggaggaggcggctataataatagcaaacatcgatggcctactggggataacattcatgcagaacatcaggtgcgttccatggatgaactgaatcatgattttcaagcacttgctctggagggaagagcgatgggagagcagctcttgccaggtaaaaagttttgggaaacagatgaatccagcaaagatggaccaaaaggaatattcctgggtgatcaatggcgagacagtgcctggggaacatcagatcattcagtttcccagccaatcatggtgcagagaagacctggtcagagtttccatgtgaacagtgaggtcaattctgtactgtccccacgatcggagagtgggggactaggcgttagcatggtggagtatgtgttgagctcatccccgggcgattcctgtctaagaaaaggaggatttggcccaagggatgcagacagtgatgaaaacgacaaaggtgaaaagaagaacaagggtacgtttgatggagataagctaggagatttgaaggaggagggtgatgtgatggacaagaccaatggtttaccagtgcagaatgggattgatgcagacgtcaaagattttagccgtacccctggtaattgccagaactctgctaatgaagtggatcttctgggtccaaaccagaatggttctgagggcttagcccagctgaccagcaccaatggtgccaagcctgtggaggatttctccaacatggagtcccagagtgtccccttggaccccatggaacatgtgggcatggagcctcttcagtttgattattcaggcacgcaggtacctgtggactcagcagcagcaactgtgggactttttgactacaattctcaacaacagctgttccaaagacctaatgcgcttgctgtccagcagttgacagctgctcagcagcagcagtatgcactggcagctgctcatcagccgcacatcggtttagctcccgctgcgtttgtccccaatccatacatcatcagcgctgctcccccagggacggacccctacacagctggattggctgcagcagcgacactaggcccagctgtggtccctcaccagtattatggagttactccctggggagtctaccctgccagtcttttccagcagcaagctgccgctgccgctgcagcaactaattcagctaatcaacagaccaccccacaggctcagcaaggacagcagcaggttctccgtggaggagccagccaacgtcctttgaccccaaaccagaaccagcagggacagcaaacggatccccttgtggcagctgcagcagtgaattctgcccttgcatttggacaaggtctggcagcaggcatgccaggttatccggtgttggctcctgctgcttactatgaccaaactggtgcccttgtagtgaatgcaggcgcgagaaatggtcttggagctcctgttcgacttgtagctcctgccccagtcatcattagttcctcagctgcacaagcagctgttgcagcagccgcagcttcagcaaatggagcagctggtggtcttgctggaacaacaaatggaccatttcgccctttaggaacacagcagcctcagccccagccccagcagcagcccaataacaacctggcatccagttctttctacggcaacaactctctgaacagcaattcacagagcagctccctcttctcccagggctctgcccagcctgccaacacatccttgggattcggaagtagcagttctctcggcgccaccctgggatccgcccttggagggtttggaacagcagttgcaaactccaacactggcagtggctcccgccgtgactccctgactggcagcagtgacctttataagaggacatcgagcagcttgacccccattggacacagtttttataacggccttagcttttcctcctctcctggacccgtgggcatgcctctccctagtcagggaccaggacattcacagacaccacctccttccctctcttcacatggatcctcttcaagcttaaacctgggaggactcacgaatggcagtggaagatacatctctgctgctccaggcgctgaagccaagtaccgcagtgcaagcagcgcctccagcctcttcagcccgagcagcactcttttctcttcctctcgtttgcgatatggaatgtctgatgtcatgccttctggcaggagcaggcttttggaagattttcgaaacaaccggtaccccaatttacaactgcgggagattgctggacatataatggaattttcccaagaccagcatgggtccagattcattcagctgaaactggagcgtgccacaccagctgagcgccagcttgtcttcaatgaaatcctccaggctgcctaccaactcatggtggatgtgtttggtaattacgtcattcagaagttctttgaatttggcagtcttgaacagaagctggctttggcagaacggattcgaggccacgtcctgtcattggcactacagatgtatggctgccgtgttatccagaaagctcttgagtttattccttcagaccagcaggtaattaatgagatggttcgggaactagatggccatgtcttgaagtgtgtgaaagatcagaatggcaatcacgtggttcagaaatgcattgaatgtgtacagccccagtctttgcaatttatcatcgatgcgtttaagggacaggtatttgccttatccacacatccttatggctgccgagtgattcagagaatcctggagcactgtctccctgaccagacactccctattttagaggagcttcaccagcacacagagcagcttgtacaggatcaatatggaaattatgtaatccaacatgtactggagcacggtcgtcctgaggataaaagcaaaattgtagcagaaatccgaggcaatgtacttgtattgagtcagcacaaatttgcaagcaatgttgtggagaagtgtgttactcacgcctcacgtacggagcgcgctgtgctcatcgatgaggtgtgcaccatgaacgacggtccccacagtgccttatacaccatgatgaaggaccagtatgccaactacgtggtccagaagatgattgacgtggcggagccaggccagcggaagatcgtcatgcataagatccggccccacatcgcaactcttcgtaagtacacctatggcaagcacattctggccaagctggagaagtactacatgaagaacggtgttgacttagggcccatctgtggcccccctaatggtatcatctgaggcagtgtcacccgctgttccctcattcccgctgacctcactggcccactggcaaatccaaccagcaaccagaaatgttctagtgtagagtctgagacgggcaagtggttgctccaggattactccctcctccaaaaaaggaatcaaatccacgagtggaaaagcctttgtaaatttaattttattacacataacatgtactattttttttaattgactaattgccctgctgttttactggtgtataggatacttgtacataggtaaccaatgtacatgggaggccacatattttgttcactgttgtatctatatttcacatgtggaaactttcagggtggttggtttaacaaaaaaaaaaagctttaaaaaaaaaagaaaaaaa

SEQ ID NO: 25003 - DNA, 3936 bp, Homo sapiens
  source 1..3936: mol_type = unassigned DNA
gggggagcgagagcgccagagagagaagatcggggggctgaaatccatcttcatcctaccgctccgcccgtgttggtggaatgagcgttgcatgtgtcttgaagagaaaagcagtgctttggcaggactctttcagcccccacctgaaacatcaccctcaagaaccagctaatcccaacatgcctgttgttttgacatctggaacagggtcgcaagcgcagccacaaccagctgcaaatcaggctcttgcagctgggactcactccagccctgtcccaggatctataggagttgcaggccgttcccaggacgacgctatggtggactacttctttcagaggcagcatggtgagcagcttgggggaggaggaagtggaggaggcggctataataatagcaaacatcgatggcctactggggataacattcatgcagaacatcaggtgcgttccatggatgaactgaatcatgattttcaagcacttgctctggagggaagagcgatgggagagcagctcttgccaggtaaaaagttttgggaaacagatgaatccagcaaagatggaccaaaaggaatattcctgggtgatcaatggcgagacagtgcctggggaacatcagatcattcagtttcccagccaatcatggtgcagagaagacctggtcagagtttccatgtgaacagtgaggtcaattctgtactgtccccacgatcggagagtgggggactaggcgttagcatggtggagtatgtgttgagctcatccccgggcgattcctgtctaagaaaaggaggatttggcccaagggatgcagacagtgatgaaaacgacaaaggtgaaaagaagaacaagggtacgtttgatggagataagctaggagatttgaaggaggagggtgatgtgatggacaagaccaatggtttaccagtgcagaatgggattgatgcagacgtcaaagattttagccgtacccctggtaattgccagaactctgctaatgaagtggatcttctgggtccaaaccagaatggttctgagggcttagcccagctgaccagcaccaatggtgccaagcctgtggaggatttctccaacatggagtcccagagtgtccccttggaccccatggaacatgtgggcatggagcctcttcagtttgattattcaggcacgcaggtacctgtggactcagcagcagcaactgtgggactttttgactacaattctcaacaacagctgttccaaagacctaatgcgcttgctgtccagcagttgacagctgctcagcagcagcagtatgcactggcagctgctcatcagccgcacatcgcaggtttagctcccgctgcgtttgtccccaatccatacatcatcagcgctgctcccccagggacggacccctacacagctggattggctgcagcagcgacactaggcccagctgtggtccctcaccagtattatggagttactccctggggagtctaccctgccagtcttttccagcagcaagctgccgctgccgctgcagcaactaattcagctaatcaacagaccaccccacaggctcagcaaggacagcagcaggttctccgtggaggagccagccaacgtcctttgaccccaaaccagaaccagcagggacagcaaacggatccccttgtggcagctgcagcagtgaattctgcccttgcatttggacaaggtctggcagcaggcatgccaggttatccggtgttggctcctgctgcttactatgaccaaactggtgcccttgtagtgaatgcaggcgcgagaaatggtcttggagctcctgttcgacttgtagctcctgccccagtcatcattagttcctcagctgcacaagcaggaacacagcagcctcagccccagccccagcagcagcccaataacaacctggcatccagttctttctacggcaacaactctctgaacagcaattcacagagcagctccctcttctcccagggctctgcccagcctgccaacacatccttgggattcggaagtagcagttctctcggcgccaccctgggatccgcccttggagggtttggaacagcagttgcaaactccaacactggcagtggctcccgccgtgactccctgactggcagcagtgacctttataagaggacatcgagcagcttgacccccattggacacagtttttataacggccttagcttttcctcctctcctggacccgtgggcatgcctctccctagtcagggaccaggacattcacagacaccacctccttccctctcttcacatggatcctcttcaagcttaaacctgggaggactcacgaatggcagtggaagatacatctctgctgctccaggcgctgaagccaagtaccgcagtgcaagcagcgcctccagcctcttcagcccgagcagcactcttttctcttcctctcgtttgcgatatggaatgtctgatgtcatgccttctggcaggagcaggcttttggaagattttcgaaacaaccggtaccccaatttacaactgcgggagattgctggacatataatggaattttcccaagaccagcatgggtccagattcattcagctgaaactggagcgtgccacaccagctgagcgccagcttgtcttcaatgaaatcctccaggctgcctaccaactcatggtggatgtgtttggtaattacgtcattcagaagttctttgaatttggcagtcttgaacagaagctggctttggcagaacggattcgaggccacgtcctgtcattggcactacagatgtatggctgccgtgttatccagaaagctcttgagtttattccttcagaccagcaggtaattaatgagatggttcgggaactagatggccatgtcttgaagtgtgtgaaagatcagaatggcaatcacgtggttcagaaatgcattgaatgtgtacagccccagtctttgcaatttatcatcgatgcgtttaagggacaggtatttgccttatccacacatccttatggctgccgagtgattcagagaatcctggagcactgtctccctgaccagacactccctattttagaggagcttcaccagcacacagagcagcttgtacaggatcaatatggaaattatgtaatccaacatgtactggagcacggtcgtcctgaggataaaagcaaaattgtagcagaaatccgaggcaatgtacttgtattgagtcagcacaaatttgcaagcaatgttgtggagaagtgtgttactcacgcctcacgtacggagcgcgctgtgctcatcgatgaggtgtgcaccatgaacgacggtccccacagtgccttatacaccatgatgaaggaccagtatgccaactacgtggtccagaagatgattgacgtggcggagccaggccagcggaagatcgtcatgcataagatccggccccacatcgcaactcttcgtaagtacacctatggcaagcacattctggccaagctggagaagtactacatgaagaacggtgttgacttagggcccatctgtggcccccctaatggtatcatctgaggcagtgtcacccgctgttccctcattcccgctgacctcactggcccactggcaaatccaaccagcaaccagaaatgttctagtgtagagtctgagacgggcaagtggttgctccaggattactccctcctccaaaaaaggaatcaaatccacgagtggaaaagcctttgtaaatttaattttattacacataacatgtactattttttttaattgactaattgccctgctgttttactggtgtataggatacttgtacataggtaaccaatgtacatgggaggccacatattttgttcactgttgtatctatatttcacatgtggaaactttcagggtggttggtttaacaaaaaaaaaaagcttt

SEQ ID NO: 25004 - DNA, 549 bp, Homo sapiens
  source 1..549: mol_type = unassigned DNA
cactctgtcgcccaagcgggtgtgcagcctcccgctcctgggctcaaatgatcctcccacctcagcctccctagtagctgggactataggcacatgccaccatgcctggctaattatttttagtagagataggtcttgctatgttgcccaggctggtcttgaactcctgggctcaagctgtctgcccacctcagcctcccaaagtgctgggattgtaggtatgagccaccacacccaactgaggcttctggtgttggtggaatgagcgttgcatgtgtcttgaagagaaaagcagtgctttggcaggactctttcagcccccacctgaaacatcaccctcaagaaccagctaatcccaacatgcctgttgttttgacatctggaacagggtcgcaagcgcagccacaaccagctgcaaatcaggctcttgcagctgggactcactccagccctgtcccaggatctataggagttgcaggccgttcccaggacgacgctatggtggactacttctttcagaggcagcatggtgagcagcttgggggagga

SEQ ID NO: 25005 - DNA, 1661 bp, Homo sapiens
  source 1..1661: mol_type = unassigned DNA
agtgggccgccatgttgtcggagtgaaaggtaagggggagcgagagcgccagagagagaagatcggggggctgaaatccatcttcatcctaccgctccgcccgtgttggtggaatgagcgttgcatgtgtcttgaagagaaaagcagtgctttggcaggactctttcagcccccacctgaaacatcaccctcaagaaccagctaatcccaacatgcctgttgttttgacatctggaacagggtcgcaagcgcagccacaaccagctgcaaatcaggctcttgcagctgggactcactccagccctgtcccaggatctataggagttgcaggccgttcccaggacgacgctatggtggactacttctttcagaggcagcatggtgagcagcttgggggaggaggaagtggaggaggcggctataataatagcaaacatcgatggcctactggggataacattcatgcagaacatcaggtgcgttccatggatgaactgaatcatgattttcaagcacttgctctggagggaagagcgatgggagagcagctcttgccaggtaaaaagttttgggaaacagatgaatccagcaaagatggaccaaaaggaatattcctgggtgatcaatggcgagacagtgcctggggaacatcagatcattcagtttcccagccaatcatggtgcagagaagacctggtcagagtttccatgtgaacagtgaggtcaattctgtactgtccccacgatcggagagtgggggactaggcgttagcatggtggagtatgtgttgagctcatccccgggcgattcctgtctaagaaaaggaggatttggcccaagggatgcagacagtgatgaaaacgacaaaggtgaaaagaagaacaagggtacgtttgatggagataagctaggagatttgaaggaggagggtgatgtgatggacaagaccaatggtttaccagtgcagaatgggattgatgcagacgtcaaagattttagccgtacccctggtaattgccagaactctgctaatgaagtggatcttctgggtccaaaccagaatggttctgagggcttagcccagctgaccagcaccaatggtgccaagcctgtggaggatttctccaacatggagtcccagagtgtccccttggaccccatggaacatgtgggcatggagcctcttcagtttgattattcaggcacgcaggtacctgtggactcagcagcagcaactgtgggactttttgactacaattctcaacaacagctgttccaaagacctaatgcgcttgctgtccagcagttgacagctgctcagcagcagcagtatgcactggcagctgctcatcagccgcacatcggtttagctcccgctgcgtttgtccccaatccatacatcatcagcgctgctcccccagggacggacccctacacagctggattggctgcagcagcgacactaggcccagctgtggtccctcaccagtattatggagttactccctggggagtctaccctgccagtcttttccagcagcaagctgccgctgccgctgcagcaactaattcagctaatcaacagaccaccccacaggctcagcaaggacagcagcagacggaattttgcttttgttgcccaggctggagtgcaatggtg

SEQ ID NO: 25006 - DNA, 5880 bp, Homo sapiens
  source 1..5880: mol_type = unassigned DNA
aacaggtttgatctgtggatgaaatgaatcatgattttcaagctcttgcattagaatctcggggaatgggagagcttttgcctaccaaaaagttttgggaacctgatgattcaacaaaagatggacaaaaaggcatatttcttggggatgatgaatggagagagactgcatggggagcttctcaccattcaatgtcccagcctattatggtacagagaagatctggacagggttttcatggaaacagtgaagtaaatgcaatactgtctccgcgatcagaaagtggaggccttggtgtgagcatggtagaatatgtattaagttcttctcctgctgataaattggattctcgatttaggaagggaaattttggcactagagatgctgaaacagatggacctgagaaaggagatcaaaaaggcaaggcttctccatttgaggaggaccaaaacagagatcttaaacaaggagatgatgatgattctaaaataaatggcagaggtttgccaaatggaatggatgccgattgcaaagattttaatcgtactcctggaagtcgtcaagcctctccaactgaagtagttgagcgcttgggccccaatactaatccctcagaaggactggggcctcttcctaatcctacagctaataaaccacttgttgaagaattttcaaatcctgaaactcagaatctggatgccatggaacaagttggtctggaatccttacagtttgactatcctggtaatcaggtaccaatggactcttcaggagctactgtaggcctttttgactacaattcccagcagcagctctttcagaggactaatgcactaacagttcaacagttaactgcagctcaacagcagcaatatgcattagcagcagctcagcagccacatatagctggtgtattctcagcaggccttgctccagctgcatttgtgccaaatccatacattattagtgctgctcctccagggaccgatccgtatactgcagcaggattggctgcagcagctacattagcaggtccagcagtggttccacctcagtattacggcgttccatggggggtgtatccagccaacttatttcagcagcaagctgcagctgcggcaaataacacagccagtcagcaagcagcatcacaagctcagcctggacagcaacaggttctccgtgctggagcaggtcagcgtcctcttactcccaatcagggtcagcaagggcagcaagcagaatcacttgcggcagctgcagcagcaaatccaacattggcttttggtcagggtcttgctactggcatgccaggctatcaagtactagctccaactgcctattatgatcagactggtgccttagtggttggccctggagcaaggactggccttggagctccagttcggttaatggctccaacacctgttttaattagttcagcagcagcacaagctgcagcagcagcagcagctggaggaactgcaagtagccttacaggcagcacaaatggtctgtttcggccaattggcactcagccaccacagcagcagcaacagcagccaagcactaatctgcaatctaattcattttatggaagcagttctttgactaatagctcccagagtagttctttattttctcatggacctggtcaacctggaagtacatctcttggctttggaagtggtaactctttgggtgctgctataggctcagccctcagtggatttggttcatcaggaggactgacaaatggtagtggtcgatatatctctgcagcacctggagcagaagcaaaatatcgaagtgcttcaagcacttccagtctatttagctccagcagccagctctttcctccttcccggcttcggtataataggtctgatattatgccttctggccgcagtagattattggaagatttcagaaacaaccgcttcccaaaccttcagcttagagacttgattggacatatagttgagttttctcaagaccagcatggttctagattcatacagcaaaaactagagagagctactccagctgagcgacagatggtatttaatgaaattctgcaagcagcctatcaattaatgactgatgtttttggcaactatgttatacagaagttttttgagtttgggagtctggatcaaaaattagccctggctactcgtattcgtggtcatgttctacccttagccttgcagatgtatggctgccgcgttattcagaaagcattagaatctatttcttctgaccagcaggtaattagtgaaatggtaaaggagctggatggtcatgtgctcaaatgtgtgaaagatcagaatggaaaccatgttgtacaaaaatgtatcgaatgtgttcagccacagtcactacagttcatcattgatgctttcaagggacaagtatttgtgctttcaactcatccttatggctgcagagtaattcagcgcatcctagagcattgcactgcagaacagaccttacctatcttagaagaactccaccaacatacagagcagttggtacaggatcagtatggcaattatgttattcagcatgtactggaacacggtcgacctgaagacaagagcaaaattgtttccgaaatcaggggaaaggttttagccctgagtcaacacaaatttgccagcaatgtagtagaaaagtgtgttactcatgcctcccgtgctgagagagctttactgattgacgaggtttgctgccagaatgatggtcctcacagtgccttatacaccatgatgaaggaccagtatgccaattacgtggttcaaaagatgattgatatggctgaacctgctcagagaaagataatcatgcacaagattcgacctcacattactactttgcgcaaatacacatacgggaagcatatactggccaagttggaaaagtattatttgaagaatagcccggacctaggacctattggaggaccaccaaatggaatgctgtaaattacaggagcaagagaaagaagataatttaaccatgtgaaaagaatttttttgtgtgtgaattatcaaaacacaactcaactatgaatcttcaatttttttttaaagcaaaactatttattgactttattcatccatttgtaaattttttaaggttcttgtgtatatttggggggtgggggatgaattataaattatattcagccctgagtggagacctatcagattggattgctggcaaagcacagaatgcctgtatatgatgtaactgtatcaaaaataaaaagctgtcacatattttgtaaatttttaccttgtaaagtcacaaaaatagtttttaaaggaaaaagtacagtattcttttaataaactggctcacagtctggtaggtctacaaccccatagcacaacaggtttatagagatgtatatagaattatagtccttatttttttcctttgcgtgaaaccttttataacagattaacaatcaactgcataaatattattaatattttaaaaagagttaagttgtattttgataattcacaaactatcatgcaaataacgagtaagtagacaagaataaagtggtttgagatgaaaagaacctaacattatttacagtagatgtggttttaatacaattactgccctaaaatgtctctggcaatgtacagaaatattgtatatacttacatatgtaattgttgtaagagttaaatacaaaatcatggtgacacttccaattaagtgcactaaatgaaaagttaagtcacttattaacttttcagtttggtttgcaatgagaaagagtggaaatttgtattttgttttgcttatagaattacagacatgttgaggaagtgttgagctttattttgctttttcatagaggcagaaagtaggaaccagatagagatgaaaaggggccactgaaaagtgaatttgatagctcagcatttaagcatgattacatattcagatagctctttttgctttctataaatatatgcattgtgtgtgtagtaatagatgtaagtttacactttgaaaggaaatcttgtttcaatgtttattataaaagccttgctaatttagtagtgatgctttccttggttgtacaggtgtacatttgtaaaccttcatgctgtaaatggaatttgttttatctctttgggatacatttgcattttagtgtacatttacgtccctgccctctttgacctggcaatatagtgttgtataatgtaaatttatttctccaaatcgagagtgattttttaaaaattttttatctttatatggtttcagaagtatgaaccagctttctttttattattgtgagatcattttgttttataacatagttgttgactgttaatatggacctgctagaatttggatcactttcaattgaagtcagggtattgtgcataatagaaagtattggactgagatatttggttaccatggaggccaatgcttttttcatcttattaaatgtgatgtgacttttttctttgtacagaagagtactgtatttttgaatagcctactcccaagtaagagcaaatctgtatgataacattttttcctctggacataagacataacagtaacacgatgtacatttacaagcggccttatgtacatttcccaacaatctttttaaggcaaaattgtgaccatatgtgtataattaaaatcgtttttaatcctttgcctatgaaaatattttggaaaaaaacttgctgtgtatattcagtttctgaaagataaagaaagtgctttgtattttgttgaagtcagtattttgtataaacatttatgttgacccacttatgttcagtgctgaaaactaaaatgaacatgctattctgtcagctgaatatggaagagatctttttttactagagatctgcagaagaaacgcaatcttctgagcacaatatggaatctaaaggttttatcacttagttgttcatattatgaacctaaaaataatggcataaagtttggggatgccaggcatactttttcatgtttggtgttgagttattttacttttctaacccaacattccttggtgagaccattaaatccaaacacttgtcaccgttccttctcatagtcactctgggtcatcagcatgtcccagtcactgcagcaacgccttgtgtttgtttcatttttttaaaacccacacaaagccgctgtctcactttttcctactttaccaacctcagagtatttcggcccgtatcgaacttttgttctcagtatcagcccatggtttcaggatcaaagctgtcatgttggagattggtaatggctttcctgtctttgtacagttgaattcctagtcttccttcatccttgccctctgttggcacaggcattatctctgcaattttagaaaatgacaagtagagaatactacattgagaaactaaaccctcttcttggggtcctgatactcattcccatttgtcccagtgctgacaacccaatcttcccaatactttcaggcctgctctacaaaagtacctgttcttgtagaaattttacagtctgccattttgggtgcccaccccaatttttaccttttagtaagttggcatgaaattttggtaaaatctgaaaatcacatttcagaataaaacaattgggcaaaactacctaggctttactcttgagtgtctccttttgatagggattgtttctggaccagtttgtctaagtcctggctcttattggttcatatgaaataatgttaacttcacttctttgtatattatgtataaattagaaaatgaaaaatgtgtgaataacattgtatgaaataaacctggtcttgtgtttttctctagataaaatacccctctgtacctc

SEQ ID NO: 25007 - DNA, 6112 bp, Homo sapiens
  source 1..6112: mol_type = unassigned DNA
aacaggtttgatctgtggatgaaatgaatcatgattttcaagctcttgcattagaatctcggggaatgggagagcttttgcctaccaaaaagttttgggaacctgatgattcaacaaaagatggacaaaaaggcatatttcttggggatgatgaatggagagagactgcatggggagcttctcaccattcaatgtcccagcctattatggtacagagaagatctggacagggttttcatggaaacagtgaagtaaatgcaatactgtctccgcgatcagaaagtggaggccttggtgtgagcatggtagaatatgtattaagttcttctcctgctgataaattggattctcgatttaggaagggaaattttggcactagagatgctgaaacagatggacctgagaaaggagatcaaaaaggcaaggcttctccatttgaggaggaccaaaacagagatcttaaacaaggagatgatgatgattctaaaataaatggcagaggtttgccaaatggaatggatgccgattgcaaagattttaatcgtactcctggaagtcgtcaagcctctccaactgaagtagttgagcgcttgggccccaatactaatccctcagaaggactggggcctcttcctaatcctacagctaataaaccacttgttgaagaattttcaaatcctgaaactcagaatctggatgccatggaacaagttggtctggaatccttacagtttgactatcctggtaatcaggtaccaatggactcttcaggagctactgtaggcctttttgactacaattcccagcagcagctctttcagaggactaatgcactaacagttcaacagttaactgcagctcaacagcagcaatatgcattagcagcagctcagcagccacatatagctggtgtattctcagcaggccttgctccagctgcatttgtgccaaatccatacattattagtgctgctcctccagggaccgatccgtatactgcagcaggattggctgcagcagctacattagcaggtccagcagtggttccacctcagtattacggcgttccatggggggtgtatccagccaacttatttcagcagcaagctgcagctgcggcaaataacacagccagtcagcaagcagcatcacaagctcagcctggacagcaacaggttctccgtgctggagcaggtcagcgtcctcttactcccaatcagggtcagcaagggcagcaagcagaatcacttgcggcagctgcagcagcaaatccaacattggcttttggtcagggtcttgctactggcatgccaggctatcaagtactagctccaactgcctattatgatcagactggtgccttagtggttggccctggagcaaggactggccttggagctccagttcggttaatggctccaacacctgttttaattagttcagcagcagcacaagctgcagcagcagcagcagctggaggaactgcaagtagccttacaggcagcacaaatggtctgtttcggccaattggcactcagccaccacagcagcagcaacagcagccaagcactaatctgcaatctaattcattttatggaagcagttctttgactaatagctcccagagtagttctttattttctcatggacctggtcaacctggaagtacatctcttggctttggaagtggtaactctttgggtgctgctataggctcagccctcagtggatttggttcatcagttggcagttctgcaagtagtagtgccacaaggagagagtctctatctactagctctgacttgtacaaaagatctagtagcagcctagcacccatagggcaaccattttacaatagtctgggattttcctcctctccaagtccaataggcatgcctctgccaagccaaactccaggacattcacttacgccaccgccatcactttcatcacatggatcctcatccagtttgcatttaggaggactgacaaatggtagtggtcgatatatctctgcagcacctggagcagaagcaaaatatcgaagtgcttcaagcacttccagtctatttagctccagcagccagctctttcctccttcccggcttcggtataataggtctgatattatgccttctggccgcagtagattattggaagatttcagaaacaaccgcttcccaaaccttcagcttagagacttgattggacatatagttgagttttctcaagaccagcatggttctagattcatacagcaaaaactagagagagctactccagctgagcgacagatggtatttaatgaaattctgcaagcagcctatcaattaatgactgatgtttttggcaactatgttatacagaagttttttgagtttgggagtctggatcaaaaattagccctggctactcgtattcgtggtcatgttctacccttagccttgcagatgtatggctgccgcgttattcagaaagcattagaatctatttcttctgaccagcagagtgaaatggtaaaggagctggatggtcatgtgctcaaatgtgtgaaagatcagaatggaaaccatgttgtacaaaaatgtatcgaatgtgttcagccacagtcactacagttcatcattgatgctttcaagggacaagtatttgtgctttcaactcatccttatggctgcagagtaattcagcgcatcctagagcattgcactgcagaacagaccttacctatcttagaagaactccaccaacatacagagcagttggtacaggatcagtatggcaattatgttattcagcatgtactggaacacggtcgacctgaagacaagagcaaaattgtttccgaaatcaggggaaaggttttagccctgagtcaacacaaatttgccagcaatgtagtagaaaagtgtgttactcatgcctcccgtgctgagagagctttactgattgacgaggtttgctgccagaatgatggtcctcacagtgccttatacaccatgatgaaggaccagtatgccaattacgtggttcaaaagatgattgatatggctgaacctgctcagagaaagataatcatgcacaagattcgacctcacattactactttgcgcaaatacacatacgggaagcatatactggccaagttggaaaagtattatttgaagaatagcccggacctaggacctattggaggaccaccaaatggaatgctgtaaattacaggagcaagagaaagaagataatttaaccatgtgaaaagaatttttttgtgtgtgaattatcaaaacacaactcaactatgaatcttcaatttttttttaaagcaaaactatttattgactttattcatccatttgtaaattttttaaggttcttgtgtatatttggggggtgggggatgaattataaattatattcagccctgagtggagacctatcagattggattgctggcaaagcacagaatgcctgtatatgatgtaactgtatcaaaaataaaaagctgtcacatattttgtaaatttttaccttgtaaagtcacaaaaatagtttttaaaggaaaaagtacagtattcttttaataaactggctcacagtctggtaggtctacaaccccatagcacaacaggtttatagagatgtatatagaattatagtccttatttttttcctttgcgtgaaaccttttataacagattaacaatcaactgcataaatattattaatattttaaaaagagttaagttgtattttgataattcacaaactatcatgcaaataacgagtaagtagacaagaataaagtggtttgagatgaaaagaacctaacattatttacagtagatgtggttttaatacaattactgccctaaaatgtctctggcaatgtacagaaatattgtatatacttacatatgtaattgttgtaagagttaaatacaaaatcatggtgacacttccaattaagtgcactaaatgaaaagttaagtcacttattaacttttcagtttggtttgcaatgagaaagagtggaaatttgtattttgttttgcttatagaattacagacatgttgaggaagtgttgagctttattttgctttttcatagaggcagaaagtaggaaccagatagagatgaaaaggggccactgaaaagtgaatttgatagctcagcatttaagcatgattacatattcagatagctctttttgctttctataaatatatgcattgtgtgtgtagtaatagatgtaagtttacactttgaaaggaaatcttgtttcaatgtttattataaaagccttgctaatttagtagtgatgctttccttggttgtacaggtgtacatttgtaaaccttcatgctgtaaatggaatttgttttatctctttgggatacatttgcattttagtgtacatttacgtccctgccctctttgacctggcaatatagtgttgtataatgtaaatttatttctccaaatcgagagtgattttttaaaaattttttatctttatatggtttcagaagtatgaaccagctttctttttattattgtgagatcattttgttttataacatagttgttgactgttaatatggacctgctagaatttggatcactttcaattgaagtcagggtattgtgcataatagaaagtattggactgagatatttggttaccatggaggccaatgcttttttcatcttattaaatgtgatgtgacttttttctttgtacagaagagtactgtatttttgaatagcctactcccaagtaagagcaaatctgtatgataacattttttcctctggacataagacataacagtaacacgatgtacatttacaagcggccttatgtacatttcccaacaatctttttaaggcaaaattgtgaccatatgtgtataattaaaatcgtttttaatcctttgcctatgaaaatattttggaaaaaaacttgctgtgtatattcagtttctgaaagataaagaaagtgctttgtattttgttgaagtcagtattttgtataaacatttatgttgacccacttatgttcagtgctgaaaactaaaatgaacatgctattctgtcagctgaatatggaagagatctttttttactagagatctgcagaagaaacgcaatcttctgagcacaatatggaatctaaaggttttatcacttagttgttcatattatgaacctaaaaataatggcataaagtttggggatgccaggcatactttttcatgtttggtgttgagttattttacttttctaacccaacattccttggtgagaccattaaatccaaacacttgtcaccgttccttctcatagtcactctgggtcatcagcatgtcccagtcactgcagcaacgccttgtgtttgtttcatttttttaaaacccacacaaagccgctgtctcactttttcctactttaccaacctcagagtatttcggcccgtatcgaacttttgttctcagtatcagcccatggtttcaggatcaaagctgtcatgttggagattggtaatggctttcctgtctttgtacagttgaattcctagtcttccttcatccttgccctctgttggcacaggcattatctctgcaattttagaaaatgacaagtagagaatactacattgagaaactaaaccctcttcttggggtcctgatactcattcccatttgtcccagtgctgacaacccaatcttcccaatactttcaggcctgctctacaaaagtacctgttcttgtagaaattttacagtctgccattttgggtgcccaccccaatttttaccttttagtaagttggcatgaaattttggtaaaatctgaaaatcacatttcagaataaaacaattgggcaaaactacctaggctttactcttgagtgtctccttttgatagggattgtttctggaccagtttgtctaagtcctggctcttattggttcatatgaaataatgttaacttcacttctttgtatattatgtataaattagaaaatgaaaaatgtgtgaataacattgtatgaaataaacctggtcttgtgtttttctctagataaaatacccctctgtacctca

SEQ ID NO: 25008 - DNA, 6117 bp, Homo sapiens
  source 1..6117: mol_type = unassigned DNA
aacaggtttgatctgtggatgaaatgaatcatgattttcaagctcttgcattagaatctcggggaatgggagagcttttgcctaccaaaaagttttgggaacctgatgattcaacaaaagatggacaaaaaggcatatttcttggggatgatgaatggagagagactgcatggggagcttctcaccattcaatgtcccagcctattatggtacagagaagatctggacagggttttcatggaaacagtgaagtaaatgcaatactgtctccgcgatcagaaagtggaggccttggtgtgagcatggtagaatatgtattaagttcttctcctgctgataaattggattctcgatttaggaagggaaattttggcactagagatgctgaaacagatggacctgagaaaggagatcaaaaaggcaaggcttctccatttgaggaggaccaaaacagagatcttaaacaaggagatgatgatgattctaaaataaatggcagaggtttgccaaatggaatggatgccgattgcaaagattttaatcgtactcctggaagtcgtcaagcctctccaactgaagtagttgagcgcttgggccccaatactaatccctcagaaggactggggcctcttcctaatcctacagctaataaaccacttgttgaagaattttcaaatcctgaaactcagaatctggatgccatggaacaagttggtctggaatccttacagtttgactatcctggtaatcaggtaccaatggactcttcaggagctactgtaggcctttttgactacaattcccagcagcagctctttcagaggactaatgcactaacagttcaacagttaactgcagctcaacagcagcaatatgcattagcagcagctcagcagccacatatagctggtgtattctcagcaggccttgctccagctgcatttgtgccaaatccatacattattagtgctgctcctccagggaccgatccgtatactgcagcaggattggctgcagcagctacattagcaggtccagcagtggttccacctcagtattacggcgttccatggggggtgtatccagccaacttatttcagcagcaagctgcagctgcggcaaataacacagccagtcagcaagcagcatcacaagctcagcctggacagcaacaggttctccgtgctggagcaggtcagcgtcctcttactcccaatcagggtcagcaagggcagcaagcagaatcacttgcggcagctgcagcagcaaatccaacattggcttttggtcagggtcttgctactggcatgccaggctatcaagtactagctccaactgcctattatgatcagactggtgccttagtggttggccctggagcaaggactggccttggagctccagttcggttaatggctccaacacctgttttaattagttcagcagcagcacaagctgcagcagcagcagcagctggaggaactgcaagtagccttacaggcagcacaaatggtctgtttcggccaattggcactcagccaccacagcagcagcaacagcagccaagcactaatctgcaatctaattcattttatggaagcagttctttgactaatagctcccagagtagttctttattttctcatggacctggtcaacctggaagtacatctcttggctttggaagtggtaactctttgggtgctgctataggctcagccctcagtggatttggttcatcagttggcagttctgcaagtagtagtgccacaaggagagagtctctatctactagctctgacttgtacaaaagatctagtagcagcctagcacccatagggcaaccattttacaatagtctgggattttcctcctctccaagtccaataggcatgcctctgccaagccaaactccaggacattcacttacgccaccgccatcactttcatcacatggatcctcatccagtttgcatttaggaggactgacaaatggtagtggtcgatatatctctgcagcacctggagcagaagcaaaatatcgaagtgcttcaagcacttccagtctatttagctccagcagccagctctttcctccttcccggcttcggtataataggtctgatattatgccttctggccgcagtagattattggaagatttcagaaacaaccgcttcccaaaccttcagcttagagacttgattggacatatagttgagttttctcaagaccagcatggttctagattcatacagcaaaaactagagagagctactccagctgagcgacagatggtatttaatgaaattctgcaagcagcctatcaattaatgactgatgtttttggcaactatgttatacagaagttttttgagtttgggagtctggatcaaaaattagccctggctactcgtattcgtggtcatgttctacccttagccttgcagatgtatggctgccgcgttattcagaaagcattagaatctatttcttctgaccagcaggtaattagtgaaatggtaaaggagctggatggtcatgtgctcaaatgtgtgaaagatcagaatggaaaccatgttgtacaaaaatgtatcgaatgtgttcagccacagtcactacagttcatcattgatgctttcaagggacaagtatttgtgctttcaactcatccttatggctgcagagtaattcagcgcatcctagagcattgcactgcagaacagaccttacctatcttagaagaactccaccaacatacagagcagttggtacaggatcagtatggcaattatgttattcagcatgtactggaacacggtcgacctgaagacaagagcaaaattgtttccgaaatcaggggaaaggttttagccctgagtcaacacaaatttgccagcaatgtagtagaaaagtgtgttactcatgcctcccgtgctgagagagctttactgattgacgaggtttgctgccagaatgatggtcctcacagtgccttatacaccatgatgaaggaccagtatgccaattacgtggttcaaaagatgattgatatggctgaacctgctcagagaaagataatcatgcacaagattcgacctcacattactactttgcgcaaatacacatacgggaagcatatactggccaagttggaaaagtattatttgaagaatagcccggacctaggacctattggaggaccaccaaatggaatgctgtaaattacaggagcaagagaaagaagataatttaaccatgtgaaaagaatttttttgtgtgtgaattatcaaaacacaactcaactatgaatcttcaatttttttttaaagcaaaactatttattgactttattcatccatttgtaaattttttaaggttcttgtgtatatttggggggtgggggatgaattataaattatattcagccctgagtggagacctatcagattggattgctggcaaagcacagaatgcctgtatatgatgtaactgtatcaaaaataaaaagctgtcacatattttgtaaatttttaccttgtaaagtcacaaaaatagtttttaaaggaaaaagtacagtattcttttaataaactggctcacagtctggtaggtctacaaccccatagcacaacaggtttatagagatgtatatagaattatagtccttatttttttcctttgcgtgaaaccttttataacagattaacaatcaactgcataaatattattaatattttaaaaagagttaagttgtattttgataattcacaaactatcatgcaaataacgagtaagtagacaagaataaagtggtttgagatgaaaagaacctaacattatttacagtagatgtggttttaatacaattactgccctaaaatgtctctggcaatgtacagaaatattgtatatacttacatatgtaattgttgtaagagttaaatacaaaatcatggtgacacttccaattaagtgcactaaatgaaaagttaagtcacttattaacttttcagtttggtttgcaatgagaaagagtggaaatttgtattttgttttgcttatagaattacagacatgttgaggaagtgttgagctttattttgctttttcatagaggcagaaagtaggaaccagatagagatgaaaaggggccactgaaaagtgaatttgatagctcagcatttaagcatgattacatattcagatagctctttttgctttctataaatatatgcattgtgtgtgtagtaatagatgtaagtttacactttgaaaggaaatcttgtttcaatgtttattataaaagccttgctaatttagtagtgatgctttccttggttgtacaggtgtacatttgtaaaccttcatgctgtaaatggaatttgttttatctctttgggatacatttgcattttagtgtacatttacgtccctgccctctttgacctggcaatatagtgttgtataatgtaaatttatttctccaaatcgagagtgattttttaaaaattttttatctttatatggtttcagaagtatgaaccagctttctttttattattgtgagatcattttgttttataacatagttgttgactgttaatatggacctgctagaatttggatcactttcaattgaagtcagggtattgtgcataatagaaagtattggactgagatatttggttaccatggaggccaatgcttttttcatcttattaaatgtgatgtgacttttttctttgtacagaagagtactgtatttttgaatagcctactcccaagtaagagcaaatctgtatgataacattttttcctctggacataagacataacagtaacacgatgtacatttacaagcggccttatgtacatttcccaacaatctttttaaggcaaaattgtgaccatatgtgtataattaaaatcgtttttaatcctttgcctatgaaaatattttggaaaaaaacttgctgtgtatattcagtttctgaaagataaagaaagtgctttgtattttgttgaagtcagtattttgtataaacatttatgttgacccacttatgttcagtgctgaaaactaaaatgaacatgctattctgtcagctgaatatggaagagatctttttttactagagatctgcagaagaaacgcaatcttctgagcacaatatggaatctaaaggttttatcacttagttgttcatattatgaacctaaaaataatggcataaagtttggggatgccaggcatactttttcatgtttggtgttgagttattttacttttctaacccaacattccttggtgagaccattaaatccaaacacttgtcaccgttccttctcatagtcactctgggtcatcagcatgtcccagtcactgcagcaacgccttgtgtttgtttcatttttttaaaacccacacaaagccgctgtctcactttttcctactttaccaacctcagagtatttcggcccgtatcgaacttttgttctcagtatcagcccatggtttcaggatcaaagctgtcatgttggagattggtaatggctttcctgtctttgtacagttgaattcctagtcttccttcatccttgccctctgttggcacaggcattatctctgcaattttagaaaatgacaagtagagaatactacattgagaaactaaaccctcttcttggggtcctgatactcattcccatttgtcccagtgctgacaacccaatcttcccaatactttcaggcctgctctacaaaagtacctgttcttgtagaaattttacagtctgccattttgggtgcccaccccaatttttaccttttagtaagttggcatgaaattttggtaaaatctgaaaatcacatttcagaataaaacaattgggcaaaactacctaggctttactcttgagtgtctccttttgatagggattgtttctggaccagtttgtctaagtcctggctcttattggttcatatgaaataatgttaacttcacttctttgtatattatgtataaattagaaaatgaaaaatgtgtgaataacattgtatgaaataaacctggtcttgtgtttttctctagataaaatacccctctgtacctc

SEQ ID NO: 25009 - DNA, 3594 bp, Homo sapiens
  source 1..3594: mol_type = unassigned DNA
attgccgccaccgaaggcggaggagggggaggaccgccaagagcgacgccgccgtgtgcccaacggtcggtgtccccggctgaggcagcgcggccgcagcagccctgtttgatctgtggatgaaatgaatcatgattttcaagctcttgcattagaatctcggggaatgggagagcttttgcctaccaaaaagttttgggaacctgatgattcaacaaaagatggacaaaaaggcatatttcttggggatgatgaatggagagagactgcatggggagcttctcaccattcaatgtcccagcctattatggtacagagaagatctggacagggttttcatggaaacagtgaagtaaatgcaatactgtctccgcgatcagaaagtggaggccttggtgtgagcatggtagaatatgtattaagttcttctcctgctgataaattggattctcgatttaggaagggaaattttggcactagagatgctgaaacagatggacctgagaaaggagatcaaaaaggcaaggcttctccatttgaggaggaccaaaacagagatcttaaacaaggagatgatgatgattctaaaataaatggcagaggtttgccaaatggaatggatgccgattgcaaagattttaatcgtactcctggaagtcgtcaagcctctccaactgaagtagttgagcgcttgggccccaatactaatccctcagaaggactggggcctcttcctaatcctacagctaataaaccacttgttgaagaattttcaaatcctgaaactcagaatctggatgccatggaacaagttggtctggaatccttacagtttgactatcctggtaatcaggtaccaatggactcttcaggagctactgtaggcctttttgactacaattcccagcagcagctctttcagaggactaatgcactaacagttcaacagttaactgcagctcaacagcagcaatatgcattagcagcagctcagcagccacatatagctggtgtattctcagcaggccttgctccagctgcatttgtgccaaatccatacattattagtgctgctcctccagggaccgatccgtatactgcagcaggattggctgcagcagctacattagcaggtccagcagtggttccacctcagtattacggcgttccatggggggtgtatccagccaacttatttcagcagcaagctgcagctgcggcaaataacacagccagtcagcaagcagcatcacaagctcagcctggacagcaacaggttctccgtgctggagcaggtcagcgtcctcttactcccaatcagggtcagcaagggcagcaagcagaatcacttgcggcagctgcagcagcaaatccaacattggcttttggtcagggtcttgctactggcatgccaggctatcaagtactagctccaactgcctattatgatcagactggtgccttagtggttggccctggagcaaggactggccttggagctccagttcggttaatggctccaacacctgttttaattagttcagcagcagcacaagctgcagcagcagcagcagctggaggaactgcaagtagccttacaggcagcacaaatggtctgtttcggccaattggcactcagccaccacagcagcagcaacagcagccaagcactaatctgcaatctaattcattttatggaagcagttctttgactaatagctcccagagtagttctttattttctcatggacctggtcaacctggaagtacatctcttggctttggaagtggtaactctttgggtgctgctataggctcagccctcagtggatttggttcatcagttggcagttctgcaagtagtagtgccacaaggagagagtctctatctactagctctgacttgtacaaaagatctagtagcagcctagcacccatagggcaaccattttacaatagtctgggattttcctcctctccaagtccaataggcatgcctctgccaagccaaactccaggacattcacttacgccaccgccatcactttcatcacatggatcctcatccagtttgcatttaggaggactgacaaatggtagtggtcgatatatctctgcagcacctggagcagaagcaaaatatcgaagtgcttcaagcacttccagtctatttagctccagcagccagctctttcctccttcccggcttcggtataataggtctgatattatgccttctggccgcagtagattattggaagatttcagaaacaaccgcttcccaaaccttcagcttagagacttgattggacatatagttgagttttctcaagaccagcatggttctagattcatacagcaaaaactagagagagctactccagctgagcgacagatggtatttaatgaaattctgcaagcagcctatcaattaatgactgatgtttttggcaactatgttatacagaagttttttgagtttgggagtctggatcaaaaattagccctggctactcgtattcgtggtcatgttctacccttagccttgcagatgtatggctgccgcgttattcagaaagcattagaatctatttcttctgaccagcagagtgaaatggtaaaggagctggatggtcatgtgctcaaatgtgtgaaagatcagaatggaaaccatgttgtacaaaaatgtatcgaatgtgttcagccacagtcactacagttcatcattgatgctttcaagggacaagtatttgtgctttcaactcatccttatggctgcagagtaattcagcgcatcctagagcattgcactgcagaacagaccttacctatcttagaagaactccaccaacatacagagcagttggtacaggatcagtatggcaattatgttattcagcatgtactggaacacggtcgacctgaagacaagagcaaaattgtttccgaaatcaggggaaaggttttagccctgagtcaacacaaatttgccagcaatgtagtagaaaagtgtgttactcatgcctcccgtgctgagagagctttactgattgacgaggtttgctgccagaatgatggtcctcacagtgccttatacaccatgatgaaggaccagtatgccaattacgtggttcaaaagatgattgatatggctgaacctgctcagagaaagataatcatgcacaagattcgacctcacattactactttgcgcaaatacacatacgggaagcatatactggccaagttggaaaagtattatttgaagaatagcccggacctaggacctattggaggaccaccaaatggaatgctgtaaattacaggagcaagagaaagaagataatttaaccatgtgaaaagaatttttttgtgtgtgaattatcaaaacacaactcaactatgaatcttcaatttttttttaaagcaaaactatttattgactttattcatccatttgtaaattttttaaggttcttgtgtatatttggggggtgggggatgaattataaattatattcagccctgagtggagacctatcagattggattgctggcaaagcacagaatgcctgtatatgatgtaactgtatc

SEQ ID NO: 25010 - DNA, 546 bp, Homo sapiens
  source 1..546: mol_type = unassigned DNA
attgccgccaccgaaggcggaggagggggaggaccgccaagagcgacgccgccgtgtgcccaacggtcggtgtccccggctgaggcagcgcggccgcagcagccctgaaacagtcataacctcaaaaatgactttttaattcaaatataagattatactgggtcttggccaaagaaaagtttctgtcgtatatttctgtgttggtgctttcgtgctacagaggcgtagttgagtagctgcagcagagatcatatggcctgcaaagcctaaaatgttgactcctacactaggggtatgatttatcccaacagtaagaatggattcaaagagctaagagacctctcaaaattatccagaggttctttaacttatgtgacctcatctatttggaccactgataaaaacctgaaagtaagcaaaaaaggtttgatctgtggatgaaatgaatcatgattttcaagctcttgcattagaatctcggggaatgggagagcttttgcctaccaaaaagttttgggaacctgatgattcaacaaaagatggaca

SEQ ID NO: 25011 - DNA, 955 bp, Homo sapiens
  source 1..955: mol_type = unassigned DNA
gaggcagaggaagactgtctccagaattacttgggaagtaaaaatctgcgaggcttggtttgatctgtggatgaaatgaatcatgattttcaagctcttgcattagaatctcggggaatgggagagcttttgcctaccaaaaagttttgggaacctgatgattcaacaaaagatggacaaaaaggcatatttcttggggatgatgaatggagagagactgcatggggagcttctcaccattcaatgtcccagcctattatggtacagagaagatctggacagggttttcatggaaacagtgaagtaaatgcaatactgtctccgcgatcagaaagtggaggccttggtgtgagcatggtagaatatgtattaagttcttctcctgctgataaattggattctcgatttaggaagggaaattttggcactagagatgctgaaacagatggacctgagaaaggagatcaaaaaggcaaggcttctccatttgaggaggaccaaaacagagatcttaaacaaggagatgatgatgattctaaaataaatggcagaggtttgccaaatggaatggatgccgattgcaaagattttaatcgtactcctggaagtcgtcaagcctctccaactgaagtagttgagcgcttgggccccaatactaatccctcagaaggactggggcctcttcctaatcctacagctaataaaccacttgttgaagaattttcaaatcctgaaactcagaatctggatgccatggaacaagttggtctggaatccttacagtttgactatcctggtaatcaggtaccaatggactcttcaggagctactgtaggcctttttgactacaattcccagcagcagctctttcagaggactaatgcactaacagttcaacagttaactgcagctcaacagcagcaatatgcattagcagcagctcagcagccacata

SEQ ID NO: 25012 - DNA, 3404 bp, Homo sapiens
  source 1..3404: mol_type = unassigned DNA
gaggcagcgcggccgcagcagccctgtttgatctgtggatgaaatgaatcatgattttcaagctcttgcattagaatctcggggaatgggagagaccattcaatgtcccagcctattatggtacagagaagatctggacagggttttcatggaaacagtgaagtaaatgcaatactgtctccgcgatcagaaagtggaggccttggtgtgagcatggtagaatatgtattaagttcttctcctgctgataaattggattctcgatttaggaagggaaattttggcactagagatgctgaaacagatggacctgagaaaggagatcaaaaaggcaaggcttctccatttgaggaggaccaaaacagagatcttaaacaaggagatgatgatgattctaaaataaatggcagaggtttgccaaatggaatggatgccgattgcaaagattttaatcgtactcctggaagtcgtcaagcctctccaactgaagtagttgagcgcttgggccccaatactaatccctcagaaggactggggcctcttcctaatcctacagctaataaaccacttgttgaagaattttcaaatcctgaaactcagaatctggatgccatggaacaagttggtctggaatccttacagtttgactatcctggtaatcaggtaccaatggactcttcaggagctactgtaggcctttttgactacaattcccagcagcagctctttcagaggactaatgcactaacagttcaacagttaactgcagctcaacagcagcaatatgcattagcagcagctcagcagccacatatagctggtgtattctcagcaggccttgctccagctgcatttgtgccaaatccatacattattagtgctgctcctccagggaccgatccgtatactgcagcaggattggctgcagcagctacattagcaggtccagcagtggttccacctcagtattacggcgttccatggggggtgtatccagccaacttatttcagcagcaagctgcagctgcggcaaataacacagccagtcagcaagcagcatcacaagctcagcctggacagcaacaggttctccgtgctggagcaggtcagcgtcctcttactcccaatcagggtcagcaagggcagcaagcagaatcacttgcggcagctgcagcagcaaatccaacattggcttttggtcagggtcttgctactggcatgccaggctatcaagtactagctccaactgcctattatgatcagactggtgccttagtggttggccctggagcaaggactggccttggagctccagttcggttaatggctccaacacctgttttaattagttcagcagcagcacaagctgcagcagcagcagcagctggaggaactgcaagtagccttacaggcagcacaaatggtctgtttcggccaattggcactcagccaccacagcagcagcaacagcagccaagcactaatctgcaatctaattcattttatggaagcagttctttgactaatagctcccagagtagttctttattttctcatggacctggtcaacctggaagtacatctcttggctttggaagtggtaactctttgggtgctgctataggctcagccctcagtggatttggttcatcagttggcagttctgcaagtagtagtgccacaaggagagagtctctatctactagctctgacttgtacaaaagatctagtagcagcctagcacccatagggcaaccattttacaatagtctgggattttcctcctctccaagtccaataggcatgcctctgccaagccaaactccaggacattcacttacgccaccgccatcactttcatcacatggatcctcatccagtttgcatttaggaggactgacaaatggtagtggtcgatatatctctgcagcacctggagcagaagcaaaatatcgaagtgcttcaagcacttccagtctatttagctccagcagccagctctttcctccttcccggcttcggtataataggtctgatattatgccttctggccgcagtagattattggaagatttcagaaacaaccgcttcccaaaccttcagcttagagacttgattggacatatagttgagttttctcaagaccagcatggttctagattcatacagcaaaaactagagagagctactccagctgagcgacagatggtatttaatgaaattctgcaagcagcctatcaattaatgactgatgtttttggcaactatgttatacagaagttttttgagtttgggagtctggatcaaaaattagccctggctactcgtattcgtggtcatgttctacccttagccttgcagatgtatggctgccgcgttattcagaaagcattagaatctatttcttctgaccagcagagtgaaatggtaaaggagctggatggtcatgtgctcaaatgtgtgaaagatcagaatggaaaccatgttgtacaaaaatgtatcgaatgtgttcagccacagtcactacagttcatcattgatgctttcaagggacaagtatttgtgctttcaactcatccttatggctgcagagtaattcagcgcatcctagagcattgcactgcagaacagaccttacctatcttagaagaactccaccaacatacagagcagttggtacaggatcagtatggcaattatgttattcagcatgtactggaacacggtcgacctgaagacaagagcaaaattgtttccgaaatcaggggaaaggttttagccctgagtcaacacaaatttgccagcaatgtagtagaaaagtgtgttactcatgcctcccgtgctgagagagctttactgattgacgaggtttgctgccagaatgatggtcctcacagtgccttatacaccatgatgaaggaccagtatgccaattacgtggttcaaaagatgattgatatggctgaacctgctcagagaaagataatcatgcacaagattcgacctcacattactactttgcgcaaatacacatacgggaagcatatactggccaagttggaaaagtattatttgaagaatagcccggacctaggacctattggaggaccaccaaatggaatgctgtaaattacaggagcaagagaaagaagataatttaaccatgtgaaaagaatttttttgtgtgtgaattatcaaaacacaactcaactatgaatcttcaatttttttttaaagcaaaactatttattgactttattcatccatttgtaaattttttaaggttcttgtgtatatttggggggtgggggatgaattataaattatattcagccctgagtggagacctatcagattggattgctggcaaagcacagaatgcctgtatatgatgtaactgtatc

SEQ ID NO: 25013 - DNA, 1509 bp, Homo sapiens
  source 1..1509: mol_type = unassigned DNA
ataagccagagcctagaccagtgagccaactgtgcgaaccagacccggcagccttgctcagttcagcatagcggagcggatccgatcggatcggagcggatcggagcacaccggagcaggctcatcgagaaggcgtctgcgagaccatggagaacggatacacctatgaagattataagaacactgcagaatggcttctgtctcacactaagcaccgacctcaagttgcaataatctgtggttctggattaggaggtctgactgataaattaactcaggcccagatctttgactacggtgaaatccccaactttccccgaagtacagtgccaggtcatgctggccgactggtgtttgggttcctgaatggcagggcctgtgtgatgatgcagggcaggttccacatgtatgaagggtacccactctggaaggtgacattcccagtgagggttttccaccttctgggtgtggacaccctggtagtcaccaatgcagcaggagggctgaaccccaagtttgaggttggagatatcatgctgatccgtgaccatatcaacctacctggtttcagtggtcagaaccctctcagagggcccaatgatgaaaggtttggagatcgtttccctgccatgtctgatgcctacgaccggactatgaggcagagggctctcagtacctggaaacaaatgggggagcaacgtgagctacaggaaggcacctatgtgatggtggcaggccccagctttgagactgtggcagaatgtcgtgtgctgcagaagctgggagcagacgctgttggcatgagtacagtaccagaagttatcgttgcacggcactgtggacttcgagtctttggcttctcactcatcactaacaaggtcatcatggattatgaaagcctggagaaggccaaccatgaagaagtcttagcagctggcaaacaagctgcacagaaattggaacagtttgtctccattcttatggccagcattccactccctgacaaagccagttgacctgccttggagtcgtctggcatctcccacacaagacccaagtagctgctaccttctttggccccttgctggagtcatgtgcctctgtccttaggttgtagcagaaaggaaaagattcctgtccttcacctttcccactttcttctaccagacccttctggtgccagatcctcttctcaaagctgggattacaggtgtgagcatagtgagaccttggcgctacaaaataaagctgttctcattcctgttctttcttacacaagagctggagcccgtgccctaccacacatctgtggagatgcccaggatttgactcgggccttagaactttgcatagcagctgctactagctctttgagataatacattccgaggggctcagttctgccttatctaaatcaccagagaccaaacaaggactaatccaatacctcttggattttatttaatgtcataatgttgtcagaataaagagaaagatgaaataatttca

SEQ ID NO: 25014 - DNA, 557 bp, Homo sapiens
  source 1..557: mol_type = unassigned DNA
cgacccagcttcccttgtccagggagcaactcagacacagtctcgcttcatttttattctggggttgtacaatctaagggccggcccgcgtgctcgcttgccattggctggggactccagggcaagggatataagccagagcctagaccagtgagccaactgtgcgaaccagacccggcagccttgctcagttcagcatagcggagcggatccgatcggatcggagcggatcggagcacaccggagcaggctcatcgagaaggcgtctgcgagaccatggagaacggatacacctatgaagattataagaacactgcagaatggcttctgtctcacactaagcaccgacctcaagttgcaataatctgtggttctggattaggaggtctgactgataaattaactcaggcccagatctttgactacggtgaaatccccaactttccccgaagtacagtgccaggtcatgctggccgactggtgtttgggttcctgaatggcagggcctgtgtgatgatgcagggcaggttccacatgtatgaagggtacccactctg

SEQ ID NO: 25015 - DNA, 2858 bp, Homo sapiens
  source 1..2858: mol_type = unassigned DNA
acttgaggagtcgactgagagctttatctttgcccctgtgacgggtggcctgtggtttcctgccaacaactcctgtttccggaggcccaacaaggcccacgcagagccaggaggggcagtggggctgggcctgggtggccccaccagccccgccccatctatctttgggaatttatttgtccatgggcgaggctggcctgcagtctgttgccttccaggggccaagagctgctctgatcacccagggattctctctccaacccaagtgcctccagctgacctctggctcctgtcctctggctccacctgcaccgccctgctcttcctaaggggccaggaagcccccagaagctctaccatcgacgtgggtggtggcacccggctcaccctgagagcagaggccgtgcagggggctcagttctgagccccagccggcccaccatggcacggcggttccaggaggagctggccgccttcctcttcgagtatgacaccccccgcatggtgctggtgcgtaataagaaggtgggcgttatcttccgactgatccagctggtggtcctggtctacgtcatcgggtgggtgtttctctatgagaagggctaccagacctcgagcggcctcatcagcagtgtctctgtgaaactcaagggcctggccgtgacccagctccctggcctcggcccccaggtctgggatgtggctgactacgtcttcccagcccagggggacaactccttcgtggtcatgaccaatttcatcgtgaccccgaagcagactcaaggctactgcgcagagcacccagaagggggcatatgcaaggaagacagtggctgtacccctgggaaggccaagaggaaggcccaaggcatccgcacgggcaagtgtgtggccttcaacgacactgtgaagacgtgtgagatctttggctggtgccccgtggaggtggatgacgacatcccgcgccctgcccttctccgagaggccgagaacttcactcttttcatcaagaacagcatcagctttccacgcttcaaggtcaacaggcgcaacctggtggaggaggtgaatgctgcccacatgaagacctgcctctttcacaagaccctgcaccccctgtgcccagtcttccagcttggctacgtggtgcaagagtcaggccagaacttcagcaccctggctgagaagggtggagtggttggcatcaccatcgactggcactgtgacctggactggcacgtacggcactgcagacccatctatgagttccatgggctgtacgaagagaaaaatctctccccaggcttcaacttcaggtttgccaggcactttgtggagaacgggaccaactaccgtcacctcttcaaggtgtttgggattcgctttgacatcctggtggacggcaaggccgggaagtttgacatcatccctacaatgaccaccatcggctctggaattggcatctttggggtggccacagttctctgtgacctgctgctgcttcacatcctgcctaagaggcactactacaagcagaagaagttcaaatacgctgaggacatggggccaggggcggctgagcgtgacctcgcagctaccagctccaccctgggcctgcaggagaacatgaggacatcctgatgctcgggccccaactcctgactgggtgcagcgtgaggcttcagcctggagccctggtgggtcccagccagggcagaggggcctccccaggaagtctcctaccctctcagccaggcagagagcagtttgccagaagctcagggtgcatagtaggagagacctgtgcaaatctgagctccggctccgaccccacacaccctgagggagccctaccctagcctcagccgctcctggtggggaatggctggggctgggcaggaccctcccacacacctgcaccctagcttcgtgcttctctctccggactctcattatccaacccgctgcctccatttctctagatctgtgctctccgatgtggcagtcagtaaccataggtgactaaattaaactaaaataaaatagaatgaaacacaaaattcaattcctcggctgaactagccacatttcaactgctcagtagatacgtgtggttagtggctgccatactggacagctcggggcattttcactgtcaaagaaagttctattagacagccctgcttgagccctgtttcttcctggccttcggtttccctggggaacttatcgacaatgcaagctcctgggcccacccccagacctcctgaaccaaaagctccagggctggccgtatgatctgtgtggatggcaaactccccaggccattctgggacctaagtttaagaagtgccgtcctcgaactttctgactctaagctcctgagcgggagtcagacttagccctgagcctgcacttcctgttcaggtgcagacactgaacagggtctcaaacaccttcagcatgtgtgttgtgtgctcacgtgccacacagtgtctcatgcacacaacccagtgtacacaccacctacgtgcacacagcatccttccacactgtgtatgtgaacagcttgggccctgcaaacacaaccatctacacacatctacacccccaagcacacacacatggtccgtgccatgtcacctccatagggaaaggcttctctccaagtgtgccaggccaggacagccctcccagccatgaatccttactcagctacctcgggttggggtgggagccccagccaaatcctgggctccctgcctgtggctcagccccagctcccaaggcctgcctggctctgtctgaacagaaggtctgggggaagcgacgggtggagtacaataaagggaatgagg

SEQ ID NO: 25016 - DNA, 1831 bp, Homo sapiens
  source 1..1831: mol_type = unassigned DNA
ccccttctgagtgtcccctgagcactctctcagcatgaactgcatatccgacttcttcacctatgagaccaccaagtcggtggttgtgaagagctggaccatcgggatcatcaaccgagtagttcagcttctgatcatctcctactttgtagggtgggttttcttgcacgagaaggcttaccaggtacgggacacagccattgagtcctcggtggtaaccaaggtgaagggctccggactctacgccaacagagtcatggatgtgtctgattacgtgacgccacctcagggcacctcggtctttgtcatcatcaccaagatgattgttactgaaaatcagatgcaaggattctgcccagagagtgaggagaaataccgctgtgtatcagacagccagtgcgggcctgagcgcttgccaggtggggggatcctcactggccgctgcgtgaactacagctctgtgctccggacctgtgagatccagggctggtgccccacggaggtggacacagtggaaacgcccatcatgatggaagctgagaacttcactattttcatcaagaacagcatccgtttccccctcttcaactttgagaagggaaacctccttcccaacctgacagccagggacatgaagacctgccgcttccacccggacaaggaccctttctgccccatcttgcgggtaggggacgtggtcaagtttgcggggcaggattttgccaaactggcgcgcacggggggagttctgggcattaagatcggctgggtgtgcgacttggacaaggcctgggaccagtgcatccccaaatactccttcacccggctcgacagcgtttctgagaaaagcagcgtgtccccaggctacaacttcaggtttgccaagtactacaaaatggaaaatggcagtgagtaccgcaccctcctgaaggcttttggcatccgcttcgacgtgctggtatacgggaatgctggcaagttcaacatcatccccaccatcatcagctctgtggcggcctttacttctgtgggagtgggaactgttctctgtgacatcatcctgctcaacttcctcaagggggccgaccagtacaaagccaagaagtttgaggaggtgaatgagactacgctgaaaatcgcggctttgaccaacccagtgtaccccagcgaccagaccacagcggagaagcagtccaccgattcgggggccttctccataggccactagggcctctttccagggccccacactcacaaaggctccaggcctccccacagaggaccctgcctgagcaaggggcatgggagggaagaggggctctcatttctgctgctcattccatgagcatagctgggacccaagtgtctgggcctccgactgctccagcagacaggcagtgctccctgctgagaccccaatctcaccttcactccttgcctggccccatctgcttcctaggacccctggggcaggagcacctgagccatccccttcccaaagagtagagattataatgtaggacagatggccacaagggcctaccaagtgccaggcactttcacacacgttatctcatttaatccttagaataatcctatgaggtagatattagtttcccttgttttgaagataaaccaaggctcagagagactgagtcatttgccccaggccagatagccaggatgtgagagagctgggatttgaacgtccgtctgactaactccatcgcccacaccccatgagagaagaatgaactcccagggtccatcagccctgctgcttcagccgcctccaccctgacggtgattcggttaataaagagtaagcccc

SEQ ID NO: 25017 - DNA, 1346 bp, Homo sapiens
  source 1..1346: mol_type = unassigned DNA
cctgtcctgtaggacctccctctcctgaggccaccactgggcccccttctgagtgtcccctgagcactctctcagcatgaactgcatatccgacttcttcacctatgagaccaccaagtcggtggttgtgaagagctggaccatcgggatcatcaaccgagtagttcagcttctgatcatctcctactttgtagggtgggttttcttgcacgagaaggcttaccaggtacgggacacagccattgagtcctcggtggtaaccaaggtgaagggctccggactctacgccaacagagtcatggatgtgtctgattacgtgacgccacctcagggcacctcggtctttgtcatcatcaccaagatgattgttactgaaaatcagatgcaaggattctgcccagagagtgaggagaaataccgctgtgtatcagacagccagtgcgggcctgagcgcttgccaggtggggggatcctcactggccgctgcgtgaactacagctctgtgctccggacctgtgagatccagggctggtgccccacggaggtggacacagtggaaacgcccatcatgatggaagctgagaacttcactattttcatcaagaacagcatccgtttccccctcttcaactttgagaagggaaacctccttcccaacctgacagccagggacatgaagacctgccgcttccacccggacaaggaccctttctgccccatcttgcgggtaggggacgtggtcaagtttgcggggcaggattttgccaaactggcgcgcacggggggagttctgggcattaagatcggctgggtgtgcgacttggacaaggcctgggaccagtgcatccccaaatactccttcacccggctcgacagcgtttctgagaaaagcagcgtgtccccaggctacaacttcaggtttgccaagtactacaaaatggaaaatggcagtgagtaccgcaccctcctgaaggcttttggcatccgcttcgacgtgctgtatacgggagctggcaagttcaacatcatccccaccatcatcagctctgtggcggcctttacttctgtgggagtgggaactgttctctgtgacatcatcctgctcaacttcctcaagggggccgaccagtacaaagccaagaagtttgaggaggtgaatgagactacgctgaaaatcgcggctttgaccaacccagtgtaccccagcgaccagaccacagcggagaagcagtccaccgattcgggggccttctccataggccactagggcctctttccagggccccacactcacaaaggctccaggcctccccacagaggaccctgcctgagcaaggggcatggga

SEQ ID NO: 25018 - DNA, 2032 bp, Homo sapiens
  source 1..2032: mol_type = unassigned DNA
ccgcaagtgctgggatgacaggtgtgagccaccgcccccggcccctcgcccgccttttgaaggagcctttcgtcctcaagggcgaggccactccccccccgcgagttccatgccccctagagggtcatcgttcccgacggggaggtggcgccctcccccgggccccgggccccgaccgcccgtgctgcctccttccgggccctcctccgcgatgacggcgccgccagcaggccaggcggactgggcggggctccgagcggggactgggacccagaccgactaggggactgggagcgggcggcgcggccatggcgggctgctgcgccgcgctggcggccttcctgttcgagtacgacacgccgcgcatcgtgctcatccgcagccgcaaagtggggctcatgaaccgcgccgtgcaactgctcatcctggcctacgtcatcgggtgggtgtttgtgtgggaaaagggctaccaggaaactgactccgtggtcagctccgttacgaccaaggtcaagggcgtggctgtgaccaacacttctaaacttggattccggatctgggatgtggcggattatgtgataccagctcaggaggaaaactccctcttcgtcatgaccaacgtgatcctcaccatgaaccagacacagggcctgtgccccgagattccagatgcgaccactgtgtgtaaatcagatgccagctgtactgccggctctgccggcacccacagcaacggagtctcaacaggcaggtgcgtagctttcaacgggtctgtcaagacgtgtgaggtggcggcctggtgcccggtggaggatgacacacacgtgccacaacctgcttttttaaaggctgcagaaaacttcactcttttggttaagaacaacatctggtatcccaaatttaatttcagcaagaggaatatccttcccaacatcaccactacttacctcaagtcgtgcatttatgatgctaaaacagatcccttctgccccatattccgtcttggcaaaatagtggagaacgcaggacacagtttccaggacatggccgtggagggaggcatcatgggcatccaggtcaactgggactgcaacctggacagagccgcctccctctgcttgcccaggtactccttccgccgcctcgatacacgggacgttgagcacaacgtatctcctggctacaatttcaggtttgccaagtactacagagacctggctggcaacgagcagcgcacgctcatcaaggcctatggcatccgcttcgacatcattgtgtttgggaaggcagggaaatttgacatcatccccactatgatcaacatcggctctggcctggcactgctaggcatggcgaccgtgctgtgtgacatcatagtcctctactgcatgaagaaaagactctactatcgggagaagaaatataaatatgtggaagattacgagcagggtcttgctagtgagctggaccagtgaggcctaccccacacctgggctctccacagccccatcaaagaacagagaggaggaggagggagaaatggccaccacatcaccccagagaaatttctggaatctgattgagtctccactccacaagcactcagggttccccagcagctcctgtgtgttgtgtgcaggatctgtttgcccactcggcccaggaggtcagcagtctgttcttggctgggtcaactctgcttttcccgcaacctggggttgtcgggggagcgctggcccgacgcagtggcactgctgtggctttcagggctggagctggctttgctcagaagcctcctgtctccagctctctccaggacaggcccagtcctctgaggcacggcggctctgttcaagcactttatgcggcaggggaggccgcctggctgcagtcactagacttgtagcaggcctgggctgcaggcttccccccgaccattccctgcagccatgcggcagagctggcatttctcctcagagaagcgctgtgctaaggtgatcgaggaccagacattaaagcgtgattttcttaa

SEQ ID NO: 25019 - DNA, 1836 bp, Homo sapiens
  source 1..1836: mol_type = unassigned DNA
gcgatgacggcgccgccagcaggccaggcggactgggcggggctccgagcggggactgggacccagaccgactaggggactgggagcgggcggcgcggccatggcgggctgctgcgccgcgctggcggccttcctgttcgagtacgacacgccgcgcatcgtgctcatccgcagccgcaaagtggggctcatgaaccgcgccgtgcaactgctcatcctggcctacgtcatcgggtgctaccatccccatttggcagaagtggaaatggagtcccctagaaggtgggtgtttgtgtgggaaaagggctaccaggaaactgactccgtggtcagctccgttacgaccaaggtcaagggcgtggctgtgaccaacacttctaaacttggattccggatctgggatgtggcggattatgtgataccagctcaggaggaaaactccctcttcgtcatgaccaacgtgatcctcaccatgaaccagacacagggcctgtgccccgagattccagatgcgaccactgtgtgtaaatcagatgccagctgtactgccggctctgccggcacccacagcaacggagtctcaacaggcaggtgcgtagctttcaacgggtctgtcaagacgtgtgaggtggcggcctggtgcccggtggaggatgacacacacgtgccacaacctgcttttttaaaggctgcagaaaacttcactcttttggttaagaacaacatctggtatcccaaatttaatttcagcaagaggaatatccttcccaacatcaccactacttacctcaagtcgtgcatttatgatgctaaaacagatcccttctgccccatattccgtcttggcaaaatagtggagaacgcaggacacagtttccaggacatggccgtggagggaggcatcatgggcatccaggtcaactgggactgcaacctggacagagccgcctccctctgcttgcccaggtactccttccgccgcctcgatacacgggacgttgagcacaacgtatctcctggctacaatttcaggtttgccaagtactacagagacctggctggcaacgagcagcgcacgctcatcaaggcctatggcatccgcttcgacatcattgtgtttgggaaggcagggaaatttgacatcatccccactatgatcaacatcggctctggcctggcactgctaggcatggcgaccgtgctgtgtgacatcatagtcctctactgcatgaagaaaagactctactatcgggagaagaaatataaatatgtggaagattacgagcagggtcttgctagtgagctggaccagtgaggcctaccccacacctgggctctccacagccccatcaaagaacagagaggaggaggagggagaaatggccaccacatcaccccagagaaatttctggaatctgattgagtctccactccacaagcactcagggttccccagcagctcctgtgtgttgtgtgcaggatctgtttgcccactcggcccaggaggtcagcagtctgttcttggctgggtcaactctgcttttcccgcaacctggggttgtcgggggagcgctggcccgacgcagtggcactgctgtggctttcagggctggagctggctttgctcagaagcctcctgtctccagctctctccaggacaggcccagtcctctgaggcacggcggctctgttcaagcactttatgcggcaggggaggccgcctggctgcagtcactagacttgtagcaggcctgggctgcaggcttccccccgaccattccctgcagccatgcggcagagctggcatttctcctcagagaagcgctgtgctaaggt

SEQ ID NO: 25020 - DNA, 986 bp, Homo sapiens
  source 1..986: mol_type = unassigned DNA
agaccgactaggggactgggagcgggcggcgcggccatggcgggctgctgcgccgcgctggcggccttcctgttcgagtacgacacgccgcgcatcgtgctcatccgcagccgcaaagtggggctcatgaaccgcgccgtgcaactgctcatcctggcctacgtcatcgggtgggtgtttgtgtgggaaaagggctaccaggaaactgactccgtggtcagctccgttacgaccaaggtcaagggcgtggctgtgaccaacacttctaaacttggattccggatctgggatgtggcggattatgtgataccagctcaggaggaaaactccctcttcgtcatgaccaacgtgatcctcaccatgaaccagacacagggcctgtgccccgagattccagatgcgaccactgtgtgtaaatcagatgccagctgtactgccggctctgccggcacccacagcaacgacctgcttttttaaaggctgcagaaaacttcactcttttggttaagaacaacatctggtatcccaaatttaatttcagcaagaggaatatccttcccaacatcaccactacttacctcaagtcgtgcatttatgatgctaaaacagatcccttctgccccatattccgtcttggcaaaatagtggagaacgcaggacacagtttccaggacatggccgtggagggaggcatcatgggcatccaggtcaactgggactgcaacctggacagagccgcctccctctgcttgcccaggtactccttccgccgcctcgatacacgggacgttgagcacaacgtatctcctggctacaatttcaggtttgccaagtactacagagacctggctggcaacgagcagcgcacgctcatcaaggcctatggcatccgcttcgacatcattgtgtttgggaaggcagggaaatttgacatcatccccactatgatcaacatcggctctggcctggcactgctaggcatggtg

SEQ ID NO: 25021 - DNA, 1084 bp, Homo sapiens
  source 1..1084: mol_type = unassigned DNA
atggcgggctgctgcgccgcgctggcggccttcctgttcgagtacgacacgccgcgcatcgtgctcatccgcagccgcaaagtggggctcatgaaccgcgccgtgcaactgctcatcctggcctacgtcatcgggtgggtgtttgtgtgggaaaagggctaccaggaaactgactccgtggtcagctccgttacgaccaaggtcaagggcgtggctgtgaccaacacttctaaacttggattccggatctgggatgtggcggattatgtgataccagctcaggaggaaaactccctcttcgtcatgaccaacgtgatcctcaccatgaaccagacacagggcctgtgccccgagattccagatgcgaccactgtgtgtaaatcagatgccagctgtactgccggctctgccggcacccacagcaacggagtctcaacaggcagacctgcttttttaaaggctgcagaaaacttcactcttttggttaagaacaacatctggtatcccaaatttaatttcagcaagaggaatatccttcccaacatcaccactacttacctcaagtcgtgcatttatgatgctaaaacagatcccttctgccccatattccgtcttggcaaaatagtggagaacgcaggacacagtttccaggacatggccgtggagggaggcatcatgggcatccaggtcaactgggactgcaacctggacagagccgcctccctctgcttgcccaggtactccttccgccgcctcgatacacgggacgttgagcacaacgtatctcctggctacaatttcaggtttgccaagtactacagagacctggctggcaacgagcagcgcacgctcatcaaggcctatggcatccgcttcgacatcattgtgtttgggaaggcagggaaatttgacatcatccccactatgatcaacatcggctctggcctggcactgctaggcatggcgaccgtgctgtgtgacatcatagtcctctactgcatgaagaaaagactctactatcgggagaagaaatataaatatgtggaagattacgagcagggtcttgctagtgagctggaccagt

SEQ ID NO: 25022 - DNA, 1612 bp, Homo sapiens
  source 1..1612: mol_type = unassigned DNA
agaccgactaggggactgggagcgggcggcgcggccatggcgggctgctgcgccgcgctggcggccttcctgttcgagtacgacacgccgcgcatcgtgctcatccgcagccgcaaagtggggctcatgaaccgcgccgtgcaactgctcatcctggcctacgtcatcgggaggaaaactccctcttcgtcatgaccaacgtgatcctcaccatgaaccagacacagggcctgtgccccgagattccagatgcgaccactgtgtgtaaatcagatgccagctgtactgccggctctgccggcacccacagcaacggagtctcaacaggcaggtgcgtagctttcaacgggtctgtcaagacgtgtgaggtggcggcctggtgcccggtggaggatgacacacacgtgccacaacctgcttttttaaaggctgcagaaaacttcactcttttggttaagaacaacatctggtatcccaaatttaatttcagcaagaggaatatccttcccaacatcaccactacttacctcaagtcgtgcatttatgatgctaaaacagatcccttctgccccatattccgtcttggcaaaatagtggagaacgcaggacacagtttccaggacatggccgtggagggaggcatcatgggcatccaggtcaactgggactgcaacctggacagagccgcctccctctgcttgcccaggtactccttccgccgcctcgatacacgggacgttgagcacaacgtatctcctggctacaatttcaggtttgccaagtactacagagacctggctggcaacgagcagcgcacgctcatcaaggcctatggcatccgcttcgacatcattgtgtttgggaaggcagggaaatttgacatcatccccactatgatcaacatcggctctggcctggcactgctaggcatggcgaccgtgctgtgtgacatcatagtcctctactgcatgaagaaaagactctactatcgggagaagaaatataaatatgtggaagattacgagcagggtcttgctagtgagctggaccagtgaggcctaccccacacctgggctctccacagccccatcaaagaacagagaggaggaggagggagaaatggccaccacatcaccccagagaaatttctggaatctgattgagtctccactccacaagcactcagggttccccagcagctcctgtgtgttgtgtgcaggatctgtttgcccactcggcccaggaggtcagcagtctgttcttggctgggtcaactctgcttttcccgcaacctggggttgtcgggggagcgctggcccgacgcagtggcactgctgtggctttcagggctggagctggctttgctcagaagcctcctgtctccagctctctccaggacaggcccagtcctctgaggcacggcggctctgttcaagcactttatgcggcaggggaggccgcctggctgcagtcactagacttgtagcaggcctgggctgcaggcttccccccgaccattccctgcagccatgcggcagagctggcatttctcctcagagaagcgctgtgctaaggtgatcgaggaccagacattaaagcgtgattttcttaa

SEQ ID NO: 25023 - DNA, 2983 bp, Homo sapiens
  source 1..2983: mol_type = unassigned DNA
gagctctggtccagctccgcgcagggagggaggctgtcaccatgccggcctgctgcagctgcagtgatgttttccagtatgagacgaacaaagtcactcggatccagagcatgaattatggcaccattaagtggttcttccacgtgatcatcttttcctacgtttgctttgctctggtgagtgacaagctgtaccagcggaaagagcctgtcatcagttctgtgcacaccaaggtgaaggggatagcagaggtgaaagaggagatcgtggagaatggagtgaagaagttggtgcacagtgtctttgacaccgcagactacaccttccctttgcaggggaactctttcttcgtgatgacaaactttctcaaaacagaaggccaagagcagcggttgtgtcccgagtatcccacccgcaggacgctctgttcctctgaccgaggttgtaaaaagggatggatggacccgcagagcaaaggcctgctctcttgaacagtgccgaaaacttcactgtgctcatcaagaacaatatcgacttccccggccacaactacaccacgagaaacatcctgccaggtttaaacatcacttgtaccttccacaagactcagaatccacagtgtcccattttccgactaggagacatcttccgagaaacaggcgataatttttcagatgtggcaattcagggcggaataatgggcattgagatctactgggactgcaacctagaccgttggttccatcactgccgtcccaaatacagtttccgtcgccttgacgacaagaccaccaacgtgtccttgtaccctggctacaacttcagatacgccaagtactacaaggaaaacaatgttgagaaacggactctgataaaagtcttcgggatccgttttgacatcctggtttttggcaccggaggaaaatttgacattatccagctggttgtgtacatcggctcaaccctctcctacttcggtctggccgctgtgttcatcgacttcctcatcgacacttactccagtaactgctgtcgctcccatatttatccctggtgcaagtgctgtcagccctgtgtggtcaacgaatactactacaggaagaagtgcgagtccattgtggagccaaagccgacattaaagtatgtgtcctttgtggatgaatcccacattaggatggtgaaccagcagctactagggagaagtctgcaagatgtcaagggccaagaagtcccaagacctgcgatggacttcacagatttgtccaggctgcccctggccctccatgacacacccccgattcctggacaaccagaggagatacagctgcttagaaaggaggcgactcctagatccagggatagccccgtctggtgccagtgtggaagctgcctcccatctcaactccctgagagccacaggtgcctggaggagctgtgctgccggaaaaagccgggggcctgcatcaccacctcagagctgttcaggaagctggtcctgtccagacacgtcctgcagttcctcctgctctaccaggagcccttgctggcgctggatgtggattccaccaacagccggctgcggcactgtgcctacaggtgctacgccacctggcgcttcggctcccaggacatggctgactttgccaacctgcccagctgctgccgctggaggatccggaaagagtttccgaagagtgaagggcagtacagtggcttcaagagtccttactgaagccaggcaccgtggctcacgtctgtaatcccagcgctttgggaggccgaggcaggcagatcacctgaggtcgggagttggagacccgcctggctaacaaggcgaaatcctgtctgtactaaaaatacaaaaatcagccagacatggtggcatgcacctgcaatcccagctactcgggaggctgaggcacaagaatcacttgaacccgggaggcagaggttgtagtgagcccagattgtgccactgctctccagcctgggaggcacagcaaactgtcccccaaaaaaaaaaaagagtccttaccaatagcaggggctgcagtagccatgttaacatgacatttaccagcaacttgaacttcacctgcaaagctctgtggccacattttcagccaaagggaaatatgctttcatcttctgttgctctctgtgtctgagagcaaagtgacctggttaaacaaaccagaatccctctacatggactcagagaaaagagattgagatgtaagtctcaactctgtccccaggaagttgtgtgaccctaggcctctcacctctgtgcctctgtctccttgttgcccaactactatctcagagatattgtgaggacaaattgagacagtgcacatgaactgtcttttaatgtgtaaagatctacatgaatgcaaaacatttcattatgaggtcagactaggataatgtccaactaaaaacaaacccttttcatcctggctggagaatgtggagaactaaaggtggccacaaattctttgacactcaagtcccccaagacctaagggttttatctcctccccttgaatatgggtggctctgattgctttatccaaaagtggaagtgacattgtgtcagtttcagatcctgatcttaagaggctgacagcttctacttgctgtcccttggaactcttgctatcggggaagccagacgccatttaaaagtctgcctatcctggccaggtgtggtggctcacacctgtaatcccagcactttgggagaccaaggcgggcggatcacttaaagtcaggagtccaagaccagactcgccaacatggtgaaaccgtatctctaataaaaatacaaaaattagctgggcatggtgcgggcacctgtagtcctagctatcaagaggctgagacaggagaaacacttgaacctgggaggtggaggttgcattgagctgagatcgtgccactgcactccaggctgggtgacagagcgagactccatctc

SEQ ID NO: 25024 - DNA, 924 bp, Homo sapiens
  source 1..924: mol_type = unassigned DNA
gtttcattttgcagttactgggagggggcttgctgtggccctgtcaggaagagtagagctctggtccagctccgcgcagggagggaggctgtcaccatgccggcctgctgcagctgcagtgatgttttccagtatgagacgaacaaagtcactcggatccagagcatgaattatggcaccattaagtggttcttccacgtgatcatcttttcctacgtttgctttgctctggtgagtgacaagctgtaccagcggaaagagcctgtcatcagttctgtgcacaccaaggtgaaggggatagcagaggtgaaagaggagatcgtggagaatggagtgaagaagttggtgcacagtgtctttgacaccgcagactacaccttccctttgcaggggaactctttcttcgtgatgacaaactttctcaaaacagaaggccaagagcagcggttgtgtcccgagtatcccacccgcaggacgctctgttcctctgaccgaggttgtaaaaagggatggatggacccgcagagcaaaggaattcagaccggaaggtgtgtagtgtatgaagggaaccagaagacctgtgaagtctctgcctggtgccccatcgaggcagtggaagaggccccccggcctgctctcttgaacagtgccgaaaacttcactgtgctcatcaagaacaatatcgacttccccggccacaactacaccacatacgccaagtactacaaggaaaacaatgttgagaaacggactctgataaaagtcttcgggatccgttttgacatcctggtttttggcaccggaggaaaatttgacattatccagctggttgtgtacatcggctcaaccctctcctacttcggtctggtaagagattctcttttccatgctttaggaaaatggtttggagaaggaagtgactaa

SEQ ID NO: 25025 - DNA, 1927 bp, Homo sapiens
  source 1..1927: mol_type = unassigned DNA
atgccggcctgctgcagctgcagtgatgttttccagtatgagacgaacaaagtcactcggatccagagcatgaattatggcaccattaagtggttcttccacgtgatcatcttttcctacgtttgctttgctctggtgagtgacaagctgtaccagcggaaagagcctgtcatcagttctgtgcacaccaaggtgaaggggatagcagaggtgaaagaggagatcgtggagaatggagtgaagaagttggtgcacagtgtctttgacaccgcagactacaccttccctttgcagctttttagacgcacagccaccaagccagcaaggtctgccgagattcagaaggacagagaactttctaccaaagagcaccagcccttctagattgtgtagcatttcatcaacaaaaatgactccaggagaccattcttgggggaactctttcttcgtgatgacaaactttctcaaaacagaaggccaagagcagcggttgtgtcccgagtatcccacccgcaggacgctctgttcctctgaccgaggttgtaaaaagggatggatggacccgcagagcaaaggaattcagaccggaaggtgtgtagtgtatgaagggaaccagaagacctgtgaagtctctgcctggtgccccatcgaggcagtggaagaggccccccggcctgctctcttgaacagtgccgaaaacttcactgtgctcatcaagaacaatatcgacttccccggccacaactacaccacgagaaacatcctgccaggtttaaacatcacttgtaccttccacaagactcagaatccacagtgtcccattttccgactaggagacatcttccgagaaacaggcgataatttttcagatgtggcaattcagggcggaataatgggcattgagatctactgggactgcaacctagaccgttggttccatcactgccgtcccaaatacagtttccgtcgccttgacgacaagaccaccaacgtgtccttgtaccctggctacaacttcagatacgccaagtactacaaggaaaacaatgttgagaaacggactctgataaaagtcttcgggatccgttttgacatcctggtttttggcaccggaggaaaatttgacattatccagctggttgtgtacatcggctcaaccctctcctacttcggtctggccgctgtgttcatcgacttcctcatcgacacttactccagtaactgctgtcgctcccatatttatccctggtgcaagtgctgtcagccctgtgtggtcaacgaatactactacaggaagaagtgcgagtccattgtggagccaaagccgacattaaagtatgtgtcctttgtggatgaatcccacattaggatggtgaaccagcagctactagggagaagtctgcaagatgtcaagggccaagaagtcccaagacctgcgatggacttcacagatttgtccaggctgcccctggccctccatgacacacccccgattcctggacaaccagaggagatacagctgcttagaaaggaggcgactcctagatccagggatagccccgtctggtgccagtgtggaagctgcctcccatctcaactccctgagagccacaggtgcctggaggagctgtgctgccggaaaaagccgggggcctgcatcaccacctcagagctgttcaggaagctggtcctgtccagacacgtcctgcagttcctcctgctctaccaggagcccttgctggcgctggatgtggattccaccaacagccggctgcggcactgtgcctacaggtgctacgccacctggcgcttcggctcccaggacatggctgactttgccaacctgcccagctgctgccgctggaggatccggaaagagtttccgaagagtgaagggcagtacagtggcttcaagagtccttactga

SEQ ID NO: 25026 - DNA, 1578 bp, Homo sapiens
  source 1..1578: mol_type = unassigned DNA
atgccggcctgctgcagctgcagtgatgttttccagtatgagacgaacaaagtcactcggatccagagcatgaattatggcaccattaagtggttcttccacgtgatcatcttttcctacgtttgctttgctctggtgagtgacaagctgtaccagcggaaagagcctgtcatcagttctgtgcacaccaaggtgaaggggatagcagaggtgaaagaggagatcgtggagaatggagtgaagaagttggtgcacagtgtctttgacaccgcagactacaccttccctttgcaggggaactctttcttcgtgatgacaaactttctcaaaacagaaggccaagagcagcggttgtgtcccgaggaattcagaccggaaggtgtgtagtgtatgaagggaaccagaagacctgtgaagtctctgcctggtgccccatcgaggcagtggaagaggccccccggcctgctctcttgaacagtgccgaaaacttcactgtgctcatcaagaacaatatcgacttccccggccacaactacaccacgagaaacatcctgccaggtttaaacatcacttgtaccttccacaagactcagaatccacagtgtcccattttccgactaggagacatcttccgagaaacaggcgataatttttcagatgtggcaattcagatacgccaagtactacaaggaaaacaatgttgagaaacggactctgataaaagtcttcgggatccgttttgacatcctggtttttggcaccggaggaaaatttgacattatccagctggttgtgtacatcggctcaaccctctcctacttcggtctggccgctgtgttcatcgacttcctcatcgacacttactccagtaactgctgtcgctcccatatttatccctggtgcaagtgctgtcagccctgtgtggtcaacgaatactactacaggaagaagtgcgagtccattgtggagccaaagccgacattaaagtatgtgtcctttgtggatgaatcccacattaggatggtgaaccagcagctactagggagaagtctgcaagatgtcaagggccaagaagtcccaagacctgcgatggacttcacagatttgtccaggctgcccctggccctccatgacacacccccgattcctggacaaccagaggagatacagctgcttagaaaggaggcgactcctagatccagggatagccccgtctggtgccagtgtggaagctgcctcccatctcaactccctgagagccacaggtgcctggaggagctgtgctgccggaaaaagccgggggcctgcatcaccacctcagagctgttcaggaagctggtcctgtccagacacgtcctgcagttcctcctgctctaccaggagcccttgctggcgctggatgtggattccaccaacagccggctgcggcactgtgcctacaggtgctacgccacctggcgcttcggctcccaggacatggctgactttgccaacctgcccagctgctgccgctggaggatccggaaagagtttccgaagagtgaagggcagtacagtggcttcaagagtccttactga

SEQ ID NO: 25027 - DNA, 1578 bp, Homo sapiens; identical to SEQ ID NO: 25026
  source 1..1578: mol_type = unassigned DNA

SEQ ID NO: 25028 - DNA, 1799 bp, Homo sapiens
  source 1..1799: mol_type = unassigned DNA
atgccggcctgctgcagctgcagtgatgttttccagtatgagacgaacaaagtcactcggatccagagcatgaattatggcaccattaagtggttcttccacgtgatcatcttttcctacgtttgctttgctctggtgagtgacaagctgtaccagcggaaagagcctgtcatcagttctgtgcacaccaaggtgaaggggatagcagaggtgaaagaggagatcgtggagaatggagtgaagaagttggtgcacagtgtctttgacaccgcagactacaccttccctttgcaggggaactctttcttcgtgatgacaaactttctcaaaacagaaggccaagagcagcggttgtgtcccgaggaattcagaccggaaggtgtgtagtgtatgaagggaaccagaagacctgtgaagtctctgcctggtgccccatcgaggcagtggaagaggccccccggcctgctctcttgaacagtgccgaaaacttcactgtgctcatcaagaacaatatcgacttccccggccacaactacaccacgagaaacatcctgccaggtttaaacatcacttgtaccttccacaagactcagaatccacagtgtcccattttccgactaggagacatcttccgagaaacaggcgataatttttcagatgtggcaattcagggcggaataatgggcattgagatctactgggactgcaacctagaccgttggttccatcactgccgtcccaaatacagtttccgtcgccttgacgacaagaccaccaacgtgtccttgtaccctggctacaacttcagatacgccaagtactacaaggaaaacaatgttgagaaacggactctgataaaagtcttcgggatccgttttgacatcctggtttttggcaccggaggaaaatttgacattatccagctggttgtgtacatcggctcaaccctctcctacttcggtctggtaagagattctcttttccatgctttaggaaaatggtttggagaaggaagtgactaacgcagcgcttgtctgcattctccccaggccgctgtgttcatcgacttcctcatcgacacttactccagtaactgctgtcgctcccatatttatccctggtgcaagtgctgtcagccctgtgtggtcaacgaatactactacaggaagaagtgcgagtccattgtggagccaaagccgacattaaagtatgtgtcctttgtggatgaatcccacattaggatggtgaaccagcagctactagggagaagtctgcaagatgtcaagggccaagaagtcccaagacctgcgatggacttcacagatttgtccaggctgcccctggccctccatgacacacccccgattcctggacaaccagaggagatacagctgcttagaaaggaggcgactcctagatccagggatagccccgtctggtgccagtgtggaagctgcctcccatctcaactccctgagagccacaggtgcctggaggagctgtgctgccggaaaaagccgggggcctgcatcaccacctcagagctgttcaggaagctggtcctgtccagacacgtcctgcagttcctcctgctctaccaggagcccttgctggcgctggatgtggattccaccaacagccggctgcggcactgtgcctacaggtgctacgccacctggcgcttcggctcccaggacatggctgactttgccaacctgcccagctgctgccgctggaggatccggaaagagtttccgaagagtgaagggcagtacagtggcttcaagagtccttactga

SEQ ID NO: 25029 - DNA, 2664 bp, Homo sapiens
  source 1..2664: mol_type = unassigned DNA
gtcattggaggagcttgaagttaaagactcctgctaaaaaccagtacgtttcattttgcagttactgggagggggcttgctgtggccctgtcaggaagagtagagctctggtccagctccgcgcagggagggaggctgtcaccatgccggcctgctgcagctgcagtgatgttttccagtatgagacgaacaaagtcactcggatccagagcatgaattatggcaccattaagtggttcttccacgtgatcatcttttcctacgtttgctttgctctggtgagtgacaagctgtaccagcggaaagagcctgtcatcagttctgtgcacaccaaggtgaaggggatagcagaggtgaaagaggagatcgtggagaatggagtgaagaagttggtgcacagtgtctttgacaccgcagactacaccttccctttgcaggggaactctttcttcgtgatgacaaactttctcaaaacagaaggccaagagcagcggttgtgtcccgagtatcccacccgcaggacgctctgttcctctgaccgaggttgtaaaaagggatggatggacccgcagagcaaaggaattcagaccggaaggtgtgtagtgtatgaagggaaccagaagacctgtgaagtctctgcctggtgccccatcgaggcagtggaagaggccccccggcctgctctcttgaacagtgccgaaaacttcactgtgctcatcaagaacaatatcgacttccccggccacaactacaccacgagaaacatcctgccaggtttaaacatcacttgtaccttccacaagactcagaatccacagtgtcccattttccgactaggagacatcttccgagaaacaggcgataatttttcagatgtggcaattcagggcggaataatgggcattgagatctactgggactgcaacctagaccgttggttccatcactgccgtcccaaatacagtttccgtcgccttgacgacaagaccaccaacgtgtccttgtaccctggctacaacttcagatacgccaagtactacaaggaaaacaatgttgagaaacggactctgataaaagtcttcgggatccgttttgacatcctggtttttggcaccggaggaaaatttgacattatccagctggttgtgtacatcggctcaaccctctcctacttcggtctggccgctgtgttcatcgacttcctcatcgacacttactccagtaactgctgtcgctcccatatttatccctggtgcaagtgctgtcagccctgtgtggtcaacgaatactactacaggaagaagtgcgagtccattgtggagccaaagccgacattaaagtatgtgtcctttgtggatgaatcccacattaggatggtgaaccagcagctactagggagaagtctgcaagatgtcaagggccaagaagtcccaagacctgcgatggacttcacagatttgtccaggctgcccctggccctccatgacacacccccgattcctggacaaccagaggagatacagctgcttagaaaggaggcgactcctagatccagggatagccccgtctggtgccagtgtggaagctgcctcccatctcaactccctgagagccacaggtgcctggaggagctgtgctgccggaaaaagccgggggcctgcatcaccacctcagagctgttcaggaagctggtcctgtccagacacgtcctgcagttcctcctgctctaccaggagcccttgctggcgctggatgtggattccaccaacagccggctgcggcactgtgcctacaggtgctacgccacctggcgcttcggctcccaggacatggctgactttgccaacctgcccagctgctgccgctggaggatccggaaagagtttccgaagagtgaagggcagtacagtggcttcaagagtccttactgaagccaggcaccgtggctcacgtctgtaatcccagcgctttgggaggccgaggcaggcagatcacctgaggtcgggagttggagacccgcctggctaacaaggcgaaatcctgtctgtactaaaaatacaaaaatcagccagacatggtggcatgcacctgcaatcccagctactcgggaggctgaggcacaagaatcacttgaacccgggaggcagaggttgtagtgagcccagattgtgccactgctctccagcctgggaggcacagcaaactgtcccccaaaaaaaaaaaagagtccttaccaatagcaggggctgcagtagccatgttaacatgacatttaccagcaacttgaacttcacctgcaaagctctgtggccacattttcagccaaagggaaatatgctttcatcttctgttgctctctgtgtctgagagcaaagtgacctggttaaacaaaccagaatccctctacatggactcagagaaaagagattgagatgtaagtctcaactctgtccccaggaagttgtgtgaccctaggcctctcacctctgtgcctctgtctccttgttgcccaactactatctcagagatattgtgaggacaaattgagacagtgcacatgaactgtcttttaatgtgtaaagatctacatgaatgcaaaacatttcattatgaggtcagactaggataatgtccaactaaaaacaaacccttttcatcctggct

SEQ ID NO: 25030 - DNA, 3106 bp, Homo sapiens
  source 1..3106: mol_type = unassigned DNA
tcggcggagacctgctccccagaagacgcctcctgcttcccactgcgccctggaggacgcgggctggctgctgggcgagctcggcggaggcacgcccctcgcctccccgcggagtgcggactcgccccggtgcccaaactccgcccaccctctagggagctccgctctcccgcctaaccccggcactccggacagagctgggcctggggaaggggttcctgaactacgcggacgccgaacgggacgcgctgcagaagcgcacgagtctgcggccacgcgcgctccgatggctgccaggagctgagctcagggtgggcggaggaagcggttagacgccccgaaactgagctgcacgtttctaaggtagggaggaggaagatgcccccaattaagttgatctttgagccaaggaggctggggagcagcctccccaagctagagccctgcagagcgagtttcccttgacctcgctgcgcctctggcgcgctctgcagcgcggacccgcggcccctcgggaaagcgcagtcggaaagttatccgcggcggttccctgcgcgccctgttgtgtaagctcggcgttgccagcggacggagaagttgctggcttgcccgatagcccagttcggtggcggcccggggcggatttcatggcccgcggcgaacgcggggccagagctggcgtgggcgagcccctgcgcgccccctcccgcggggatccagttcgcctgctcccttccgctcgctggcttttccgatgcttgctgcgcccctggccgccgctgccctctcgccgcctcctacccctcggagccgccgcctaagtcgaggaggagagaatgaccgaggtgctgtggccggctgtccccaacgggacggacgctgccttcctggccggtccgggttcgtcctgggggaacagcacggtcgcctccactgccgccgtctcctcgtcgttcaaatgcgccttgaccaagacgggcttccagttttactacctgccggctgtctacatcttggtattcatcatcggcttcctgggcaacagcgtggccatctggatgttcgtcttccacatgaagccctggagcggcatctccgtgtacatgttcaatttggctctggccgacttcttgtacgtgctgactctgccagccctgatcttctactacttcaataaaacagactggatcttcggggatgccatgtgtaaactgcagaggttcatctttcatgtgaacctctatggcagcatcttgtttctgacatgcatcagtgcccaccggtacagcggtgtggtgtaccccctcaagtccctgggccggctcaaaaagaagaatgcgatctgtatcagcgtgctggtgtggctcattgtggtggtggcgatctcccccatcctcttctactcaggtaccggggtccgcaaaaacaaaaccatcacctgttacgacaccacctcagacgagtacctgcgaagttatttcatctacagcatgtgcacgaccgtggccatgttctgtgtccccttggtgctgattctgggctgttacggattaattgtgagagctttgatttacaaagatctggacaactctcctctgaggagaaaatcgatttacctggtaatcattgtactgactgtttttgctgtgtcttacatccctttccatgtgatgaaaacgatgaacttgagggcccggcttgattttcagaccccagcaatgtgtgctttcaatgacagggtttatgccacgtatcaggtgacaagaggtctagcaagtctcaacagttgtgtggaccccattctctatttcttggcgggagatactttcagaaggagactctcccgagccacaaggaaagcttctagaagaagtgaggcaaatttgcaatccaagagtgaagacatgaccctcaatattttacctgagttcaagcagaatggagatacaagcctgtgaaggcacaagaatctccaaacacctctctgttgtaatatggtaggatgcttaacagaatcaagtacttttcccctctttaactttctagtttagaaaaaaatcaaaccaagaaaatagtgagttaaaaaaataatagaagtagaaatgcccacatccacacttagcttgtttgggtttgctttcacagtctctcttccttctgactagaagtatgtataataaaacaatactacctagttaaacatttactttctcttttgcctttaaaatgtgcaggcttttctgtttaaagtgtgtgtgcacatgagtactggggctgtttttgatattagtaatttctctaagaaaactagccccctgcaacttgagtttgtggtttatctagcctttattgtttttttaaaatccacagtaggaataaaaaatctatattctcagaaatatctagcatggtatataacaaaacactaaactcatcagttcatccggcatcagatcaatggatctctgagcggggtgtttttttcagtgtcttataagcatagatgatagttgactgagtttctttagggcattgaatagacaagtaaagctaatgaatttaaaagcctgaaaagtgattgttttccagttatttctggaaaaggtctcattatatattgggtgctaaatgtttgatggggaaagcctgcatatattatcgtactggtaaaatgcattcaaaataattaaagtgcatgtattttccttgtaaacaccatgagctctcttagacatcttgtgataaagagcatttacttgccccactgctgtgcaatgccttaggactttgtttgtgttccaggacaagtgttcactcacatctgtaaaaacaattttaagaattgcaaataaattacagaccaaagattgagtaaagtcaaataactgttagtaagttgaaggatattggacaggaggacagtatttcagaaaaggagaggttgacagtcatccacaaggcatagcctccaagtatactctcaaatgtatgaagcaactggggtgggcagaagacattttagaatgagggctttagtttaaattaaagtcatggtggagaagactcttgcttcctccaagtgtttgaaaacacaaaatgcgatatg

SEQ ID NO: 25031 - DNA, 1943 bp, Homo sapiens
  source 1..1943: mol_type = unassigned DNA
gaacctcaggagggttgtggcacaatgaggaaggaaacgtgggtggaaaggcacgctggcctgctctgctggctgggccagtaactggggatggggctggggcagggcccactaagccactggtgactgggggaggggctggggaactgggtagcagacacaggctgaggatcggcacgggagcatggcagccaacgtctcgggtgccaagtcctgccctgccaacttcttggcagctgccgacgacaaactcagtgggttccagggggacttcctgtggcccatactggtggttgagttcctggtggccgtggccagcaatggcctggccctgtaccgcttcagcatccggaagcagcgcccatggcaccccgccgtggtcttctctgtccagctggcagtcagcgacctgctctgcgccctgacgctgcccccgctggccgcctacctctatccccccaagcactggcgctatggggaggccgcgtgccgcctggagcgcttcctcttcacctgcaacctgctgggcagcgtcatcttcatcacctgcatcagcctcaaccgctacctgggcatcgtgcaccccttcttcgcccgaagccacctgcgacccaagcacgcctgggccgtgagcgctgccggctgggtcctggccgccctgctggccatgcccacactcagcttctcccacctgaagaggccgcagcagggggcgggcaactgcagcgtggccaggcccgaggcctgcatcaagtgtctggggacagcagaccacgggctggcggcctacagagcgtatagcctggtgctggcggggttgggctgcggcctgccgctgctgctcacgctggcagcctacggcgccctcgggcgggccgtgctacgcagcccaggcatgactgtggccgagaagctgcgtgtggcagcgttggtggccagtggtgtggccctctacgccagctcctatgtgccctaccacatcatgcgggtgctcaacgtggatgctcggcggcgctggagcacccgctgcccgagctttgcagacatagcccaggccacagcagccctggagctggggccctacgtgggctaccaggtgatgcggggcctcatgcccctggccttctgtgtccaccctctactctacatggccgcagtgcccagcctgggctgctgctgccgacactgccccggctacagggacagctggaacccagaggacgccaagagcactggccaagccctgcccctcaatgccacagccgcccctaaaccgtcagagccccagtcccgtgagctgagccaatgatgtggcctagcggaagctgcctcctcaccctaggtgttgctggagaaccctgagggcagggcccgagccccgacacatcccttcccccaaaaagcaacacctgtgcttgcagccaggtcaggcccagctgcagcccaggcaggagcagtcgcctttcccacccacagcgctggccacagggctccctgcagggtcagggaccagaccacgcccagaggaggggaggcactggcccccgccacaggactggagacgcaagaacaaaaagaaccaagtagagagagtggagctgctttattgcccttggagcccgcgctctcggaggctgtcttctgtcgccaagggtcccggaccgagtacacagtggcagctggcttagttggtggacggcctggggtaggggagggtggcaggtataagacttctgggggcaccccaagaccccagacacccaagtggcatcttgggggtgggtgggcagaggacggggtaatgtgaggacgaagcgggcacggagccagatggccagtctccaggcctggtccacggactggcagggaccccaggcacaagagctgccacccctctgcccggttttggaaaaaaacaataaaggactgtcccctcaaaacca

SEQ ID NO: 25032 - DNA, 1766 bp, Homo sapiens
  source 1..1766: mol_type = unassigned DNA
actgttgttacacaacaaacatcatagtgctgaaatgacaaaaatccagggtagtgatcacaatcagaagacaggagctgcagaacagaacactttctcatgtccagggtcagattacaagagcactcaagactttactgacgaaaactcaggaaatcctctatcacaaagaggtttggcaactaaactaagacattaaaaggaaaataccagatgccactctgcaggttgcaataactactacttactggatacattcaaaccctccagaatcaacagttatcaggtaaccaacaagaaatgcaagccgtcgacaacctcacctctgcgcctggtaacaccagtctgtgcaccagagactacaaaatcacccaggtcctcttcccactgctctacactgtcctgttttttgttggacttatcacaaatggcctggcgatgaggattttctttcaaatccggagtaaatcaaactttattatttttcttaagaacacagtcatttctgatcttctcatgattctgacttttccattcaaaattcttagtgatgccaaactgggaacaggaccactgagaacttttgtgtgtcaagttacctccgtcatattttatttcacaatgtatatcagtatttcattcctgggactgataactatcgatcgctaccagaagaccaccaggccatttaaaacatccaaccccaaaaatctcttgggggctaagattctctctgttgtcatctgggcattcatgttcttactctctttgcctaacatgattctgaccaacaggcagccgagagacaagaatgtgaagaaatgctctttccttaaatcagagttcggtctagtctggcatgaaatagtaaattacatctgtcaagtcattttctggattaatttcttaattgttattgtatgttatacactcattacaaaagaactgtaccggtcatacgtaagaacgaggggtgtaggtaaagtccccaggaaaaaggtgaacgtcaaagttttcattatcattgctgtattctttatttgttttgttcctttccattttgcccgaattccttacaccctgagccaaacccgggatgtctttgactgcactgctgaaaatactctgttctatgtgaaagagagcactctgtggttaacttccttaaatgcatgcctggatccgttcatctattttttcctttgcaagtccttcagaaattccttgataagtatgctgaagtgccccaattctgcaacatctctgtcccaggacaataggaaaaaagaacaggatggtggtgacccaaatgaagagactccaatgtaaacaaattaactaaggaaatatttcaatctctttgtgttcagaactcgttaaagcaaagcgctaagtaaaaatattaactgacgaagaagcaactaagttaataataatgactctaaagaaacagaagattacaaaagcaattttcatttacctttccagtatgaaaagctatcttaaaatatagaaaactaatctaaactgtagctgtattagcagcaaaacaaacgacatccaattgtcatgctgcatgcaaaactacacagaattcatgttttgcagagttttgccaaaatgagtaatcatataatatttactgtaatttttaaaatacattatcgttcacaattttattttttcataatcaactaaggaagaacgatcaattggatataatcttcttaccaaaaatgatagttaaaatgtatatatatcctagt

SEQ ID NO: 25033 - DNA, 1348 bp, Homo sapiens
  source 1..1348: mol_type = unassigned DNA
acaatcagaagacaggagctgcagaacagaacactttctcatgtccagggtcagattacaagagcactcaagactttactgacgaaaactcaggaaatcctctatcacaaagaggtttggcaactaaactaagacattaaaaggaaaataccagatgccactctgcaggttgcaataactactacttactggatacattcaaaccctccagaatcaacagttatcaggtaaccaacaagaaatgcaagccgtcgacaacctcacctctgcgcctggtaacaccagtctgtgcaccagagactacaaaatcacccaggtcctcttcccactgctctacactgtcctgttttttgttggacttatcacaaatggcctggcgatgaggattttctttcaaatccggagtaaatcaaactttattatttttcttaagaacacagtcatttctgatcttctcatgattctgacttttccattcaaaattcttagtgatgccaaactgggaacaggaccactgagaacttttgtgtgtcaagtcattttctggattaatttcttaattgttattgtatgttatacactcattacaaaagaactgtaccggtcatacgtaagaacgaggggtgtaggtaaagtccccaggaaaaaggtgaacgtcaaagttttcattatcattgctgtattctttatttgttttgttcctttccattttgcccgaattccttacaccctgagccaaacccgggatgtctttgactgcactgctgaaaatactctgttctatgtgaaagagagcactctgtggttaacttccttaaatgcatgcctggatccgttcatctattttttcctttgcaagtccttcagaaattccttgataagtatgctgaagtgccccaattctgcaacatctctgtcccaggacaataggaaaaaagaacaggatggtggtgacccaaatgaagagactccaatgtaaacaaattaactaaggaaatatttcaatctctttgtgttcagaactcgttaaagcaaagcgctaagtaaaaatattaactgacgaagaagcaactaagttaataataatgactctaaagaaacagaagattacaaaagcaattttcatttacctttccagtatgaaaagctatcttaaaatatagaaaactaatctaaactgtagctgtattagcagcaaaacaaacgacatccaattgtcatgctgcatgcaaaactacacagaattcatgttttgcagagttttgccaaaatgagtaatcatataatatttactgtaatttttaaaatacattatcgttcacaattttattttttcataatcaactaa

SEQ ID NO: 25034 - DNA, 2660 bp, Homo sapiens
  source 1..2660: mol_type = unassigned DNA
gaacagcgcagggaggtgggtagccgggctcccaggcacgtgggtctctgcggctgcggcgggacccgggcactggcacccgggagcggcggcgacggcaccctgagaggagaagcgcagcgcagtggcgagaggagccccttgtggcagcagcactacctgcccagaaaaatgctggaggctgggcgtggccccaggcctggggacctgtttttcctgtttcccgcagagttccctgcagcccggtccaggtccaggcgtgtgcattcatgagtgaggaacccgtgcaggcgctgagcatcctgacctggagagcaggggctggtcaggttccagagcttggaggttccaggtccagatccaagtcagatggcaatgaaagccctggtcaggtggctgtgtcaggtcccctaggggcgctccggccacaaccctgatggccccacccctcccttccctgcagggcgatggcagcagacctgggcccctggaatgacaccatcaatggcacctgggatggggatgagctgggctacaggtgccgcttcaacgaggacttcaagtacgtgctgctgcctgtgtcctacggcgtggtgtgcgtgcctgggctgtgtctgaacgccgtggcgctctacatcttcttgtgccgcctcaagacctggaatgcgtccaccacatatatgttccacctggctgtgtctgatgcactgtatgcggcctccctgccgctgctggtctattactacgcccgcggcgaccactggcccttcagcacggtgctctgcaagctggtgcgcttcctcttctacaccaacctttactgcagcatcctcttcctcacctgcatcagcgtgcaccggtgtctgggcgtcttacgacctctgcgctccctgcgctggggccgggcccgctacgctcgccgggtggccggggccgtgtgggtgttggtgctggcctgccaggcccccgtgctctactttgtcaccaccagcgcgcgcgggggccgcgtaacctgccacgacacctcggcacccgagctcttcagccgcttcgtggcctacagctcagtcatgctgggcctgctcttcgcggtgccctttgccgtcatccttgtctgttacgtgctcatggctcggcgactgctaaagccagcctacgggacctcgggcggcctgcctagggccaagcgcaagtccgtgcgcaccatcgccgtggtgctggctgtcttcgccctctgcttcctgccattccacgtcacccgcaccctctactactccttccgctcgctggacctcagctgccacaccctcaacgccatcaacatggcctacaaggttacccggccgctggccagtgctaacagttgccttgaccccgtgctctacttcctggctgggcagaggctcgtacgctttgcccgagatgccaagccacccactggccccagccctgccaccccggctcgccgcaggctgggcctgcgcagatccgacagaactgacatgcagaggatagaagatgtgttgggcagcagtgaggactctaggcggacagagtccacgccggctggtagcgagaacactaaggacattcggctgtaggagcagaacacttcagcctgtgcaggtttatattgggaagctgtagaggaccaggacttgtgcagacgccacagtctccccagatatggaccatcagtgactcatgctggatgaccccatgctccgtcatttgacaggggctcaggatattcactctgtggtccagagtcaactgttcccataacccctagtcatcgtttgtgtgtataagttgggggaattaagtttcaagaaaggcaagagctcaaggtcaatgacacccctggcctgactcccatgcaagtagctggctgtactgccaaggtacctaggttggagtccagcctaatcaagtcaaatggagaaacaggcccagagaggaaggtggcttaccaagatcacataccagagtctggagctgagctacctggggtgggggccaagtcacaggttggccagaaaaccctggtaagtaatgagggctgagtttgcacagtggtctggaatggactgggtgccacggtggacttagctctgaggagtacccccagcccaagagatgaacatctggggactaatatcatagacccatctggaggctcccatgggctaggagccagtgtgaggctgtaacttatactaaaggttgtgttgcctgctgagctgtgccctattgtgtggtcgggggatgaggatatggcagggaagctttcaccagccacacaagggtcctttctccaatccgttcccttctgccacctgccttctcactagctgtctcaggagtagtctcatatcagggatcctctctccaggccccaggtcatcccccactgtaaagccagttggcttctgtgcctgactctgtgctgagcacagagaaaagtcaggtgcagtcccagtccttgagatttcccagtttaggtgatggccagtcatgtgctggtaaatgttaagccatttaactggagctccgatttaactgggaaccccttctttgtagaactgcccatttccatggtgcaaaaactcttatggccaaattcaaactataaacatgatgtcaacttccttgtaaaa

SEQ ID NO: 25035 - DNA, 2174 bp, Homo sapiens
  source 1..2174: mol_type = unassigned DNA
caaggcgctgggagaggcccggggaagcggcgggccagactggcgcaggtgcggactgggcgcggggcaggggagggcgctgtggagcggctgtcgccccggggcacagttgcgagccggcgtgtagcgcataactggacggcttgaacgcgcctgtgggtccgtggttgaactttgtctccacgggagcgtcggtctcggagccccttgtggcagcagcactacctgcccagaaaaatgctggaggctgggcgtggccccaggcctggggacctgtttttcctgtttcccgcagagttccctgcagcccggtccaggtccaggcgtgtgcattcatgagtgaggaacccgtgcaggcgctgagcatcctgacctggagagcaggggctggtcagggcgatggcagcagacctgggcccctggaatgacaccatcaatggcacctgggatggggatgagctgggctacaggtgccgcttcaacgaggacttcaagtacgtgctgctgcctgtgtcctacggcgtggtgtgcgtgcctgggctgtgtctgaacgccgtggcgctctacatcttcttgtgccgcctcaagacctggaatgcgtccaccacatatatgttccacctggctgtgtctgatgcactgtatgcggcctccctgccgctgctggtctattactacgcccgcggcgaccactggcccttcagcacggtgctctgcaagctggtgcgcttcctcttctacaccaacctttactgcagcatcctcttcctcacctgcatcagcgtgcaccggtgtctgggcgtcttacgacctctgcgctccctgcgctggggccgggcccgctacgctcgccgggtggccggggccgtgtgggtgttggtgctggcctgccaggcccccgtgctctactttgtcaccaccagcgcgcgcgggggccgcgtaacctgccacgacacctcggcacccgagctcttcagccgcttcgtggcctacagctcagtcatgctgggcctgctcttcgcggtgccctttgccgtcatccttgtctgttacgtgctcatggctcggcgactgctaaagccagcctacgggacctcgggcggcctgcctagggccaagcgcaagtccgtgcgcaccatcgccgtggtgctggctgtcttcgccctctgcttcctgccattccacgtcacccgcaccctctactactccttccgctcgctggacctcagctgccacaccctcaacgccatcaacatggcctacaaggttacccggccgctggccagtgctaacagttgccttgaccccgtgctctacttcctggctgggcagaggctcgtacgctttgcccgagatgccaagccacccactggccccagccctgccaccccggctcgccgcaggctgggcctgcgcagatccgacagaactgacatgcagaggatagaagatgtgttgggcagcagtgaggactctaggcggacagagtccacgccggctggtagcgagaacactaaggacattcggctgtaggagcagaacacttcagcctgtgcaggtttatattgggaagctgtagaggaccaggacttgtgcagacgccacagtctccccagatatggaccatcagtgactcatgctggatgaccccatgctccgtcatttgacaggggctcaggatattcactctgtggtccagagtcaactgttcccataacccctagtcatcgtttgtgtgtataagttgggggaattaagtttcaagaaaggcaagagctcaaggtcaatgacacccctggcctgactcccatgcaagtagctggctgtactgccaaggtacctaggttggagtccagcctaatcaagtcaaatggagaaacaggcccagagaggaaggtggcttaccaagatcacataccagagtctggagctgagctacctggggtgggggccaagtcacaggttggccagaaaaccctggtaagtaatgagggctgagtttgcacagtggtctggaatggactgggtgccacggtggacttagctctgaggagtacccccagcccaagagatgaacatctggggactaatatcatagacccatctggaggctcccatgggctaggagccagtgtgaggctgtaacttatactaaaggttgtgttgcctgctga

SEQ ID NO: 25036 - DNA, 2107 bp, Homo sapiens
  source 1..2107: mol_type = unassigned DNA
ggaacagcgcagggaggtgggtagccgggctcccaggcacgtgggtctctgcggctgcggcgggacccgggcactggcacccgggagcggcggcgacggcaccctgagaggagaagcgcagcgcagtggcgagaggagccccttgtggcagcagcactacctgcccagaaaaatgctggaggctgggcgtggccccaggcctggggacctgtttttcctgtttcccgcagagttccctgcagcccggtccaggtccaggcgtgtgcattcatgagtgaggaacccgtgcaggcgctgagcatcctgacctggagagcaggggctggtcagggcgatggcagcagacctgggcccctggaatgacaccatcaatggcacctgggatggggatgagctgggctacaggtgccgcttcaacgaggacttcaagtacgtgctgctgcctgtgtcctacggcgtggtgtgcgtgcctgggctgtgtctgaacgccgtggcgctctacatcttcttgtgccgcctcaagacctggaatgcgtccaccacatatatgttccacctggctgtgtctgatgcactgtatgcggcctccctgccgctgctggtctattactacgcccgcggcgaccactggcccttcagcacggtgctctgcaagctggtgcgcttcctcttctacaccaacctttactgcagcatcctcttcctcacctgcatcagcgtgcaccggtgtctgggcgtcttacgacctctgcgctccctgcgctggggccgggcccgctacgctcgccgggtggccggggccgtgtgggtgttggtgctggcctgccaggcccccgtgctctactttgtcaccaccagcgcgcgcgggggccgcgtaacctgccacgacacctcggcacccgagctcttcagccgcttcgtggcctacagctcagtcatgctgggcctgctcttcgcggtgccctttgccgtcatccttgtctgttacgtgctcatggctcggcgactgctaaagccagcctacgggacctcgggcggcctgcctagggccaagcgcaagtccgtgcgcaccatcgccgtggtgctggctgtcttcgccctctgcttcctgccattccacgtcacccgcaccctctactactccttccgctcgctggacctcagctgccacaccctcaacgccatcaacatggcctacaaggttacccggccgctggccagtgctaacagttgccttgaccccgtgctctacttcctggctgggcagaggctcgtacgctttgcccgagatgccaagccacccactggccccagccctgccaccccggctcgccgcaggctgggcctgcgcagatccgacagaactgacatgcagaggatagaagatgtgttgggcagcagtgaggactctaggcggacagagtccacgccggctggtagcgagaacactaaggacattcggctgtaggagcagaacacttcagcctgtgcaggtttatattgggaagctgtagaggaccaggacttgtgcagacgccacagtctccccagatatggaccatcagtgactcatgctggatgaccccatgctccgtcatttgacaggggctcaggatattcactctgtggtccagagtcaactgttcccataacccctagtcatcgtttgtgtgtataagttgggggaattaagtttcaagaaaggcaagagctcaaggtcaatgacacccctggcctgactcccatgcaagtagctggctgtactgccaaggtacctaggttggagtccagcctaatcaagtcaaatggagaaacaggcccagagaggaaggtggcttaccaagatcacataccagagtctggagctgagctacctggggtgggggccaagtcacaggttggccagaaaaccctggtaagtaatgagggctgagtttgcacagtggtctggaatggactgggtgccacggtggacttagctctgaggagtacccccagcccaagagatgaacatctggggactaatatcatagacccatctggaggctcccatgggctaggagccagtgtgaggctgtaacttatactaaaggttgtgttgcctgct

SEQ ID NO: 25037 - DNA, 4198 bp, Homo sapiens
  source 1..4198: mol_type = unassigned DNA
ggaagggcagccgtctgccgcccacgaacaccttctcaagcactttgagtgaccacggcttgcaagctggtggctggccccccgagtcccgggctctgaggcacggccgtcgacttaagcgttgcatcctgttacctggagaccctctgagctctcacctgctacttctgccgctgcttctgcacagagcccgggcgaggacccctccaggatgcaggtcccgaacagcaccggcccggacaacgcgacgctgcagatgctgcggaacccggcgatcgcggtggccctgcccgtggtgtactcgctggtggcggcggtcagcatcccgggcaacctcttctctctgtgggtgctgtgccggcgcatggggcccagatccccgtcggtcatcttcatgatcaacctgagcgtcacggacctgatgctggccagcgtgttgcctttccaaatctactaccattgcaaccgccaccactgggtattcggggtgctgctttgcaacgtggtgaccgtggccttttacgcaaacatgtattccagcatcctcaccatgacctgtatcagcgtggagcgcttcctgggggtcctgtacccgctcagctccaagcgctggcgccgccgtcgttacgcggtggccgcgtgtgcagggacctggctgctgctcctgaccgccctgtccccgctggcgcgcaccgatctcacctacccggtgcacgccctgggcatcatcacctgcttcgacgtcctcaagtggacgatgctccccagcgtggccatgtgggccgtgttcctcttcaccatcttcatcctgctgttcctcatcccgttcgtgatcaccgtggcttgttacacggccaccatcctcaagctgttgcgcacggaggaggcgcacggccgggagcagcggaggcgcgcggtgggcctggccgcggtggtcttgctggcctttgtcacctgcttcgcccccaacaacttcgtgctcctggcgcacatcgtgagccgcctgttctacggcaagagctactaccacgtgtacaagctcacgctgtgtctcagctgcctcaacaactgtctggacccgtttgtttattactttgcgtcccgggaattccagctgcgcctgcgggaatatttgggctgccgccgggtgcccagagacaccctggacacgcgccgcgagagcctcttctccgccaggaccacgtccgtgcgctccgaggccggtgcgcaccctgaagggatggagggagccaccaggcccggcctccagaggcaggagagtgtgttctgagtcccgggggcgcagcttggagagccgggggcgcagcttggagatccaggggcgcatggagaggccacggtgccagaggttcagggagaacagctgcgttgctcccaggcactgcagaggcccggtggggaagggtctccaggctttattcctcccaggcactgcagaggcaccggtgaggaagggtctccaggcttcactcagggtagagaaacaagcaaagcccagcagcgcacagggtgcttgttatcctgcagagggtgcctctgcctctctgtgtcaggggacagcttgtgtcaccacgcccggctaatttttgtattttttttagtagagctgggctgtcacccccgagctccttagacactcctcacacctgtccatacccgagggtggatattcaaccagccccaccgcctacccgactcggtttctggatatcctccgtgggcgaactgcgagccccattcccagctcttctccctgctgacatcgtcccttagttgtggttctggccttctccattctcctccaggggttctggtctccgtagcccggtgcacgccgaaatttctgtttatttcactcaggggcactgtggttgctgtggttggaattcttctttcagaggagcgcctggggctcctgcaagtcagctactctccgtgcccacttccccccacacacacaccccaccctgttgctgaccaaggtgatttttggcacatttgttctggcctggcttggtgggaccccacccctattctgcttctgtgagtccctgatagagaaggaggtcccatcaggcccctggaacacactcaggcttccctgactcaggacaaggaccacgggaggcccaggtgcggaaaggaggctccgtgagatggggtccagcccatcccaacacaagggtgcagcttgattcgggagttccccacctcctgcccattctccgcgtccttttaccccatggagagcctcagccatggcaagtccatctggagtccaggaagcaggcaactggcctgacccatgagaccgtttggagaccaagcagcagatgcaggtgtggaccccaggaacctacaggggtgtcagccgctgagccccctccctgctgtgtgggtggtgagcaggctgggtctttgtctgtcttcttctacacggcatgtgcctgcaccagccccaacacctgagctggtttagcgcaaagaagagctctgactctccaggggtgctgggacatcacgtggaattggatcccaggctctcttgggcgagaaagaccattctggaggtgggagtgggagagctgcctgtctgcccacgggctctgcgtctccgcagtgggtggccttggatgcccggcccctccctttctgtgcactggggacgctgatggaggctgaagctgctgttcggaggccctctattggtgcctctctcctgccgtcatcactatggcaggaaaacagagatggtttagtaatgaattatcattcccaaacccgtgtccacctggaacatcaggatgggaccatgtttgaaaatcgggtctttccaaatgtaattaagtaaggcgaggccatactgcatttacaatgggcccaatccagtgtccctatgagagacggaagaggagacacagacacaaagcaggaggccacataaagacagaggcagagactgaagtgatgctgccccaagcccagggatgcctggagtccccaggagctgggagaggcaggaaggaccctcccctagagtctctggagggaactggatacaattgcagagtgcactaaacagttgccccagaaagacatgtcttgttttaaagcccagaacctgaaattattatagattttattcggtaataaggaactttgcatgtgtaattacttaaggatatgaagatgagattgtgctggattattaagcaccctaaatgccatgacaggtgtccttccaagagacagaagaggagacacagacacagagcaggaggacacgtggagacagaggcagactggagtgatgcggccacaagcccagggacacctggagcccccaggagctgggagaggcaggaaggatcctcccctagagcctccagggggaactggaggatgcgtaagagacccagaacttccacagaaggaggaaaattaacctcctgcttctctagactgttccaaagctgaaccctagaaagcaaagctgatacagaagcatccaggctgcaggagtacaggtcgcaagtgctgagcgtgggccttgggtgtgtctcatgggggaaaaaaaactgtgaaaaacctcagagtagcatcttcacagtaacgcacggacgatccctaaactgccttgtaaacaaaaatgagagcttgagtcagaggaagccgagacaatatccttcctcgacaacgtgcgagaaccctgacgtcccccagcaaaggaagacgttgcaagcaggcaaaatgcgtcgattttttttttttgtcagtatgatgatttttgcagccacttggctatggagagcagccgacaccccctcttacagccgtggatgtttcctggaagctgactcagtctgttcactggttgagctttgagtgaaaagataacacaggtctattgactcacacacatgttttaagatggaaaactttacttctgttcttggcaggacatggagagagggagggattccaaaaagtctcagcctccatcaaggcgtggcagctcatgccggtaatctcagcactttgggaggctcaggcgggaggactgattgagtccgggtgttcaagggccaacctaggcaacacagtgagaactcatctctgtaaaaaataaaaataaaacattaaaaaaaaacatgagctttgaagtgcacagggcaaa

SEQ ID NO: 25038 - DNA, 660 bp, Homo sapiens
  source 1..660: mol_type = unassigned DNA
gcccctggtgctctcagatgtcggccaggcttgcagacaggtgaatgcatctcattggctccagggaggcatgatgccaccgggcagctctttttaagagaaaagccagaaccggtggagcagcgacccctgagcagtgttctctgtgctgagcggcgggactgagctgttgagttagagccaacatgagtgagcgacaaggtgctggggcaaccaatggaaaagacaagacatctggtgaaaatgatggacagaagaaagttcaagaagaatttgacattgacatggatgcaccagagacagaacgtgcagcggtggccattcagtctcagttcagaaaattccagaagaagaaggctgggtctcagtcctagtgggagaaccccctcctagtccacctgaaaacaccaaattcaaccatcatctgtcaagaaattaaaagaacaacaccctagagagaagtcatccacacacaatccacacacgcatagcaaacctccaatgcatgtacagaaacctgtgatatttatacccttgtaggaaggtatagacaatggaattgtgagtagcttaatctctatgtttctctccattttcattcctcctgcaactattttccttgatgttgtaataaaatgaagttacgatgagtgaattcaa

SEQ ID NO: 25039 - DNA, 2747 bp, Homo sapiens
  source 1..2747: mol_type = unassigned DNA
gtcactgcatcccggcgcggcccgcagaagacgagcgccgctgccgccgcctcctcctcccgggctcccgggctctcggggtccggggcctttgcacctgtcttttccagctgggcacaaagccttttgctgtcgccgtggcgactggaggccttcacttttaatccccctcattttccagttcattctctgcttattttctggtcagtccgtgaccctgtaggcggcctctgaccggcgatcgatttgccgccctcagggcgctgggcggccggctgcctccgaagctggggcggcctccgcggtctccatggtaacggcctctccggcgtctccgcctggaggggaagatgcggcctgcctggcccgccgcctcgcccccggcctcacggtgggaccccgggcactgaggacggaggtcccgggcgccggcccgcggggcaacgggcactagctggagaaagagcagctcatggagaggctgagagaagcggttttcgcgtcctacccaaactgggagagtaaccttcagcagctggactcaccgattggttttccttcattttcagtgaaatcccattctctggctggagacacagatggcctcaaatgagagagatgctatatcgtggtaccaaaagaagattggagcctacgatcagcagatatgggaaaagtcaatcgaacagactcagattaagggtttgaaaaacaaaccgaaaaagatgggccacataaagccagacttgattgacgttgacttaatcagagggtcaacatttgccaaagcaaaacctgaaattccatggacatctctgactcggaaggggcttgttcgagttgtattttttccattgttcagcaattggtggattcaggttacctctttaagaatctttgtttggctgttactactttatttcatgcaagttatagcaattgtcttatatttgatgatgcctattgtgaacataagtgaagtacttggacccttgtgccttatgctactcatgggaactgtccactgtcaaattgtgtctactcagataacaagaccatcaggaaacaatggaaatcgaagaagaagaaaattacgaaaaactgtaaatggtgatgggagccgagaaaatggaaataactcctctgataaagtcagaggaatagaaactttggaatctgtacccattattggtggtttttgggagactatctttggcaacaggattaaaagagtaaaattaatatctaacaaagggactgaaactgacaatgacccaagttgtgtccatcctatcattaagaggagacaatgtcgaccagagattagaatgtggcaaacaagagagaaagcaaaattttcagatggagaaaagtgccgtagggaggcttttaggcgtttgggtaatggggtgtctgatgacctgtcaagtgaagaagatggtgaagcacggacacagatgatattattgcgtaggagtgtggaaggggcctcaagtgacaatggttgtgaagttaagaatagaaaatcaatactttcaaggcacctaaactctcaggtaaagaaaaccactacaaggtggtgtcatattgtgcgggattcagatagtctggctgaatcagaatttgaatcagcagccttcagccagggctctagatcgggtgtgagtggtggctctcgaagcctcaacatgtcaagaagagactcagaaagcacccgccatgactcggagactgaggacatgttatgggacgacctgctacatggcccagagtgccggtcatctgtcaccagtgacagtgagggggcccatgtgaatacccttcactcagggaccaaacgtgaccccaaagaggatgtttttcagcagaatcatttattctggcttcagaattcaagtccttcctctgatcgagttagtgcaataatctgggaggggaatgagtgcaaaaagatggatatgtctgtgttggaaataagtggcatcatcatgagcagggtcaatgcctatcagcaaggagtaggttatcagatgctgggaaatgttgtcactattggattagcattttttccattcttacatcgacttttccgtgagaagagccttgaccaactaaagtccatttcagctgaggagatcttgactctcttttgtggggcaccacctgttacacctattattgttttgtcgataattaatttttttgaaagattgtgtcttacttggatgttttttttcatgatgtgtgtggcagagagaacatataaacagagatttttatttgcaaaactcttcagccatattacttctgccaggaaagctaggaaatatgaaatacctcatttcagacttaagaaggtggagaatattaaaatatggttatcactgcgttcctatctaaagagacgggggccacagcgttcagttgatgtggttgtatcctcggttttcctactgacactttcgattgctttcatttgttgtgctcaggtaaaagtttcacatctgctttaaggaaaaatgaaaattctattatagagttcactttctgttttagacttaggtcactgtccttaagtatgtatttttaatgcatctacattttttactattttggatgtttggtaatttttctaacttttcaaaatgggaatacaagtaattctgaagtcctttcaaactgtaagatcgctctaattttagttggtaattattaattgataataaaactatcatatggttgcaaaa

SEQ ID NO: 25040 - DNA, 3085 bp, Homo sapiens
  source 1..3085: mol_type = unassigned DNA
ctctccggcgtctccgcctggaggggaagatgcggcctgcctggcccgccgcctcgcccccggcctcacggtgggaccccgggcactgaggacggaggtcccgggcgccggcccgcggggcaacgggcactaggtgagagccggacgcgggcgagcgaaggaggcgggtgccgggcgactccagcggcggcccctgcccctcccccgcacccacgaacacgctcgcccgatatattgcagaggcttctccggtcgccgctgcgccagtttttttttgtttgtttgttgtgttttccctggcaaacagctggagaaagagcagctcatggagaggctgagagaagcggttttcgcgtcctacccaaactgggagagtaaccttcagcagctggactcaccgattggttttccttcattttcagtgaaatcccattctctggctggagacacagatggcctcaaatgagagagatgctatatcgtggtaccaaaagaagattggagcctacgatcagcagatatgggaaaagtcaatcgaacagactcagattaagggtttgaaaaacaaaccgaaaaagatgggccacataaagccagacttgattgacgttgacttaatcagagttatagcaattgtcttatatttgatgatgcctattgtgaacataagtgaagtacttggacccttgtgccttatgctactcatgggaactgtccactgtcaaattgtgtctactcagataacaagaccatcaggaaacaatggaaatcgaagaagaagaaaattacgaaaaactgtaaatggtgatgggagccgagaaaatggaaataactcctctgataaagtcagaggaatagaaactttggaatctgtacccattattggtggtttttgggagactatctttggcaacaggattaaaagagtaaaattaatatctaacaaagggactgaaactgacaatgacccaagttgtgtccatcctatcattaagaggagacaatgtcgaccagagattagaatgtggcaaacaagagagaaagcaaaattttcagatggagaaaagtgccgtagggaggcttttaggcgtttgggtaatggggtgtctgatgacctgtcaagtgaagaagatggtgaagcacggacacagatgatattattgcgtaggagtgtggaaggggcctcaagtgacaatggttgtgaagttaagaatagaaaatcaatactttcaaggcacctaaactctcaggtaaagaaaaccactacaaggtggtgtcatattgtgcgggattcagatagtctggctgaatcagaatttgaatcagcagccttcagccagggctctagatcgggtgtgagtggtggctctcgaagcctcaacatgtcaagaagagactcagaaagcacccgccatgactcggagactgaggacatgttatgggacgacctgctacatggcccagagtgccggtcatctgtcaccagtgacagtgagggggcccatgtgaatacccttcactcagggaccaaacgtgaccccaaagaggatgtttttcagcagaatcatttattctggcttcagaattcaagtccttcctctgatcgagttagtgcaataatctgggaggggaatgagtgcaaaaagatggatatgtctgtgttggaaataagtggcatcatcatgagcagggtcaatgcctatcagcaaggagtaggttatcagatgctgggaaatgttgtcactattggattagcattttttccattcttacatcgacttttccgtgagaagagccttgaccaactaaagtccatttcagctgaggagatcttgactctcttttgtggggcaccacctgttacacctattattgttttgtcgataattaatttttttgaaagattgtgtcttacttggatgttttttttcatgatgtgtgtggcagagagaacatataaacagagatttttatttgcaaaactcttcagccatattacttctgccaggaaagctaggaaatatgaaatacctcatttcagacttaagaaggtggagaatattaaaatatggttatcactgcgttcctatctaaagagacgggggccacagcgttcagttgatgtggttgtatcctcggttttcctactgacactttcgattgctttcatttgttgtgctcaggttctccaaggacataaaactttcctgaatgatgcttataactgggagtttttgatctgggaaacagctttactactttttttattgcgtctggcctcactggggtctgaaaccaataagaaatacagcaatgtttcaatattacttacagaacagattaatttatatcttaagatggaaaaaaagccaaataagaaagaacagcttactctagtaaacaatgtattaaagctgtccaccaagttgttgaaagagctggacacaccatttagactctatggactgacaatgaatcccttaatctacaatatcacaagagtagttatcctttctgctgtctcaggtgttataagtgatcttctaggatttaatataagactgtggaaaattaaatcataagctgagtaaatgcctggactctcccctggctggtatcaaaacttacctatcaaggaaagtgatgactgcagaaaccagtgagatacccacctgcttgttcacatgcacaggtgctctcagctctgccaaagcgaatgaatggtgtttccggaggagcaagtccttttccaactgggtgtgcatgctaaaaacctgtattttcatgcttttcaaacaacatgaatagtcagctgactaaagactgtgtgtgttgtggtaacacaaagacaattttgtaagtttgcgcttcagtactgtgacagttatgtttactggacatagtcttttgggcaactatgatagatgcccaaagcatgaagcaaatatcttttattggaaatatgcaaattcaatacttttccattatagtctatagaactggagatttcatttctctatcaaagagagatcaagcgaactattttaggttaaatccgaataaaagaactttactggagactttc

SEQ ID NO: 25041 - DNA, 2603 bp, Homo sapiens
  source 1..2603: mol_type = unassigned DNA
ctctccggcgtctccgcctggaggggaagatgcggcctgcctggcccgccgcctcgcccccggcctcacggtgggaccccgggcactgaggacggaggtcccgggcgccggcccgcggggcaacgggcactaggtgagagccggacgcgggcgagcgaaggaggcgggtgccgggcgactccagcggcggcccctgcccctcccccgcacccacgaacacgctcgcccgatatattgcagaggcttctccggtcgccgctgcgccagtttttttttgtttgtttgttgtgttttccctggcaaacagctggagaaagagcagctcatggagaggctgagagaagcggttttcgcgtcctacccaaactgggagagtaaccttcagcagctggactcaccgattggttttccttcattttcagtgaaatcccattctctggctggagacacagatggcctcaaatgagagagatgctatatcgtggtaccaaaagaagattggagcctacgatcagcagatatgggaaaagtcaatcgaacagactcagattaagggtttgaaaaacaaaccgaaaaagatgggccacataaagccagacttgattgacgttgacttaatcagagggtcaacatttgccaaagcaaaacctgaaattccatggacatctctgactcggaaggggcttgttcgagttgtattttttccattgttcagcaattggtggattcaggttacctctttaagaatctttgtttggctgttactactttatttcatgcaagttatagcaattgtcttatatttgatgatgcctattgtgaacataagtgaagtacttggacccttgtgccttatgctactcatgggaactgtccactgtcaaattgtgtctactcagataacaagaccatcaggaaacaatggaaatcgaagaagaaggattaaaagagtaaaattaatatctaacaaagggactgaaactgacaatgacccaagttgtgtccatcctatcattaagaggagacaatgtcgaccagagattagaatgtggcaaacaagagagaaagcaaaattttcagatggagaaaagtgccgtagggaggcttttaggcgtttgggtaatggggtgtctgatgacctgtcaagtgaagaagatggtgaagcacggacacagatgatattattgcgtaggagtgtggaaggggcctcaagtgacaatggttgtgaagttaagaatagaaaatcaatactttcaaggcacctaaactctcaggtaaagaaaaccactacaaggtggtgtcatattgtgcgggattcagatagtctggctgaatcagaatttgaatcagcagccttcagccagggctctagatcgggtgtgagtggtggctctcgaagcctcaacatgtcaagaagagactcagaaagcacccgccatgactcggagactgaggacatgttatgggacgacctgctacatggcccagagtgccggtcatctgtcaccagtgacagtgagggggcccatgtgaatacccttcactcagggaccaaacgtgaccccaaagaggatgtttttcagcagaatcatttattctggcttcagaattcaagtccttcctctgatcgagttagtgcaataatctgggaggggaatgagtgcaaaaagatggatatgtctgtgttggaaataagtggcatcatcatgagcagggtcaatgcctatcagcaaggagtaggttatcagatgctgggaaatgttgtcactattggattagcattttttccattcttacatcgacttttccgtgagaagagccttgaccaactaaagtccatttcagctgaggagatcttgactctcttttgtggggcaccacctgttacacctattattgttttgtcgataattaatttttttgaaagattgtgtcttacttggatgttttttttcatgatgtgtgtggcagagagaacatataaacagagatttttatttgcaaaactcttcagccatattacttctgccaggaaagctaggaaatatgaaatacctcatttcagacttaagaaggtggagaatattaaaatatggttatcactgcgttcctatctaaagagacgggggccacagcgttcagttgatgtggttgtatcctcggttttcctactgacactttcgattgctttcatttgttgtgctcaggttctccaaggacataaaactttcctgaatgatgcttataactgggagtttttgatctgggaaacagctttactactttttttattgcgtctggcctcactggggtctgaaaccaataagaaatacagcaatgtttcaatattacttacagaacagattaatttatatcttaagatggaaaaaaagccaaataagaaagaacagcttactctagtaaacaatgtattaaagctgtccaccaagttgttgaaagagctggacacaccatttagactctatggactgacaatgaatcccttaatctacaatatcacaagagtagttatcctttctgctgtctcaggtgttataagtgatcttctaggatttaatataagaatttggaagcactcgtct

SEQ ID NO: 25042 - DNA, 3000 bp, Homo sapiens
  source 1..3000: mol_type = unassigned DNA
tggcgactggaggccttcacttttaatccccctcattttccagttcattctctgcttattttctggtcagtccgtgaccctgtaggcggcctctgaccggcgatcgatttgccgccctcagggcgctgggcggccggctgcctccgaagctggggcggcctccgcggtctccatggtaacggcctctccggcgtctccgcctggaggggaagatgcggcctgcctggcccgccgcctcgcccccggcctcacggtgggaccccgggcactgaggacggaggtcccgggcgccggcccgcggggcaacgggcactagtgaaatcccattctctggctggagacacagatggcctcaaatgagagagatgctatatcgtggtaccaaaagaagattggagcctacgatcagcagatatgggaaaagtcaatcgaacagactcagattaagggtttgaaaaacaaaccgaaaaagatgggccacataaagccagacttgattgacgttgacttaatcagagggtcaacatttgccaaagcaaaacctgaaattccatggacatctctgactcggaaggggcttgttcgagttgtattttttccattgttcagcaattggtggattcaggttacctctttaagaatctttgtttggctgttactactttatttcatgcaagttatagcaattgtcttatatttgatgatgcctattgtgaacataagtgaagtacttggacccttgtgccttatgctactcatgggaactgtccactgtcaaattgtgtctactcagataacaagaccatcaggaaacaatggaaatcgaagaagaaggattaaaagagtaaaattaatatctaacaaagggactgaaactgacaatgacccaagttgtgtccatcctatcattaagaggagacaatgtcgaccagagattagaatgtggcaaacaagagagaaagcaaaattttcagatggagaaaagtgccgtagggaggcttttaggcgtttgggtaatggggtgtctgatgacctgtcaagtgaagaagatggtgaagcacggacacagatgatattattgcgtaggagtgtggaaggggcctcaagtgacaatggttgtgaagttaagaatagaaaatcaatactttcaaggcacctaaactctcaggtaaagaaaaccactacaaggtggtgtcatattgtgcgggattcagatagtctggctgaatcagaatttgaatcagcagccttcagccagggctctagatcgggtgtgagtggtggctctcgaagcctcaacatgtcaagaagagactcagaaagcacccgccatgactcggagactgaggacatgttatgggacgacctgctacatggcccagagtgccggtcatctgtcaccagtgacagtgagggggcccatgtgaatacccttcactcagggaccaaacgtgaccccaaagaggatgtttttcagcagaatcatttattctggcttcagaattcaagtccttcctctgatcgagttagtgcaataatctgggaggggaatgagtgcaaaaagatggatatgtctgtgttggaaataagtggcatcatcatgagcagggtcaatgcctatcagcaaggagtaggttatcagatgctgggaaatgttgtcactattggattagcattttttccattcttacatcgacttttccgtgagaagagccttgaccaactaaagtccatttcagctgaggagatcttgactctcttttgtggggcaccacctgttacacctattattgttttgtcgataattaatttttttgaaagattgtgtcttacttggatgttttttttcatgatgtgtgtggcagagagaacatataaacagagatttttatttgcaaaactcttcagccatattacttctgccaggaaagctaggaaatatgaaatacctcatttcagacttaagaaggtggagaatattaaaatatggttatcactgcgttcctatctaaagagacgggggccacagcgttcagttgatgtggttgtatcctcggttttcctactgacactttcgattgctttcatttgttgtgctcaggttctccaaggacataaaactttcctgaatgatgcttataactgggagtttttgatctgggaaacagctttactactttttttattgcgtctggcctcactggggtctgaaaccaataagaaatacagcaatgtttcaatattacttacagaacagattaatttatatcttaagatggaaaaaaagccaaataagaaagaacagcttactctagtaaacaatgtattaaagctgtccaccaagttgttgaaagagctggacacaccatttagactctatggactgacaatgaatcccttaatctacaatatcacaagagtagttatcctttctgctgtctcaggtgttataagtgatcttctaggatttaatataagactgtggaaaattaaatcataagctgagtaaatgcctggactctcccctggctggtatcaaaacttacctatcaaggaaagtgatgactgcagaaaccagtgagatacccacctgcttgttcacatgcacaggtgctctcagctctgccaaagcgaatgaatggtgtttccggaggagcaagtccttttccaactgggtgtgcatgctaaaaacctgtattttcatgcttttcaaacaacatgaatagtcagctgactaaagactgtgtgtgttgtggtaacacaaagacaattttgtaagtttgcgcttcagtactgtgacagttatgtttactggacatagtcttttgggcaactatgatagatgcccaaagcatgaagcaaatatcttttattggaaatatgcaaattcaatacttttccattatagtctatagaactggagatttcatttctctatcaaagagagatcaagcgaactattttaggttaaatccgaataaaagaactttactggagact

SEQ ID NO: 25043 - DNA, 3075 bp, Homo sapiens
  source 1..3075: mol_type = unassigned DNA
gctgccgccgcctcctcctcccgggctcccgggctctcggggtccggggcctttgcacctgtcttttccagctgggcacaaagccttttgctgtcgccgtggcgactggaggccttcacttttaatccccctcattttccagttcattctctgcttattttctggtcagtccgtgaccctgtaggcggcctctgaccggcgatcgatttgccgccctcagggcgctgggcggccggctgcctccgaagctggggcggcctccgcggtctccatggtaacggcctctccggcgtctccgcctggaggggaagatgcggcctgcctggcccgccgcctcgcccccggcctcacggtgggaccccgggcactgaggacggaggtcccgggcgccggcccgcggggcaacgggcactagtgaaatcccattctctggctggagacacagatggcctcaaatgagagagatgctatatcgtggtaccaaaagaagattggagcctacgatcagcagatatgggaaaagtcaatcgaacagactcagattaagggtttgaaaaacaaaccgaaaaagatgggccacataaagccagacttgattgacgttgacttaatcagagttatagcaattgtcttatatttgatgatgcctattgtgaacataagtgaagtacttggacccttgtgccttatgctactcatgggaactgtccactgtcaaattgtgtctactcagataacaagaccatcaggaaacaatggaaatcgaagaagaagaaaattacgaaaaactgtaaatggtgatgggagccgagaaaatggaaataactcctctgataaagtcagaggaatagaaactttggaatctgtacccattattggtggtttttgggagactatctttggcaacaggattaaaagagtaaaattaatatctaacaaagggactgaaactgacaatgacccaagttgtgtccatcctatcattaagaggagacaatgtcgaccagagattagaatgtggcaaacaagagagaaagcaaaattttcagatggagaaaagtgccgtagggaggcttttaggcgtttgggtaatggggtgtctgatgacctgtcaagtgaagaagatggtgaagcacggacacagatgatattattgcgtaggagtgtggaaggggcctcaagtgacaatggttgtgaagttaagaatagaaaatcaatactttcaaggcacctaaactctcaggtaaagaaaaccactacaaggtggtgtcatattgtgcgggattcagatagtctggctgaatcagaatttgaatcagcagccttcagccagggctctagatcgggtgtgagtggtggctctcgaagcctcaacatgtcaagaagagactcagaaagcacccgccatgactcggagactgaggacatgttatgggacgacctgctacatggcccagagtgccggtcatctgtcaccagtgacagtgagggggcccatgtgaatacccttcactcagggaccaaacgtgaccccaaagaggatgtttttcagcagaatcatttattctggcttcagaattcaagtccttcctctgatcgagttagtgcaataatctgggaggggaatgagtgcaaaaagatggatatgtctgtgttggaaataagtggcatcatcatgagcagggtcaatgcctatcagcaaggagtaggttatcagatgctgggaaatgttgtcactattggattagcattttttccattcttacatcgacttttccgtgagaagagccttgaccaactaaagtccatttcagctgaggagatcttgactctcttttgtggggcaccacctgttacacctattattgttttgtcgataattaatttttttgaaagattgtgtcttacttggatgttttttttcatgatgtgtgtggcagagagaacatataaacagagatttttatttgcaaaactcttcagccatattacttctgccaggaaagctaggaaatatgaaatacctcatttcagacttaagaaggtggagaatattaaaatatggttatcactgcgttcctatctaaagagacgggggccacagcgttcagttgatgtggttgtatcctcggttttcctactgacactttcgattgctttcatttgttgtgctcaggttctccaaggacataaaactttcctgaatgatgcttataactgggagtttttgatctgggaaacagctttactactttttttattgcgtctggcctcactggggtctgaaaccaataagaaatacagcaatgtttcaatattacttacagaacagattaatttatatcttaagatggaaaaaaagccaaataagaaagaacagcttactctagtaaacaatgtattaaagctgtccaccaagttgttgaaagagctggacacaccatttagactctatggactgacaatgaatcccttaatctacaatatcacaagagtagttatcctttctgctgtctcaggtgttataagtgatcttctaggatttaatataagactgtggaaaattaaatcataagctgagtaaatgcctggactctcccctggctggtatcaaaacttacctatcaaggaaagtgatgactgcagaaaccagtgagatacccacctgcttgttcacatgcacaggtgctctcagctctgccaaagcgaatgaatggtgtttccggaggagcaagtccttttccaactgggtgtgcatgctaaaaacctgtattttcatgcttttcaaacaacatgaatagtcagctgactaaagactgtgtgtgttgtggtaacacaaagacaattttgtaagtttgcgcttcagtactgtgacagttatgtttactggacatagtcttttgggcaactatgatagatgcccaaagcatgaagcaaatatcttttattggaaatatgcaaattcaatacttttccattatagtctatagaactggagatttcatttctctatcaaagagagatcaagcgaactattttaggttaaatccgaataaaagaactttactggagact

SEQ ID NO: 25044 - DNA, 3273 bp, Homo sapiens
  source 1..3273: mol_type = unassigned DNA
gtcactgcatcccggcgcggcccgcagaagacgagcgccgctgccgccgcctcctcctcccgggctcccgggctctcggggtccggggcctttgcacctgtcttttccagctgggcacaaagccttttgctgtcgccgtggcgactggaggccttcacttttaatccccctcattttccagttcattctctgcttattttctggtcagtccgtgaccctgtaggcggcctctgaccggcgatcgatttgccgccctcagggcgctgggcggccggctgcctccgaagctggggcggcctccgcggtctccatggtaacggcctctccggcgtctccgcctggaggggaagatgcggcctgcctggcccgccgcctcgcccccggcctcacggtgggaccccgggcactgaggacggaggtcccgggcgccggcccgcggggcaacgggcactagtgaaatcccattctctggctggagacacagatggcctcaaatgagagagatgctatatcgtggtaccaaaagaagattggagcctacgatcagcagatatgggaaaagtcaatcgaacagactcagattaagggtttgaaaaacaaaccgaaaaagatgggccacataaagccagacttgattgacgttgacttaatcagagggtcaacatttgccaaagcaaaacctgaaattccatggacatctctgactcggaaggggcttgttcgagttgtattttttccattgttcagcaattggtggattcaggttacctctttaagaatctttgtttggctgttactactttatttcatgcaagttatagcaattgtcttatatttgatgatgcctattgtgaacataagtgaagtacttggacccttgtgccttatgctactcatgggaactgtccactgtcaaattgtgtctactcagataacaagaccatcaggaaacaatggaaatcgaagaagaagaaaattacgaaaaactgtaaatggtgatgggagccgagaaaatggaaataactcctctgataaagtcagaggaatagaaactttggaatctgtacccattattggtggtttttgggagactatctttggcaacaggattaaaagagtaaaattaatatctaacaaagggactgaaactgacaatgacccaagttgtgtccatcctatcattaagaggagacaatgtcgaccagagattagaatgtggcaaacaagagagaaagcaaaattttcagatggagaaaagtgccgtagggaggcttttaggcgtttgggtaatggggtgtctgatgacctgtcaagtgaagaagatggtgaagcacggacacagatgatattattgcgtaggagtgtggaaggggcctcaagtgacaatggttgtgaagttaagaatagaaaatcaatactttcaaggcacctaaactctcaggtaaagaaaaccactacaaggtggtgtcatattgtgcgggattcagatagtctggctgaatcagaatttgaatcagcagccttcagccagggctctagatcgggtgtgagtggtggctctcgaagcctcaacatgtcaagaagagactcagaaagcacccgccatgactcggagactgaggacatgttatgggacgacctgctacatggcccagagtgccggtcatctgtcaccagtgacagtgagggggcccatgtgaatacccttcactcagggaccaaacgtgaccccaaagaggatgtttttcagcagaatcatttattctggcttcagaattcaagtccttcctctgatcgagttagtgcaataatctgggaggggaatgagtgcaaaaagatggatatgtctgtgttggaaataagtggcatcatcatgagcagggtcaatgcctatcagcaaggagtaggttatcagatgctgggaaatgttgtcactattggattagcattttttccattcttacatcgacttttccgtgagaagagccttgaccaactaaagtccatttcagctgaggagatcttgactctcttttgtggggcaccacctgttacacctattattgttttgtcgataattaatttttttgaaagattgtgtcttacttggatgttttttttcatgatgtgtgtggcagagagaacatataaacagagatttttatttgcaaaactcttcagccatattacttctgccaggaaagctaggaaatatgaaatacctcatttcagacttaagaaggtggagaatattaaaatatggttatcactgcgttcctatctaaagagacgggggccacagcgttcagttgatgtggttgtatcctcggttttcctactgacactttcgattgctttcatttgttgtgctcaggttctccaaggacataaaactttcctgaatgatgcttataactgggagtttttgatctgggaaacagctttactactttttttattgcgtctggcctcactggggtctgaaaccaataagaaatacagcaatgtttcaatattacttacagaacagattaatttatatcttaagatggaaaaaaagccaaataagaaagaacagcttactctagtaaacaatgtattaaagctgtccaccaagttgttgaaagagctggacacaccatttagactctatggactgacaatgaatcccttaatctacaatatcacaagagtagttatcctttctgctgtctcaggtgttataagtgatcttctaggatttaatataagactgtggaaaattaaatcataagctgagtaaatgcctggactctcccctggctggtatcaaaacttacctatcaaggaaagtgatgactgcagaaaccagtgagatacccacctgcttgttcacatgcacaggtgctctcagctctgccaaagcgaatgaatggtgtttccggaggagcaagtccttttccaactgggtgtgcatgctaaaaacctgtattttcatgcttttcaaacaacatgaatagtcagctgactaaagactgtgtgtgttgtggtaacacaaagacaattttgtaagtttgcgcttcagtactgtgacagttatgtttactggacatagtcttttgggcaactatgatagatgcccaaagcatgaagcaaatatcttttattggaaatatgcaaattcaatacttttccattatagtctatagaactggagatttcatttctctatcaaagagagatcaagcgaactattttaggttaaatccgaataaaagaactttactggagact

SEQ ID NO: 25045 - DNA, 3244 bp, Homo sapiens
  source 1..3244: mol_type = unassigned DNA
ctctccggcgtctccgcctggaggggaagatgcggcctgcctggcccgccgcctcgcccccggcctcacggtgggaccccgggcactgaggacggaggtcccgggcgccggcccgcggggcaacgggcactaggtgagagccggacgcgggcgagcgaaggaggcgggtgccgggcgactccagcggcggcccctgcccctcccccgcacccacgaacacgctcgcccgatatattgcagaggcttctccggtcgccgctgcgccagtttttttttgtttgtttgttgtgttttccctggcaaacagctggagaaagagcagctcatggagaggctgagagaagcggttttcgcgtcctacccaaactgggagagtaaccttcagcagctggactcaccgattggttttccttcattttcagtgaaatcccattctctggctggagacacagatggcctcaaatgagagagatgctatatcgtggtaccaaaagaagattggagcctacgatcagcagatatgggaaaagtcaatcgaacagactcagattaagggtttgaaaaacaaaccgaaaaagatgggccacataaagccagacttgattgacgttgacttaatcagagggtcaacatttgccaaagcaaaacctgaaattccatggacatctctgactcggaaggggcttgttcgagttgtattttttccattgttcagcaattggtggattcaggttacctctttaagaatctttgtttggctgttactactttatttcatgcaagttatagcaattgtcttatatttgatgatgcctattgtgaacataagtgaagtacttggacccttgtgccttatgctactcatgggaactgtccactgtcaaattgtgtctactcagataacaagaccatcaggaaacaatggaaatcgaagaagaagaaaattacgaaaaactgtaaatggtgatgggagccgagaaaatggaaataactcctctgataaagtcagaggaatagaaactttggaatctgtacccattattggtggtttttgggagactatctttggcaacaggattaaaagagtaaaattaatatctaacaaagggactgaaactgacaatgacccaagttgtgtccatcctatcattaagaggagacaatgtcgaccagagattagaatgtggcaaacaagagagaaagcaaaattttcagatggagaaaagtgccgtagggaggcttttaggcgtttgggtaatggggtgtctgatgacctgtcaagtgaagaagatggtgaagcacggacacagatgatattattgcgtaggagtgtggaaggggcctcaagtgacaatggttgtgaagttaagaatagaaaatcaatactttcaaggcacctaaactctcaggtaaagaaaaccactacaaggtggtgtcatattgtgcgggattcagatagtctggctgaatcagaatttgaatcagcagccttcagccagggctctagatcgggtgtgagtggtggctctcgaagcctcaacatgtcaagaagagactcagaaagcacccgccatgactcggagactgaggacatgttatgggacgacctgctacatggcccagagtgccggtcatctgtcaccagtgacagtgagggggcccatgtgaatacccttcactcagggaccaaacgtgaccccaaagaggatgtttttcagcagaatcatttattctggcttcagaattcaagtccttcctctgatcgagttagtgcaataatctgggaggggaatgagtgcaaaaagatggatatgtctgtgttggaaataagtggcatcatcatgagcagggtcaatgcctatcagcaaggagtaggttatcagatgctgggaaatgttgtcactattggattagcattttttccattcttacatcgacttttccgtgagaagagccttgaccaactaaagtccatttcagctgaggagatcttgactctcttttgtggggcaccacctgttacacctattattgttttgtcgataattaatttttttgaaagattgtgtcttacttggatgttttttttcatgatgtgtgtggcagagagaacatataaacagagatttttatttgcaaaactcttcagccatattacttctgccaggaaagctaggaaatatgaaatacctcatttcagacttaagaaggtggagaatattaaaatatggttatcactgcgttcctatctaaagagacgggggccacagcgttcagttgatgtggttgtatcctcggttttcctactgacactttcgattgctttcatttgttgtgctcaggttctccaaggacataaaactttcctgaatgatgcttataactgggagtttttgatctgggaaacagctttactactttttttattgcgtctggcctcactggggtctgaaaccaataagaaatacagcaatgtttcaatattacttacagaacagattaatttatatcttaagatggaaaaaaagccaaataagaaagaacagcttactctagtaaacaatgtattaaagctgtccaccaagttgttgaaagagctggacacaccatttagactctatggactgacaatgaatcccttaatctacaatatcacaagagtagttatcctttctgctgtctcaggtgttataagtgatcttctaggatttaatataagactgtggaaaattaaatcataagctgagtaaatgcctggactctcccctggctggtatcaaaacttacctatcaaggaaagtgatgactgcagaaaccagtgagatacccacctgcttgttcacatgcacaggtgctctcagctctgccaaagcgaatgaatggtgtttccggaggagcaagtccttttccaactgggtgtgcatgctaaaaacctgtattttcatgcttttcaaacaacatgaatagtcagctgactaaagactgtgtgtgttgtggtaacacaaagacaattttgtaagtttgcgcttcagtactgtgacagttatgtttactggacatagtcttttgggcaactatgatagatgcccaaagcatgaagcaaatatcttttattggaaatatgcaaattcaatacttttccattatagtctatagaactggagatttcatttctctatcaaagagagatcaagcgaactattttaggttaaatccgaataaaagaactttactggagactttc

SEQ ID NO: 25046 - DNA, 1063 bp, Homo sapiens
  source 1..1063: mol_type = unassigned DNA
ggcaaacaagagagaaagcaaaattttcagatggagaaaagtgccgtagggaggcttttaggcgtttgggtaatggggtgtctgatgacctgtcaagtgaagaagatggtgaagcacggacacagatgatattattgcgtaggagtgtggaaggggcctcaagtgacaatggttgtgaagttaagaatagaaaatcaatactttcaaggcacctaaactctcaggtaaagaaaaccactacaaggtggtgtcatattgtgcgggattcagatagtctggctgaatcagaatttgaatcagcagccttcagccagggctctagatcgggtgtgagtggtggctctcgaagcctcaacatgtcaagaagagactcagaaagcacccgccatgactcggagactgaggacatgttatgggacgacctgctacatggcccagagtgccggtcatctgtcaccagtgacagtgagggggcccatgtgaatacccttcactcagggaccaaacgtgaccccaaagaggatgtttttcagcagaatcatttattctggcttcagaattcaagtccttcctctgatcgagttagtgcaataatctgggaggggaatgagtgcaaaaagatggatatgtctgtgttggaaataagtggcatcatcatgagcagggtcaatgcctatcagcaaggagtaggttatcagatgctgggaaatgttgtcactattggattagcattttttccattcttacatcgacttttccgtgagaagagccttgaccaactaaagtccatttcagctgaggagatcttgactctcttttgtggggcaccacctgttacacctattattgttttgtcgataattaatttttttgaaagattgtgtcttacttggatgttttttttcatgatgtgtgtggcagagagaacatataaacaggtcagtggagaaataaggaaaattttttacctgtttttgtatatgatattccattgagttgcttttgttctcttgatttggtctctcttcaagttgatgtgggcaataaaggattgataagtgga

SEQ ID NO: 25047 - DNA, 770 bp, Homo sapiens
  source 1..770: mol_type = unassigned DNA
ggcctctccggcgtctccgcctggaggggaagatgcggcctgcctggcccgccgcctcgcccccggcctcacggtgggaccccgggcactgaggacggaggtcccgggcgccggcccgcggggcaacgggcactaggtgagagccggacgcgggcgagcgaaggaggcgggtgccgggcgactccagcggcggcccctgcccctcccccgcacccacgaacacgctcgcccgatatattgcagaggcttctccggtcgccgctgcgccagtttttttttgtttgtttgttgtgttttccctggcaaacagctggagaaagagcagctcatggagaggctgagagaagcggttttcgcgtcctacccaaactgggagagtaaccttcagcagctggactcaccgattggttttccttcattttcagtgaaatcccattctctggctggagacacagatggcctcaaatgagagagatgctatatcgtggtaccaaaagaagattggagcctacgatcagcagatatgggaaaagtcaatcgaacagactcagattaagggtttgaaaaacaaaccgaaaaagatgggccacataaagccagacttgattgacgttgacttaatcagagggtcaacatttgccaaagcaaaacctgaaattccatggacatctctgactcggaaggggcttgttcgagttgtattttttccattgttcagcaattggtggattcaggttacctctttaagaatctttgtttggctgttacta

SEQ ID NO: 25048 - DNA, 1505 bp, Homo sapiens
  source 1..1505: mol_type = unassigned DNA
ttgtttgtttgttgtgttttccctggcaaacagctggagaaagagcagctcatggagaggctgagagaagcggttttcgcgtcctacccaaactgggagagtaaccttcagcagctggactcaccgattggttttccttcattttcagtgaaatcccattctctggctggagacacagatggcctcaaatgagagagatgctatatcgtggtaccaaaagaagattggagcctacgatcagcagatatgggaaaagtcaatcgaacagactcagattaagggtttgaaaaacaaaccgaaaaagatgggccacataaagccagacttgattgacgttgacttaatcagagggtcaacatttgccaaagcaaaacctgaaattccatggacatctctgactcggaaggggcttgttcgagttgtattttttccattgttcagcaattggtggattcaggttacctctttaagaatctttgtttggctgttactactttatttcatgcaagttatagcaattgtcttatatttgatgatgcctattgtgaacataagtgaagtacttggacccttgtgccttatgctactcatgggaactgtccactgtcaaattgtgtctactcagataacaagaccatcaggaaacaatggaaatcgaagaagaagaaaattacgaaaaactgtaaatggtgatgggagccgagaaaatggaaataactcctctgataaagtcagaggaatagaaactttggaatctgtacccattattggtggtttttgggagactatctttggcaacaggaggcttttaggcgtttgggtaatggggtgtctgatgacctgtcaagtgaagaagatggtgaagcacggacacagatgatattattgcgtaggagtgtggaaggggcctcaagtgacaatggttgtgaagttaagaatagaaaatcaatactttcaaggcacctaaactctcaggtaaagaaaaccactacaaggtggtgtcatattgtgcgggattcagatagtctggctgaatcagaatttgaatcagcagccttcagccagggctctagatcgggtgtgagtggtggctctcgaagcctcaacatgtcaagaagagactcagaaagcacccgccatgactcggagactgaggacatgttatgggacgacctgctacatggcccagagtgccggtcatctgtcaccagtgacagtgagggggcccatgtgaatacccttcactcagggaccaaacgtgaccccaaagaggatgtttttcagcagaatcatttattctggcttcagaattcaagtccttcctctgatcgagttagtgcaataatctgggaggggaatgagtgcaaaaagatggatatgtctgtgttggaaataagtggcatcatcatgagcagggtcaatgcctatcagcaaggagtaggttatcagatgctgggaaatgttgtcactattggattagcattttttccattcttacatcgact

SEQ ID NO: 25049 - DNA, 3292 bp, Homo sapiens
  source 1..3292: mol_type = unassigned DNA
gtgggcggtgcacgccgtcgcttcccggaagtgcgtgctgtgggcggtgccgcgcggacccccgggaagtgtctctgtgggcggccgccgggttgagctgcggcacacgtgcgacggccgtgatgaagttcgcttaccggttttcaaatttgctgggtacggtgtaccggcgtgggaacctaaattttacctgcgatggaaattcagttatcagtcccgtgggcaatagagtcactgtatttgaccttaaaaacaacaaatctgacacgctgcccctggccactcggtacaacgtcaagtgcgtggggctgtccccggatggccgcctcgctatcatcgtcgatgaagggggcgatgcgctgctggtcagcctggtctgcaggtctgtgctgcaccacttccacttcaagggctctgtgcacagtgtgtccttctcccctgatggcaggaagtttgttgtcacaaagggtaacattgcccagatgtatcatgcccctgggaagaagcgggagttcaacgccttcgttctggacaagacctattttgggccctacgatgagaccacctgcatcgactggacggatgactccaggtgctttgtggttgggagcaaagacatgtccacctgggtgttcggagccgagcgctgggacaacctcatctactatgcactggggggacataaggatgccatcgtggcctgcttctttgaatccaacagcctggacctgtactcactcagccaggacggagtgctgtgcatgtggcagtgtgacacgccccccgagggcttgcggctgaagccccctgcgggctggaaagcagacctgttgcagcgggaggaggaagaggaggaggaggaggaccaggagggcgacagagagaccaccatccggggaaaagccactccggccgaggaggagaagacaggaaaagtgaagtactcacggctggccaagtacttcttcaataaagaaggggattttaacaacctgacagctgcagcatttcataagaagtctcacctcttggtcactggctttgcttctggaatcttccatcttcatgagctgccagagtttaacctcatccactccctgagcatttcagatcagagcatcgcctcagtggccatcaatagctcgggggactggattgcttttggctgttcaggcctgggccagctgctggtgtgggagtggcagagtgagtcctacgtgctcaagcagcagggccacttcaacagcatggtggccctggcctactcgcccgacggacagtacatcgtgactggcggggacgacggcaaggtcaaggtgtggaacaccctcagcggcttctgcttcgtcacttttacggagcactccagcggggtgaccggtgtgacctttactgccaccggctacgttgtggtgacctcatccatggacgggaccgtgcgagcctttgaccttcacaggtaccgaaacttccgcaccttcacctctccacgccccacccagttctcctgtgtggcggtggatgcgagcggtgagatcgtctctgcaggggcgcaggactcctttgagattttcgtgtggtccatgcagacaggcaggctccttgatgttttgtctggacacgaagggcccatcagtggtctgtgttttaacccaatgaagtccgtcctggccagtgcctcctgggacaagacagtgcgcctatgggacatgtttgacagctggaggaccaaggagacgctggccctgacctctgatgctctggctgtgacttttcgccctgatggtgcggagctggctgtggccacactgaactcacagatcaccttctgggaccctgagaacgcggtgcagacgggctccattgagggcaggcatgacctcaagactggcaggaaggagctggacaagattacagccaagcacgcggccaaggggaaggccttcaccgccctgtgctactctgcagacggccacagcatcctggcgggaggcatgtccaagttcgtgtgcatctaccacgtccgtgagcagattctcatgaagaggttcgagatctcttgcaacctgtctttggacgccatggaggaatttttgaaccgaagaaaaatgacagagtttggcaacctggcactaattgatcaggatgctgggcaggaggatggagtcgcgataccactgccaggcgtcaggaaaggtgacatgagttctcggcacttcaaacctgagatcagggtgacctcactccgcttctctcccactgggcgctgctgggcggccaccaccacggagggactcctcatctactccctggacacccgcgtgctctttgacccgtttgagctggacaccagcgtcacccccgggagggtgcgcgaggcactgcgccagcaggacttcaccagggccatcctcatggccctccggctcaacgagagcaaactggtgcaggaggccctggaggcggtgcccaggggcgagattgaagtggtcacctcctcccttcctgaactgtatgtggagaaagtgctggagtttttagcttcctcctttgaagtgtctcgccacctggaattctacctcctctggactcacaaactgctcatgttgcacggacagaagctgaagtccagagccgggacgctgctgcctgtcattcagttcctccagaagagcatccagcggcacctggacgacctgtcgaaactctgtagctggaaccactataacatgcagtacgcactagcagtttccaagcagcggggcacaaaacgctccctagacccgctgggaagtgaggaggaggcagaagcatctgaagatgacagcctgcatctgcttggaggaggaggcagagactcagaagaagagatgctggcctagagccagccggttgcagcgttggattgtgccggctaagacctgccagggagatgggacccttgtgccacctgggccagcaaagaggaggggtccagagaacagctgaaatactgtcactagtggtagtgacttgcttttcctgtgcacacatgtagcccatcaggacagcgagccgacgggtcacgccaggggccggcacgcactggcacctggccccaggagcggggccgtgtgaacggtgatgaatgttgaaaatgcgtctcagagaggtattcacatgaactttgtatgagacttatttatatctttaacataaaggtttgataaagaacttagggattaaaaaaaagatggagttttctaacgtgaggatgaagtctacacttcagattaaaaagggttatgttgta

SEQ ID NO: 25050 - DNA, 1976 bp, Homo sapiens
  source 1..1976: mol_type = unassigned DNA
gtgttgacagcggcggcggtggaaccgggcgggcggcgggagtcggcgcctcgggttcctacctcgcgtccctaggcggcggcggccgggcgtcccgggatggccttcatggagaagccgccagccggcaaggtgctgctggacgacacggtgccgctgacagcagccatcgaggcgagccagagcctgcagtcccacacgattgttagaagatacagtgactttgatttgcttaacaacagcttacagattgcaggcctaagtctacctcttcctcccaaaaaattgattggtaacatggatcgtgaattcatagctgaaaggcagaaaggtcttcagaactatctcaacgtgatcacaacaaatcatatcttgtctaattgtgagctggttaagaagtttttagatccaaacaactattccgcaaactatactgagattgccttgcaacaggtttccatgttcttccgatcagaaccaaagtgggaggtggtggaacctttgaaagacataggttggagaataaggaagaaatatttcttgatgaagattaaaaatcagccaaaggaacggctagtgttaagctgggctgaccttggcccagacaagtatttgtcagataaagattttcagtgtctaatcaaacttctgccttcttgtttgcacccttacatctatcgggttacctttgccacagctaatgaatcctcagcgttgctaattaggatgtttaacgaaaagggaacattgaaggatctgatctacaaggcaaaaccaaaagacccatttctaaagaagtactgcaaccctaagaagattcagggcctggaactccagcaaataaaaacatatggacggcaaatattagaggtactgaagtttcttcatgacaagggattcccttatgggcatcttcacgcctccaatgtgatgctcgatggggacacttgccggctgctggaccttgagaattccttattgggcctgccttccttctaccgatcttatttttcacaattcaggaaaatcaatacattggaaagtgtggatgtccactgctttggccacttactgtatgaaatgacttatggacgaccgccagactcggtgcctgtggactccttccctcctgccccgtccatggctgtggtggccgtgttggagtctacgctgtcttgtgaagcctgtaaaaatggcatgcctaccatctcccggctcttacagatgccattattcagcgatgttttactaaccacttctgaaaaaccacagtttaagatccctacaaagttaaaagaggcattgagaattgccaaagaatgtatagagaagagactaattgaggaacagaaacagattcaccagcatcgaagactgacaagagctcagtcccaccatggatctgaggaggaaagaaaaaaaagaaagattttagctcgaaagaagtcaaaacgatctgctcttgaaaatagtgaagagcattcagcgaagtacagcaactccaataattcagcaggatctggggccagctcacctctcacgtccccgtcatcgccaactccaccctctacatcagggatatctgcattacctccacctcctccacctccaccaccaccagcagctcccttgcctcctgcgagcaccgaggcacctgcccagctctcgtctcaggctgtgaatggcatgagccgaggggccttgctcagctccatccagaatttccaaaaaggaactttgaggaaagccaaaacctgtgatcacagtgctccgaagatcggctgaagcttcctgtttacacttggagggaaaagttcttttttattcctactcacccctaccccccaaactaccctcttcctgggaaagtaattgctgagccagtacagccacaaacagtactattttgcagatgctcatgtaagcagcttttcgagagaaataattctttaagcagaataaagttaggctggcat

SEQ ID NO: 25051 - DNA, 2037 bp, Homo sapiens
  source 1..2037: mol_type = unassigned DNA
ggggcggcgcgtgttgacagcggcggcggtggaaccgggcgggcggcgggagtcggcgcctcgggttcctacctcgcgtccctaggcggcggcggccgggcgtcccgggatggccttcatggagaagccgccagccggcaaggtgctgctggacgacacggtgccgctgacagcagccatcgaggcgagccagagcctgcagtcccacacggaatatattattcgagtgcaaagaggaatttctgtggaaaacagctggcagattgttagaagatacagtgactttgatttgcttaacaacagcttacagattgcaggcctaagtctacctcttcctcccaaaaaattgattggtaacatggatcgtgaattcatagctgaaaggcagaaaggtcttcagaactatctcaacgtgatcacaacaaatcatatcttgtctaattgtgagctggttaagaagtttttagatccaaacaactattccgcaaactatactgagattgccttgcaacaggtttccatgttcttccgatcagaaccaaagtgggaggtggtggaacctttgaaagacataggttggagaataaggaagaaatatttcttgatgaagattaaaaatcagccaaaggaacggctagtgttaagctgggctgaccttggcccagacaagtatttgtcagataaagattttcagtgtctaatcaaacttctgccttcttgtttgcacccttacatctatcgggttacctttgccacagctaatgaatcctcagcgttgctaattaggatgtttaacgaaaagggaacattgaaggatctgatctacaaggcaaaaccaaaagacccatttctaaagaagtactgcaaccctaagaagattcagggcctggaactccagcaaataaaaacatatggacggcaaatattagaggtactgaagtttcttcatgacaagggattcccttatgggcatcttcacgcctccaatgtgatgctcgatggggacacttgccggctgctggaccttgagaattccttattgggcctgccttccttctaccgatcttatttttcacaattcaggaaaatcaatacattggaaagtgtggatgtccactgctttggccacttactgtatgaaatgacttatggacgaccgccagactcggtgcctgtggactccttccctcctgccccgtccatggctgtggtggccgtgttggagtctacgctgtcttgtgaagcctgtaaaaatggcatgcctaccatctcccggctcttacagatgccattattcagcgatgttttactaaccacttctgaaaaaccacagtttaagatccctacaaagttaaaagaggcattgagaattgccaaagaatgtatagagaagagactaattgaggaacagaaacagattcaccagcatcgaagactgacaagagctcagtcccaccatggatctgaggaggaaagaaaaaaaagaaagattttagctcgaaagaagtcaaaacgatctgctcttgaaaatagtgaagagcattcagcgaagtacagcaactccaataattcagcaggatctggggccagctcacctctcacgtccccgtcatcgccaactccaccctctacatcagggatatctgcattacctccacctcctccacctccaccaccaccagcagctcccttgcctcctgcgagcaccgaggcacctgcccagctctcgtctcaggctgtgaatggcatgagccgaggggccttgctcagctccatccagaatttccaaaaaggaactttgaggaaagccaaaacctgtgatcacagtgctccgaagatcggctgaagcttcctgtttacacttggagggaaaagttcttttttattcctactcacccctaccccccaaactaccctcttcctgggaaagtaattgctgagccagtacagccacaaacagtactattttgcagatgctcatgtaagcagcttttcgagagaaataattctttaagcagaataaagttaggctggcat

SEQ ID NO: 25052 - DNA, 1928 bp, Homo sapiens
  source 1..1928: mol_type = unassigned DNA
gtgttgacagcggcggcggtggaaccgggcgggcggcgggagtcggcgcctcgggttcctacctcgcgtccctaggcggcggcggccgggcgtcccgggatggccttcatggagaagccgccagccggcaaggtgctgctggacgacacggtgccgctgacagcagccatcgaggcgagccagagcctgcagtcccacacgattgcaggcctaagtctacctcttcctcccaaaaaattgattggtaacatggatcgtgaattcatagctgaaaggcagaaaggtcttcagaactatctcaacgtgatcacaacaaatcatatcttgtctaattgtgagctggttaagaagtttttagatccaaacaactattccgcaaactatactgagattgccttgcaacaggtttccatgttcttccgatcagaaccaaagtgggaggtggtggaacctttgaaagacataggttggagaataaggaagaaatatttcttgatgaagattaaaaatcagccaaaggaacggctagtgttaagctgggctgaccttggcccagacaagtatttgtcagataaagattttcagtgtctaatcaaacttctgccttcttgtttgcacccttacatctatcgggttacctttgccacagctaatgaatcctcagcgttgctaattaggatgtttaacgaaaagggaacattgaaggatctgatctacaaggcaaaaccaaaagacccatttctaaagaagtactgcaaccctaagaagattcagggcctggaactccagcaaataaaaacatatggacggcaaatattagaggtactgaagtttcttcatgacaagggattcccttatgggcatcttcacgcctccaatgtgatgctcgatggggacacttgccggctgctggaccttgagaattccttattgggcctgccttccttctaccgatcttatttttcacaattcaggaaaatcaatacattggaaagtgtggatgtccactgctttggccacttactgtatgaaatgacttatggacgaccgccagactcggtgcctgtggactccttccctcctgccccgtccatggctgtggtggccgtgttggagtctacgctgtcttgtgaagcctgtaaaaatggcatgcctaccatctcccggctcttacagatgccattattcagcgatgttttactaaccacttctgaaaaaccacagtttaagatccctacaaagttaaaagaggcattgagaattgccaaagaatgtatagagaagagactaattgaggaacagaaacagattcaccagcatcgaagactgacaagagctcagtcccaccatggatctgaggaggaaagaaaaaaaagaaagattttagctcgaaagaagtcaaaacgatctgctcttgaaaatagtgaagagcattcagcgaagtacagcaactccaataattcagcaggatctggggccagctcacctctcacgtccccgtcatcgccaactccaccctctacatcagggatatctgcattacctccacctcctccacctccaccaccaccagcagctcccttgcctcctgcgagcaccgaggcacctgcccagctctcgtctcaggctgtgaatggcatgagccgaggggccttgctcagctccatccagaatttccaaaaaggaactttgaggaaagccaaaacctgtgatcacagtgctccgaagatcggctgaagcttcctgtttacacttggagggaaaagttcttttttattcctactcacccctaccccccaaactaccctcttcctgggaaagtaattgctgagccagtacagccacaaacagtactattttgcagatgctcatgtaagcagcttttcgagagaaataattctttaagcagaataaagttaggctggcat

SEQ ID NO: 25053 - DNA, 2031 bp, Homo sapiens
  source 1..2031: mol_type = unassigned DNA
gaaccgggcgggcggcgggagtcggcgcctcgggttcctacctcgcgtccctaggcggcggcggccgggcgtcccgggatggccttcatggagaagccgccagccggcaaggtgctgctggacgacacggtgccgctgacagcagccatcgaggcgagccagagcctgcagtcccacacggaatatattattcgagtgcaaagaggaatttctgtggaaaacagctggcagattgttagaagatacagtgactttgatttgcttaacaacagcttacagattgcaggcctaagtctacctcttcctcccaaaaaattgattggtaacatggatcgtgaattcatagctgaaaggcagaaaggtcttcagaactatctcaacgtgatcacaacaaatcatatcttgtctaattgtgagctggttaagaagtttttagatccaaacaactattccgcaaactatactgagattgccttgcaacaggtttccatgttcttccgatcagaaccaaagtgggaggtggtggaacctttgaaagacataggttggagaataaggaagaaatatttcttgatgaagattaaaaatcagccaaaggaacggctagtgttaagctgggctgaccttggcccagacaagtatttgtcagataaagattttcagtgtctaatcaaacttctgccttcttgtttgcacccttacatctatcgggttacctttgccacagctaatgaatcctcagcgttgctaattaggatgtttaacgaaaagggaacattgaaggatctgatctacaaggcaaaaccaaaagacccatttctaaagaagtactgcaaccctaagaagattcagggcctggaactccagcaaataaaaacatatggacggcaaatattagaggtactgaagtttcttcatgacaagggattcccttatgggcatcttcacgcctccaatgtgatgctcgatggggacacttgccggctgctggaccttgagaattccttattgggcctgccttccttctaccgatcttatttttcacaattcaggaaaatcaatacattggaaagtgtggatgtccactgctttggccacttactgtatgaaatgacttatggacgaccgccagactcggtgcctgtggactccttccctcctgccccgtccatggctgtggtggccgtgttggagtctacgctgtcttgtgaagcctgtaaaaatggcatgcctaccatctcccggctcttacagatgccattattcagcgatgttttactaaccacttctgaaaaaccacagtttaagatccctacaaagttaaaagaggcattgagaattgccaaagaatgtatagagaagagactaattgaggaacagaaacagattcaccagcatcgaagactgacaagagctcagtcccaccatggatctgaggaggaaagaaaaaaaagaaagattttagctcgaaagaagtcaaaacgatctgctcttgaaaatagtgaagagcattcagcgaagtacagcaactccaataattcagcaggatctggggccagctcacctctcacgtccccgtcatcgccaactccaccctctacatcagtagagcatgcaccattttgaacgtgaattttcggtaaagtaaactatgctgatttctcagactttaaagatgctctgtttctgtgtgtgaaataggacccaaagtgtctcgattgctgaagtgatgaacaagtgggaaagcagatttgagactatttccttatctgaatatttaaatgaaatacagcatctttaaaaagcacccagtgacttcatctatattcatttcattttcatcatgaccttcaaaatcttcattttcactctgatttcagttttaaaatacagctctaaaacctgcaaatcaactgcatggcattttggtatattttaattttggaaaccataactctcaaagtcccgttgctgcaaaaatgttgattcctagttactctgatgaagaggaaagagtgttaggcacttgag

SEQ ID NO: 25054 - DNA, 1635 bp, Homo sapiens
  source 1..1635: mol_type = unassigned DNA
gcgtccctaggcggcggcggccgggcgtcccgggatggccttcatggagaagccgccagccggcaaggtgctgctggacgacacggtgccgctgacagcagccatcgaggcgagccagagcctgcagtcccacacgagattgccttgcaacaggtttccatgttcttccgatcagaaccaaagtgggaggtggtggaacctttgaaagacataggttggagaataaggaagaaatatttcttgatgaagattaaaaatcagccaaaggaacggctagtgttaagctgggctgaccttggcccagacaagtatttgtcagataaagattttcagtgtctaatcaaacttctgccttcttgtttgcacccttacatctatcgggttacctttgccacagctaatgaatcctcagcgttgctaattaggatgtttaacgaaaagggaacattgaaggatctgatctacaaggcaaaaccaaaagacccatttctaaagaagtactgcaaccctaagaagattcagggcctggaactccagcaaataaaaacatatggacggcaaatattagaggtactgaagtttcttcatgacaagggattcccttatgggcatcttcacgcctccaatgtgatgctcgatggggacacttgccggctgctggaccttgagaattccttattgggcctgccttccttctaccgatcttatttttcacaattcaggaaaatcaatacattggaaagtgtggatgtccactgctttggccacttactgtatgaaatgacttatggacgaccgccagactcggtgcctgtggactccttccctcctgccccgtccatggctgtggtggccgtgttggagtctacgctgtcttgtgaagcctgtaaaaatggcatgcctaccatctcccggctcttacagatgccattattcagcgatgttttactaaccacttctgaaaaaccacagtttaagatccctacaaagttaaaagaggcattgagaattgccaaagaatgtatagagaagagactaattgaggaacagaaacagattcaccagcatcgaagactgacaagagctcagtcccaccatggatctgaggaggaaagaaaaaaaagaaagattttagctcgaaagaagtcaaaacgatctgctcttgaaaatagtgaagagcattcagcgaagtacagcaactccaataattcagcaggatctggggccagctcacctctcacgtccccgtcatcgccaactccaccctctacatcagggatatctgcattacctccacctcctccacctccaccaccaccagcagctcccttgcctcctgcgagcaccgaggcacctgcccagctctcgtctcaggctgtgaatggcatgagccgaggggccttgctcagctccatccagaatttccaaaaaggaactttgaggaaagccaaaacctgtgatcacagtgctccgaagatcggctgaagcttcctgtttacacttggagggaaaagttcttttttattcctactcacccctaccccccaaactaccctcttcctgggaaagtaattgctgagccagtacagccacaaacagtactattttgcagatgctcatgtaagcagcttttcg

SEQ ID NO: 25055 - DNA, 2495 bp, Homo sapiens
  source 1..2495: mol_type = unassigned DNA
taattgtgagctggttaagaagtttttagatccaaacaactattccgcaaactatactgagattgccttgcaacaggtttccatgttcttccgatcagaaccaaagtgggaggtggtggaacctttgaaagacataggttggagaataaggaagaaatatttcttgatgaagattaaaaatcagccaaaggaacggctagtgttaagctgggctgaccttggcccagacaagtatttgtcagataaagattttcagtgtctaatcaaacttctgccttcttgtttgcacccttacatctatcgggttacctttgccacagctaatgaatcctcagcgttgctaattaggatgtttaacgaaaagggaacattgaaggatctgatctacaaggcaaaaccaaaagacccatttctaaagaagtactgcaaccctaagaagattcagggcctggaactccagcaaataaaaacatatggacggcaaatattagaggtactgaagtttcttcatgacaagggattcccttatgggcatcttcacgcctccaatgtgatgctcgatggggacacttgccggctgctggaccttgagaattccttattgggcctgccttccttctaccgatcttatttttcacaattcaggaaaatcaatacattggaaagtgtggatgtccactgctttggccacttactgtatgaaatgacttatggacgaccgccagactcggtgcctgtggactccttccctcctgccccgtccatggctgtggtggccgtgttggagtctacgctgtcttgtgaagcctgtaaaaatggcatgcctaccatctcccggctcttacagatgccattattcagcgatgttttactaaccacttctgaaaaaccacagtttaagatccctacaaagttaaaagaggcattgagaattgccaaagaatgtatagagaagagactaattgaggaacagaaacagattcaccagcatcgaagactgacaagagctcagtcccaccatggatctgaggaggaaagaaaaaagaaagattttagctcgaaagaagtcaaaacgatctgctcttgaaaatagtgaagagcattcagcgaagtacagcaactccaataattcagcaggatctggggccagctcacctctcacgtccccgtcatcgccaactccaccctctacatcagtagagcatgcaccattttgaacgtgaattttcgggatatctgcattacctccacctcctccacctccaccaccaccagcagctcccttgcctcctgcgagcaccgaggcacctgcccagctctcgtctcaggctgtgaatggcatgagccgaggggccttgctcagctccatccagaatttccaaaaaggaactttgaggaaagccaaaacctgtgatcacagtgctccgaagatcggctgaagcttcctgtttacacttggagggaaaagttcttttttattcctactcacccctaccccccaaactaccctcttcctgggaaagtaattgctgagccagtacagccacaaacagtactattttgcagatgctcatgtaagcagcttttcgagagaaataattctttaagcagaataaagttaggctggcattgctcccttaagatcttgctcctttattaaccctgtaaaggagtcttgtttatcctctaatggccaggcttttgggacagcagcatattgaaatattttcaccaactaaaggaaatagacagaaaaacaatgacaatattcaatcacagcagtaaatggcctttgtgttgcaatcccttctaccccatcagacagctcctagaaacattcctcttacagttcatttctctaaagcattttctgattcttagataactccaatttttgctacctttatcttagacattaacactatagcccaaagcatagttactttgctaaatcagaaagcaactgagttctttgttttctcctcaaatagaatggggaacgttcacaacattctcttaagttctaacaggaataccattgtggttatagaactcagggctgctaaagcaactactctagacccatagttctttttagttagatgtattgaaacagacaaaaatattaacatcagaaaaagctcttgccaattagaggatcttcttaatcctcagcaattaagtttggggtttgaggggggcaggtcattgttacaacagaagtaaatttggcatctatagaaatcaattatgatttttgaaagatttatctaaatatatcaatatagcatctctttaatgttagtcatttattagaaagatcctttatcctgatttgcttaaacctttcaataaattgcactttaaaggattataaataatccatttaaaaattcaagtacacacatcagtgttggttactatgcagagaatgtcattgtgtatagtttcatgtaatctgttatgtcagctgtattttttattaaaatcatgtc

SEQ ID NO: 25056 - DNA, 1306 bp, Homo sapiens
  source 1..1306: mol_type = unassigned DNA
gcgccttcggctcgcgcgcgcccctccgcggcggctccaccgcccgggatggtacggtccggcagccgggccgcgcgctgccgcccctcggtgagctggtgtgggccgccgctagcggagacgaccctttccactcgcgtggtgccgtggtctgcaaatgaagagtccagaaaagaagcgaaggaagtcaaatactcagggccctgcatactcacatctgacggagtttgcaccacccccaactcccatggtggatcacctggttgcatccaacccttttgaagatgacttcggagcccccaaagtgggggttgcagcccctccattccttggcagtcctgtgcccttcggaggcttccgtgtgcaggggggcatggcgggccaggtacccccaggctacagcactggaggtggagggggcccccagccactccgtcgacagccaccccccttccctcccaatcctatgggccctgctttcaacatgcccccccagggtcctggctacccacccccaggcaacatgaactttcccagccaacccttcaaccagcctctgggtcaaaactttagtcctcccagtgggcagatgatgccgggcccagtggggggatttggtcccatgatctcacccaccatgggacagcctcccagagcagagctgggcccaccttctctgtcccaacgatttgctcagccaggggctccttttggcccttctcctctccagagacctggtcaggggctccccagcctgccgcctaacacaagtccctttcctggtccggaccctggctttcctggccctggtggtgaggatggggggaagcccttgaatccacctgcttctactgcttttccccaggagccccactcaggctccccggctgctgctgttaatgggaaccagcccagtttccccccgaacagcagtgggcggggtgggggcactccagatgccaacagcttggcaccccctggcaaggcaggtgggggctccgggccccagcctcccccaggcttggtgtacccatgtggtgcctgtcggagtgaggtgaacgatgaccaggatgccattctgtgtgaggcctcctgccagaaatggttccaccgtgagtgcacaggcatgactgagagcgcctatgggctgctgaccactgaagcttctgccgtctgggcctgcgatctctgcctcaagaccaaggagatccagtctgtctacatccgtgagggcatggggcagctggtggctgctaacgatgggtgacgctggtgaagtggcccagggaagtgcacatgtctctcc

SEQ ID NO: 25057 - DNA, 3146 bp, Homo sapiens
  source 1..3146: mol_type = unassigned DNA
gtctggagagagcgcgcagtttgcgcggcggctcggcgcttccctgtcgtcgcactttgtggttgctgcagctcgggggcctgggctgcccctgacaccccttctgggcgatggtgcagcccaagggcgcctccatcccccgccgctgccgctaacccgggtcccccactccatggccgcctcggcgccgcccccaccggacaagctggagggaggtggcggccccgcaccgccccctgcgccgcccagcaccgggaggaagcagggcaaggccggtctgcaaatgaagagtccagaaaagaagcgaaggaagtcaaatactcagggccctgcatactcacatctgacggagtttgcaccacccccaactcccatggtggatcacctggttgcatccaacccttttgaagatgacttcggagcccccaaagtgggggttgcagcccctccattccttggcagtcctgtgcccttcggaggcttccgtgtgcaggggggcatggcgggccaggtacccccaggctacagcactggaggtggagggggcccccagccactccgtcgacagccaccccccttccctcccaatcctatgggccctgctttcaacatgcccccccagggtcctggctacccacccccaggcaacatgaactttcccagccaacccttcaaccagcctctgggtcaaaactttagtcctcccagtgggcagatgatgccgggcccagtggggggatttggtcccatgatctcacccaccatgggacagcctcccagagcagagctgggcccaccttctctgtcccaacgatttgctcagccaggggctccttttggcccttctcctctccagagacctggtcaggggctccccagcctgccgcctaacacaagtccctttcctggtccggaccctggctttcctggccctggtggtgaggatggggggaagcccttgaatccacctgcttctactgcttttccccaggagccccactcaggctccccggctgctgctgttaatgggaaccagcccagtttccccccgaacagcagtgggcggggtgggggcactccagatgccaacagcttggcaccccctggcaaggcaggtgggggctccgggccccagcctcccccaggcttggtgtacccatgtggtgcctgtcggagtgaggtgaacgatgaccaggatgccattctgtgtgaggcctcctgccagaaatggttccaccgtgagtgcacaggcatgactgagagcgcctatgggctgctgaccactgaagcttctgccgtctgggcctgcgatctctgcctcaagaccaaggagatccagtctgtctacatccgtgagggcatggggcagctggtggctgctaacgatgggtgacgctggtgaagtggcccagggaagtgcacatgtctctccctgctcttccagggtgatttttttgatgtttggctcttggtccttgtttccactggctttccatccccatggggcagaaacagtggctcctgggagcagaaaaggaattgaggtgggcaggcagaagagcctggattgctcactgttttgggaaacttacatgttgagatctacagagatccaggaaaccaaagccctgctgagcagagccattttgtggctatttctggaggcccaggagtgtggctgcaagagaaaaggggctggaggaagatccggagggcaggggtgttccctctgctgatgatggatgcccctaacacctgtgcctaacacccctactgaaccccacagctccagccttagtttttggagtcaagtgttaaaggtttctggccagaggaattggggtcttgccatccctgcaatagcccttttatgggctctgggagacagctttagggaataaatggggattttcccctttttctacccactcctttgcttcctccaagacttacccaactccttccccctcagagaaccaaatagcctgaggaagcaggagagttcctggttatggcagtttcttggtgatttggggcttcaagacagtaggtgagagatgctgtcaggacgtatcttcttcataccaaagtcactggtcctttctcagcctctctcgtgcttttctcctaatgaccatatttttgccaaaaattgggatatgttatctgacagaccagaatatttgaagtttgggctgtcctgaaagtctggactttggtggtaccctcctcccccagcccatctgttgcacattatactccgtgtgttcttcaactttcggcgcccttattcccctgccttcctggcttgattgaaggaaagcttgaaaaggcgcagagccctatacctcatttcctccatgataaaaggatccaagtgaggccctgtcacagcctgtgggtaggggatgcggcgggatcctcattgccatggtactcaaaggtagaagagcctggagtttgttgcttctctttgctattctttcatatcctcttgggcctggtgattaattagcaattctcattcctctcagccaaaggcctgcactgggctttatttgtctttttttattttttaagcactgcctgccagagatgggcctggggcctgatgaggaccttagcgctgctcgttctccttttctgttcatgcacacattcctccatggggtggggaaggcaggcatggggtgtggccctcggagaagttaggagtcccccagctcaagatacagtggcaaagacctagtggtcccctacccccacttctctcagttcctggcatgaggagagaagaccctgctctggtggagctgacaacctttgaggctgggaggagagcagcctctgggcatcgttcccagtgtccctcacactaaaacggcgtagatggcaaccccccacccccaccccgctgctcaactcttgtgtttgttgttctgtttgccccatttatctgttgctgtttttgtgttgtcttcccctgctccgcattttgtaaaatggcccctgggggagtgtttttgctggatctgctccctctcgctctctcactccactactttttggaacaaagtgatggcagaatgcggtggtggtgggggtcttttgtactgttggattaataaaatgattttaaaatccca

SEQ ID NO: 25058 - DNA, 7366 bp, Homo sapiens
  source 1..7366: mol_type = unassigned DNA
cggagccgcccgctgaggtcagaaggaggcgtctgcgctgatcgggtccgccgcgcgccagagccagagtcgcagccgaggggagccggggccggagcccgagcccgagccgagccggagcccgagcgagcggcggagaccgtgcccccgcctcggccccgcgccgccgcggccaggcccggcatggaggaggagtgccgggtgctctccatacagagccacgtcatccgcggctacgtgggcaaccgggcggccacgttcccgctgcaggttttgggatttgagattgacgcggtgaactctgtccagttttcaaaccacacaggctatgcccactggaagggccaagtgctgaattcagatgagctccaggagttgtacgaaggcctgaggctgaacaacatgaataaatatgactacgtgctcacaggttatacgagggacaagtcgttcctggccatggtggtggacattgtgcaggagctgaagcagcagaaccccaggctggtgtacgtgtgtgatccagtcttgggtgacaagtgggacggcgaaggctcgatgtacgtcccggaggacctccttcccgtctacaaagaaaaagtggtgccgcttgcagacattatcacgcccaaccagtttgaggccgagttactgagtggccggaagatccacagccaggaggaagccttgcgggtgatggacatgctgcactctatgggccccgacaccgtggtcatcaccagctccgacctgccctccccgcagggcagcaactacctgattgtgctggggagtcagaggaggaggaatcccgctggctccgtggtgatggaacgcatccggatggacattcgcaaagtggacgccgtctttgtgggcactggggacctgtttgctgccatgctcctggcgtggacacacaagcaccccaataacctcaaggtggcctgtgagaagaccgtgtctaccttgcaccacgttctgcagaggaccatccagtgtgcaaaagcccaggccggggaaggagtgaggcccagccccatgcagctggagctgcggatggtgcagagcaaaagggacatcgaggacccagagatcgtcgtccaggccacggtgctgtgagggccccgccgcttgcccgtgacacgcagcgcgttggtgtctccgtgtttgtccctgtgaaaacatgtaacgtctgccttagagccatgaccgaaacttgatatttttttctttcatgagtgtccggcatctgctggtcttcattgtgaaacgtgccagtcgtgctttgtgaaaaataacaaagtggtcacagaaatttgtgatctgaaaacccggctcccttccccacaaggctcctgggcctccgggaagacgggcccctgtttgccatctcgggggtgttccctgtgggagggtgagtgggtgaggccgagcctgctgcgtgtggagcctcgagtgggccctggctgccactaccgtacagaggccgtgtcgcgctgggctgggcctgggtggcctctgtctttgcatctctgagaaggagtcgggtggtaacggttggggtcaggaagaattctgccaagtatctttactgtcattctgaccatagcctctttgttcccgcattcgaacttttggttcttactttgctgctcgtttagtccctggggatttcagatcttaggctgttgtttcaccgtatgggagggttgatgtgagcttgcttggagacacacggtgcagcatcagggaccttcccaggccccagcaaattcaagtcggtctgcagacctctcagctacccgcgggacctcttgtaacccatcggcatcttccaggaatccgccgagtgacttgaggaagatgctaacgcagtaaggtctgtgctgggccaagagcagctttgaagctccagagaaccaccccgtcaggttccttgtggaagctcccctcatccgtggtgcagcaggctgagcactgcgcgtttgccacgtgctgcccgtgacagcacattgagccacagcatttgtagacaggacagaggggtgcctgccccctgcccctgctggcacatttaacccttgtcccctgacctcagttctgtgccccaccaaatgcccaggggcaagaggccaccctggaagctgccaatcttccaaggtgggtgtggggcacggtgggggcgggcagctcccaggcccttgggcaggctggggtgacggcagaggccacagcaccagctctgacaagtcctatcatcctctgctcagcagtgacctccctggccccactttgcccagagtttggggtccccccaggtatagctataggcggcagtgcctgtccctggcctgccttgatttcagccacacccctgcagccctgcatcccagctctggggtgtgcagaggtttgtgtctccagggaacccacggctggagagaaatagggagatgcaggaagtgggggcccatggggcccccaagaagcggactctccaaggggtacccccaccccgctaccttccccacggacgggcccctcctggagcccataccctcctgtgaggccattccagtgtcttctagaaagactcgcttgccaggagtgcgttctttgttgaaaaatgccctgaagcgaaaagatgcaggtttatatggaacccccaccccctcccccactctcccactctgttcgttctgaatgtcttcacgagcgtgcatcagggcgcctggctcccccacctcagccagtgagtcagacacgggtttcgcagccatgtttcctggctccgaggacacgggtggcaggcccgttgcagcccagagccactggtccctacagggcgccgccacaccagcaggaaggaggatggctgtgtccggagcctggcggggaggcggcctccccagtatgtgagtgcagggatctgccagaaccacctggccctctgtagggcgtttaactggaaataccctcactgccaagtggagactggggcgtgtgccacattgccagccaccaggaaagcttttctttttcttttttttttttttttaaacaccaagagcacgtatagcatgggggaaagaacctaaatgtctctctgtcctgtgagctggtgaaaaacccagcatgagaacgcagtgtcaggtgtgggactccttctgcccctgcagtgggtgttacgggcggtgtgccctggcgagcaagctttgattcttggttctttgagctcgtttcagaggctgagtccccacatcagctttagttcttggacttccctgtattaagcaagaattaggagaatggctgtccctgcaggcgcctcccgtaaatcctgagctctctggcgcaatctgaaacttctcttctgttttctttggctgtatcagccgaaccaggagaggcctgggctgcgactaaggagaaagaaatcgggggtttctgagagcagatggtgcctttgtgggtgcagggcttttgtggaaattgtcagcctctacgggcagagtccggcatcccctccccagactgcctgctgtcaaaccacggagcagctggagcctgccctgtccacggcccgtttccacccgggcatgttcgtctctcctgacttcggcagaggcccctggtggccttcagtttcagtttctcatccaggaaggtaaccttgggcattggcagtgggtttccctatggcttggatccagattagaattgatctttgttttcactttccatagttaataacatgcaaaataatgagaagaatttattttaaggtgacagctatactggtccaacatcgcctgcttattgtcagggtacagaagtttaatactttcttaatccagtttttcaaacttctccctgtagaccgtaaggatgaattccacaataggatcctttttaaaatcgattttaaattgttgcctagtcctgccaaggttattatgtgcatctgttatttttccaatacatgtaaacagttgcagcatgatgctttgtttaatgtcctgttcttaagctcgttagagccagttttgaaacgtttggtcttaccgtgaacggaggctggcttggcttagccacgctgatgagtaagtgagggatgtctccatcttgagatcaccaggcaagagagttgcctgcaccaggtaagaggccaaagcccctggggtaacagtccccaccgctacccgaggtaaaacaataaaagctatgtggttgagctcaggcctctcgtgcctggtgtcagagaaggcagagcccacagtaggtgcacggtgcaaggccctgggagggcactggccagggaaggtggtatagatggccctcagattgcggggccccgagcagctccccactctgcccgtccaccttccctggctccagcctcattctctctttagtttaactatgcaaagagaggaggttgagagtgttctggcagctggagctcttttccttgtccttcctgccctccgatggggccacctgtgtcggggcagcagtgtccatgtttatggagatcagaggtgtccccactgtgtggctggactgtactctgctgcccgggtagccaggagtctctccctctctcccctgccgcctgcctggtctcatgggcctccttcacacacccctccctgtggatcgcctgcctgggcccagagcaggggaactggagtttgtgagtgagcagagcaggttatgtgcagacagggaaacgagaactttggacctggctttctgagtccaggtgagagctgtgtggccccccgatgccactctgcccgccggagggatgtgcctgctgagccttttccttccacgccgcctctcactgccaggccagcggcttccgctgagactcgctggagaggcggctcccgtgtccgtccaccgagcactcagatggatgctgatcaccagggccgagggggctcccagaaggaccccaggccctggggagggtggctgtgggaggccaagtccactgcccggaagtcttgtcagccctaagccagggaagcctggagcgtggcctggcgggtctgggtggacaccgtccccactccggactcccagcacaggggaggatacctgagcctgtatggccctgtagccctgggcagagctgggcctgtcgtgtgttcctgcctggcaggtgcaggtgctggccatctgcaggtggaaggaggtgggaatcttggattttttgtttttttttgtttttttttttttgaggtgaagtctcgctctgacacccaggctggcgtgcagtggtgtgatctcggctcactgcaaactccgcttcctgggttcaagtggttctcctgccccagcctcccaagtagctgggattacaggcatgcgccaccacgctcagctgatttttgtatttttagtagagatggggtttcaccatgttggccaagctggtctcaaactcctgacctcaagtgatctgcccgcctcggcctcccagagtgctgggattacaggcatgagccagtgcacccggcggaatcttggaatttttatagacagcacctcagtttctgactccagccgcacacctcctgcctctgccagcaggggttgccgccagaccagagccagggccaggtccctgcgtccatcccccccggtaggatggacgtgagccatccttctaggggacttttttcagtgtgcgactcgtctctgttaggtggtaggagccagtttgtgtggcctgtgccacgctccacagtgcgtggctgggctctgtgtgtggcctgtgtcccctgtccctgcaggacccagcaggcatcgtggcgtgacagctgtgtccaagccactgcccgggcatcccatcacccaccagggtgcacggtctctcctgctgggggctttctgtcgcatgtgtgtctcctgtcgactctgcagtttgttctcagagcagaatgtttcctgttctcagtgcacaaagacactggttttcaatcggcgtctaaaaccacgttcctgcctttcattgcaacacggtgtgttcatttgtttaaaacagtttaatgagtaagtttagatgactggtcaatatcttaaaaatgtatattagtaagaagttcttcctggaatttttctttcgattctggcagaataaacaggtgtttttagttttcccactgtctgagccaagcaggaccctgtcccagagcaagagatgtccccttccatctctgacccttgcctgggacaagctttgatggggggccccagcttcaaggctgtggtgggaacagcacccccaaatgccagcctctcctttcttcccatccaccagtatactgcggggccatttctggtctttgtccaacaggaaacccatttctggtgggatatgccttccagtgccacagggccactcaccccatgcatctctgtcctgcccgtcagtgctgggacggacagcaagggcaagcccagtgtctggcggataggtgggtgggaacagagaggggagaatgccgtcctaagcttctgcttggggatcccccacacgacctgggtactgcctgggaaacctgtcctaagtaaaactatggacctcgcctcgcccaccggcctgcgaagccagcatctccgtgaaggtggatggaagcgcctttgtcctcattttgagctgcaagctgggtcagcggctctgaagccctcgagtgactttctaacccaagacccagcccctggcaggaggagggtgggtgcagggctggtgggacaaaaagaggcctcagcaggcctggaagacccttccagtacatcccacagcgtgtcgagcagctgggagaacctgtgtcaagctcgagccgtcataggtccccatgaggtgtctgaagccccttcttggtgatgggaggcagaggtgctgacgttctggagcatggacgtgagtcctcagctggctccgcgtgggcccttggagggtgccaggtgtgtggtgaccttctggatgcctttaacttcatggctgcgtcattcctgatttagaactttaaccggagcttcatctagtgattgcaaaactggaccaatgggaggacggcggcgcagcccgctccctccgtggaatggagctcagctcttcggaggcatcaaagcacctgtcgcctccgtggtccccctgctgagggagtgcggcctctgcaaggttcgggggtggcttcgtttgcctggagtggccggccctgcttgtgccatgtggatgtttgtgagcctcggtcctacagcactgtgtaggctgcatctgtttcgtgctggtcctgttgacttgtatgatatccacaaataaatattttcatggcggtcgtgttga

SEQ ID NO: 25059 - DNA, 7297 bp, Homo sapiens
  source 1..7297: mol_type = unassigned DNA
cggaactcgcgggttcggagccgcccgctgaggtcagaaggaggcgtctgcgctgatcgggtccgccgcgcgccagagccagagtcgcagccgaggggagccggggccggagcccgagcccgagccgagccggagcccgagcgagcggcggagaccgtgcccccgcctcggccccgcgccgccgcggccaggcccggcatggaggaggagtgccgggtgctctccatacagagccacgtcatccgcggctacgtgggcaaccgggcggccacgttcccgctgcaggttttgggatttgagattgacgcggtgaactctgtccagttttcaaaccacacaggctatgcccactggaagggccaagtgctgaattcagatgagctccaggagttgtacgaaggcctgaggctgaacaacatgaataaatatgactacgtgctcacagtgtgtgatccagtcttgggtgacaagtgggacggcgaaggctcgatgtacgtcccggaggacctccttcccgtctacaaagaaaaagtggtgccgcttgcagacattatcacgcccaaccagtttgaggccgagttactgagtggccggaagatccacagccaggaggaagccttgcgggtgatggacatgctgcactctatgggccccgacaccgtggtcatcaccagctccgacctgccctccccgcagggcagcaactacctgattgtgctggggagtcagaggaggaggaatcccgctggctccgtggtgatggaacgcatccggatggacattcgcaaagtggacgccgtctttgtgggcactggggacctgtttgctgccatgctcctggcgtggacacacaagcaccccaataacctcaaggtggcctgtgagaagaccgtgtctaccttgcaccacgttctgcagaggaccatccagtgtgcaaaagcccaggccggggaaggagtgaggcccagccccatgcagctggagctgcggatggtgcagagcaaaagggacatcgaggacccagagatcgtcgtccaggccacggtgctgtgagggccccgccgcttgcccgtgacacgcagcgcgttggtgtctccgtgtttgtccctgtgaaaacatgtaacgtctgccttagagccatgaccgaaacttgatatttttttctttcatgagtgtccggcatctgctggtcttcattgtgaaacgtgccagtcgtgctttgtgaaaaataacaaagtggtcacagaaatttgtgatctgaaaacccggctcccttccccacaaggctcctgggcctccgggaagacgggcccctgtttgccatctcgggggtgttccctgtgggagggtgagtgggtgaggccgagcctgctgcgtgtggagcctcgagtgggccctggctgccactaccgtacagaggccgtgtcgcgctgggctgggcctgggtggcctctgtctttgcatctctgagaaggagtcgggtggtaacggttggggtcaggaagaattctgccaagtatctttactgtcattctgaccatagcctctttgttcccgcattcgaacttttggttcttactttgctgctcgtttagtccctggggatttcagatcttaggctgttgtttcaccgtatgggagggttgatgtgagcttgcttggagacacacggtgcagcatcagggaccttcccaggccccagcaaattcaagtcggtctgcagacctctcagctacccgcgggacctcttgtaacccatcggcatcttccaggaatccgccgagtgacttgaggaagatgctaacgcagtaaggtctgtgctgggccaagagcagctttgaagctccagagaaccaccccgtcaggttccttgtggaagctcccctcatccgtggtgcagcaggctgagcactgcgcgtttgccacgtgctgcccgtgacagcacattgagccacagcatttgtagacaggacagaggggtgcctgccccctgcccctgctggcacatttaacccttgtcccctgacctcagttctgtgccccaccaaatgcccaggggcaagaggccaccctggaagctgccaatcttccaaggtgggtgtggggcacggtgggggcgggcagctcccaggcccttgggcaggctggggtgacggcagaggccacagcaccagctctgacaagtcctatcatcctctgctcagcagtgacctccctggccccactttgcccagagtttggggtccccccaggtatagctataggcggcagtgcctgtccctggcctgccttgatttcagccacacccctgcagccctgcatcccagctctggggtgtgcagaggtttgtgtctccagggaacccacggctggagagaaatagggagatgcaggaagtgggggcccatggggcccccaagaagcggactctccaaggggtacccccaccccgctaccttccccacggacgggcccctcctggagcccataccctcctgtgaggccattccagtgtcttctagaaagactcgcttgccaggagtgcgttctttgttgaaaaatgccctgaagcgaaaagatgcaggtttatatggaacccccaccccctcccccactctcccactctgttcgttctgaatgtcttcacgagcgtgcatcagggcgcctggctcccccacctcagccagtgagtcagacacgggtttcgcagccatgtttcctggctccgaggacacgggtggcaggcccgttgcagcccagagccactggtccctacagggcgccgccacaccagcaggaaggaggatggctgtgtccggagcctggcggggaggcggcctccccagtatgtgagtgcagggatctgccagaaccacctggccctctgtagggcgtttaactggaaataccctcactgccaagtggagactggggcgtgtgccacattgccagccaccaggaaagcttttctttttcttttttttttttttttaaacaccaagagcacgtatagcatgggggaaagaacctaaatgtctctctgtcctgtgagctggtgaaaaacccagcatgagaacgcagtgtcaggtgtgggactccttctgcccctgcagtgggtgttacgggcggtgtgccctggcgagcaagctttgattcttggttctttgagctcgtttcagaggctgagtccccacatcagctttagttcttggacttccctgtattaagcaagaattaggagaatggctgtccctgcaggcgcctcccgtaaatcctgagctctctggcgcaatctgaaacttctcttctgttttctttggctgtatcagccgaaccaggagaggcctgggctgcgactaaggagaaagaaatcgggggtttctgagagcagatggtgcctttgtgggtgcagggcttttgtggaaattgtcagcctctacgggcagagtccggcatcccctccccagactgcctgctgtcaaaccacggagcagctggagcctgccctgtccacggcccgtttccacccgggcatgttcgtctctcctgacttcggcagaggcccctggtggccttcagtttcagtttctcatccaggaaggtaaccttgggcattggcagtgggtttccctatggcttggatccagattagaattgatctttgttttcactttccatagttaataacatgcaaaataatgagaagaatttattttaaggtgacagctatactggtccaacatcgcctgcttattgtcagggtacagaagtttaatactttcttaatccagtttttcaaacttctccctgtagaccgtaaggatgaattccacaataggatcctttttaaaatcgattttaaattgttgcctagtcctgccaaggttattatgtgcatctgttatttttccaatacatgtaaacagttgcagcatgatgctttgtttaatgtcctgttcttaagctcgttagagccagttttgaaacgtttggtcttaccgtgaacggaggctggcttggcttagccacgctgatgagtaagtgagggatgtctccatcttgagatcaccaggcaagagagttgcctgcaccaggtaagaggccaaagcccctggggtaacagtccccaccgctacccgaggtaaaacaataaaagctatgtggttgagctcaggcctctcgtgcctggtgtcagagaaggcagagcccacagtaggtgcacggtgcaaggccctgggagggcactggccagggaaggtggtatagatggccctcagattgcggggccccgagcagctccccactctgcccgtccaccttccctggctccagcctcattctctctttagtttaactatgcaaagagaggaggttgagagtgttctggcagctggagctcttttccttgtccttcctgccctccgatggggccacctgtgtcggggcagcagtgtccatgtttatggagatcagaggtgtccccactgtgtggctggactgtactctgctgcccgggtagccaggagtctctccctctctcccctgccgcctgcctggtctcatgggcctccttcacacacccctccctgtggatcgcctgcctgggcccagagcaggggaactggagtttgtgagtgagcagagcaggttatgtgcagacagggaaacgagaactttggacctggctttctgagtccaggtgagagctgtgtggccccccgatgccactctgcccgccggagggatgtgcctgctgagccttttccttccacgccgcctctcactgccaggccagcggcttccgctgagactcgctggagaggcggctcccgtgtccgtccaccgagcactcagatggatgctgatcaccagggccgagggggctcccagaaggaccccaggccctggggagggtggctgtgggaggccaagtccactgcccggaagtcttgtcagccctaagccagggaagcctggagcgtggcctggcgggtctgggtggacaccgtccccactccggactcccagcacaggggaggatacctgagcctgtatggccctgtagccctgggcagagctgggcctgtcgtgtgttcctgcctggcaggtgcaggtgctggccatctgcaggtggaaggaggtgggaatcttggattttttgtttttttttgtttttttttttttgaggtgaagtctcgctctgacacccaggctggcgtgcagtggtgtgatctcggctcactgcaaactccgcttcctgggttcaagtggttctcctgccccagcctcccaagtagctgggattacaggcatgcgccaccacgctcagctgatttttgtatttttagtagagatggggtttcaccatgttggccaagctggtctcaaactcctgacctcaagtgatctgcccgcctcggcctcccagagtgctgggattacaggcatgagccagtgcacccggcggaatcttggaatttttatagacagcacctcagtttctgactccagccgcacacctcctgcctctgccagcaggggttgccgccagaccagagccagggccaggtccctgcgtccatcccccccggtaggatggacgtgagccatccttctaggggacttttttcagtgtgcgactcgtctctgttaggtggtaggagccagtttgtgtggcctgtgccacgctccacagtgcgtggctgggctctgtgtgtggcctgtgtcccctgtccctgcaggacccagcaggcatcgtggcgtgacagctgtgtccaagccactgcccgggcatcccatcacccaccagggtgcacggtctctcctgctgggggctttctgtcgcatgtgtgtctcctgtcgactctgcagtttgttctcagagcagaatgtttcctgttctcagtgcacaaagacactggttttcaatcggcgtctaaaaccacgttcctgcctttcattgcaacacggtgtgttcatttgtttaaaacagtttaatgagtaagtttagatgactggtcaatatcttaaaaatgtatattagtaagaagttcttcctggaatttttctttcgattctggcagaataaacaggtgtttttagttttcccactgtctgagccaagcaggaccctgtcccagagcaagagatgtccccttccatctctgacccttgcctgggacaagctttgatggggggccccagcttcaaggctgtggtgggaacagcacccccaaatgccagcctctcctttcttcccatccaccagtatactgcggggccatttctggtctttgtccaacaggaaacccatttctggtgggatatgccttccagtgccacagggccactcaccccatgcatctctgtcctgcccgtcagtgctgggacggacagcaagggcaagcccagtgtctggcggataggtgggtgggaacagagaggggagaatgccgtcctaagcttctgcttggggatcccccacacgacctgggtactgcctgggaaacctgtcctaagtaaaactatggacctcgcctcgcccaccggcctgcgaagccagcatctccgtgaaggtggatggaagcgcctttgtcctcattttgagctgcaagctgggtcagcggctctgaagccctcgagtgactttctaacccaagacccagcccctggcaggaggagggtgggtgcagggctggtgggacaaaaagaggcctcagcaggcctggaagacccttccagtacatcccacagcgtgtcgagcagctgggagaacctgtgtcaagctcgagccgtcataggtccccatgaggtgtctgaagccccttcttggtgatgggaggcagaggtgctgacgttctggagcatggacgtgagtcctcagctggctccgcgtgggcccttggagggtgccaggtgtgtggtgaccttctggatgcctttaacttcatggctgcgtcattcctgatttagaactttaaccggagcttcatctagtgattgcaaaactggaccaatgggaggacggcggcgcagcccgctccctccgtggaatggagctcagctcttcggaggcatcaaagcacctgtcgcctccgtggtccccctgctgagggagtgcggcctctgcaaggttcgggggtggcttcgtttgcctggagtggccggccctgcttgtgccatgtggatgtttgtgagcctcggtcctacagcactgtgtaggctgcatctgtttcgtgctggtcctgttgacttgtatgatatccacaaataaatattttcatggcggtcgtgttga

SEQ ID NO: 25060 - DNA, 2812 bp, Homo sapiens
  source 1..2812: mol_type = unassigned DNA
attctcgagggatgccggcgggaggtgaggcgggagacttggaagcctgggcccggaagtgagatagcagaccccacgttagctgaaatgggaaaaaacttgaaggaggcagtgaagatgctggaggacagtcagagaagaacagaagaggaaaatggaaagaagctcatatccggagatattccaggcccactccagggcagtgggcaagatatggtgagcatcctccagttagttcagaatctcatgcatggagatgaagatgaggagccccagagccccagaatccaaaatattggagaacaaggtcatatggctttgttgggacatagtctgggagcttatatttcaactctggacaaagagaagctgagaaaacttacaactaggatactttcagataccaccttatggctatgcagaattttcagatatgaaaatgggtgtgcttatttccacgaagaggaaagagaaggacttgcaaagatatgtaggcttgccattcattctcgatatgaagacttcgtagtggatggcttcaatgtgttatataacaagaagcctgtcatatatcttagtgctgctgctagacctggcctgggccaatacctttgtaatcagctcggcttgcccttcccctgcttgtgccgtgtaccctgtaacactgtgtttggatcccagcatcagatggatgttgccttcctggagaaactgattaaagatgatatagagcgaggaagactgcccctgttgcttgtcgcaaatgcaggaacggcagcagtaggacacacagacaagattgggagattgaaagaactctgtgagcagtatggcatatggcttcatgtggagggtgtgaatctggcaacattggctctgggttatgtctcctcatcagtgctggctgcagccaaatgtgatagcatgacgatgactcctggcccgtggctgggtttgccagctgttcctgcggtgacactgtataaacacgatgaccctgccttgactttagttgctggtcttacatcaaataagcccacagacaaactccgtgccctgcctctgtggttatctttacaatacttgggacttgatgggtttgtggagaggatcaagcatgcctgtcaactgagtcaacggttgcaggaaagtttgaagaaagtgaattacatcaaaatcttggtggaagatgagctcagctccccagtggtggtgttcagatttttccaggaattaccaggctcagatccggtgtttaaagccgtcccagtgcccaacatgacaccttcaggagtcggccgggagaggcactcgtgtgacgcgctgaatcgctggctgggagaacagctgaagcagctggtgcctgcaagcggcctcacagtcatggatctggaagctgagggcacgtgtttgcggttcagccctttgatgaccgcagcagttttaggaactcggggagaggatgtggatcagctcgtagcctgcatagaaagcaaactgccagtgctgtgctgtacgctccagttgcgtgaagagttcaagcaggaagtggaagcaacagcaggtctcctatatgttgatgaccctaactggtctggaataggggttgtcaggtatgaacatgctaatgatgataagagcagtttgaaatcagatcccgaaggggaaaacatccatgctggactcctgaagaagttaaatgaactggaatctgacctaacctttaaaataggccctgagtataagagcatgaagagctgcctttatgtcggcatggcgagcgacaacgtcgatgctgctgagctcgtggagaccattgcggccacagcccgggagatagaggagaactcgaggcttctggaaaacatgacagaagtggttcggaaaggcattcaggaagctcaagtggagctgcagaaggcaagtgaagaacggcttctggaagagggggtgttgcggcagatccctgtagtgggctccgtgctgaattggttttctccggtccaggctttacagaagggaagaacttttaacttgacagcaggctctctggagtccacagaacccatatatgtctacaaagcacaaggtgcaggagtcacgctgcctccaacgccctcgggcagtcgcaccaagcagaggcttccaggccagaagccttttaaaaggtccctgcgaggttcagatgctttgagtgagaccagctcagtcagtcacattgaagacttagaaaaggtggagcgcctatccagtgggccggagcagatcaccctcgaggccagcagcactgagggacacccaggggctcccagccctcagcacaccgaccagaccgaggccttccagaaaggggtcccacacccagaagatgaccactcacaggtagaaggaccggagagcttaagatgagactcattgtgtggtttgagactgtactgagtattgtttcagggaagatgaagttctattggaaatgtgaactgtgccacatactaatataaattactgttgtttgtgcttcactgggattttggcacaaatatgtgcctgaaaggtaggctttctaggaggggagtcagcttgtctaacttcatgtacatgtagaaccacgtttgctgtcctactacgacttttccctaagttaccataaacacattttattcacaaaaaacacttcgaatttcaagtgtctaccagtagcacccttgctctttctaaacataagcctaagtatatgaggttgcccgtggcaactttttggtaaaacagcttttcattagcactctccaggttctctgcaacacttcacaga

SEQ ID NO: 25061 - DNA, 3875 bp, Homo sapiens
  source 1..3875: mol_type = unassigned DNA
cgggggacgtcagcgctgccagcgtggaaggagctgcggggcgcgggaggaggaagtagagcccgggaccgccaggccaccaccggccgcctcagccatggacgcgtccctggagaagatagcagaccccacgttagctgaaatgggaaaaaacttgaaggaggcagtgaagatgctggaggacagtcagagaagaacagaagaggaaaatggaaagaagctcatatccggagatattccaggcccactccagggcagtgggcaagatatggtgagcatcctccagttagttcagaatctcatgcatggagatgaagatgaggagccccagagccccagaatccaaaatattggagaacaaggtcatatggctttgttgggacatagtctgggagcttatatttcaactctggacaaagagaagctgagaaaacttacaactaggatactttcagataccaccttatggctatgcagaattttcagatatgaaaatgggtgtgcttatttccacgaagaggaaagagaaggacttgcaaagatatgtaggcttgccattcattctcgatatgaagacttcgtagtggatggcttcaatgtgttatataacaagaagcctgtcatatatcttagtgctgctgctagacctggcctgggccaatacctttgtaatcagctcggcttgcccttcccctgcttgtgccgtgtaccctgtaacactgtgtttggatcccagcatcagatggatgttgccttcctggagaaactgattaaagatgatatagagcgaggaagactgcccctgttgcttgtcgcaaatgcaggaacggcagcagtaggacacacagacaagattgggagattgaaagaactctgtgagcagtatggcatatggcttcatgtggagggtgtgaatctggcaacattggctctgggttatgtctcctcatcagtgctggctgcagccaaatgtgatagcatgacgatgactcctggcccgtggctgggtttgccagctgttcctgcggtgacactgtataaacacgatgaccctgccttgactttagttgctggtcttacatcaaataagcccacagacaaactccgtgccctgcctctgtggttatctttacaatacttgggacttgatgggtttgtggagaggatcaagcatgcctgtcaactgagtcaacggttgcaggaaagtttgaagaaagtgaattacatcaaaatcttggtggaagatgagctcagctccccagtggtggtgttcagatttttccaggaattaccaggctcagatccggtgtttaaagccgtcccagtgcccaacatgacaccttcaggagtcggccgggagaggcactcgtgtgacgcgctgaatcgctggctgggagaacagctgaagcagctggtgcctgcaagcggcctcacagtcatggatctggaagctgagggcacgtgtttgcggttcagccctttgatgaccgcagcagttttaggaactcggggagaggatgtggatcagctcgtagcctgcatagaaagcaaactgccagtgctgtgctgtacgctccagttgcgtgaagagttcaagcaggaagtggaagcaacagcaggtctcctatatgttgatgaccctaactggtctggaataggggttgtcaggtatgaacatgctaatgatgataagagcagtttgaaatcagatcccgaaggggaaaacatccatgctggactcctgaagaagttaaatgaactggaatctgacctaacctttaaaataggccctgagtataagagcatgaagagctgcctttatgtcggcatggcgagcgacaacgtcgatgctgctgagctcgtggagaccattgcggccacagcccgggagatagaggagaactcgaggcttctggaaaacatgacagaagtggttcggaaaggcattcaggaagctcaagtggagctgcagaaggcaagtgaagaacggcttctggaagagggggtgttgcggcagatccctgtagtgggctccgtgctgaattggttttctccggtccaggctttacagaagggaagaacttttaacttgacagcaggctctctggagtccacagaacccatatatgtctacaaagcacaaggtgcaggagtcacgctgcctccaacgccctcgggcagtcgcaccaagcagaggcttccaggccagaagccttttaaaaggtccctgcgaggttcagatgctttgagtgagaccagctcagtcagtcacattgaagacttagaaaaggtggagcgcctatccagtgggccggagcagatcaccctcgaggccagcagcactgagggacacccaggggctcccagccctcagcacaccgaccagaccgaggccttccagaaaggggtcccacacccagaagatgaccactcacaggtagaaggaccggagagcttaagatgagactcattgtgtggtttgagactgtactgagtattgtttcagggaagatgaagttctattggaaatgtgaactgtgccacatactaatataaattactgttgtttgtgcttcactgggattttggcacaaatatgtgcctgaaaggtaggctttctaggaggggagtcagcttgtctaacttcatgtacatgtagaaccacgtttgctgtcctactacgacttttccctaagttaccataaacacattttattcacaaaaaacacttcgaatttcaagtgtctaccagtagcacccttgctctttctaaacataagcctaagtatatgaggttgcccgtggcaactttttggtaaaacagcttttcattagcactctccaggttctctgcaacacttcacagaggcgagactggctgtatcctttgctgtcggtctttagtacgatcaagttgcaatatacagtgggactgctagacttgaaggagagcagtgattgtgggattgtaaataagagcatcagaagccctccccagctactgctcttcgtggagacttagtaaggactgtgtctacttgagctgtggcaaggctgctgtctgggactgtcctctgccacaaggccatttctcccattatataccgtttgtaaagagaaactgtaaagtctcctcctgaccatatatttttaaatactggcaaagcttttaaaattggcacacaagtacagactgtgctcatttctgtttagtatctgaaaacctgatagatgctacccttaagagcttgctcttccgtgtgctacgtagcacccacctggttaaaatctgaaaacaagtacccctttgacctgtctcccactgaagcttctactgccctggcagctcgcctgggcccaactcagaaacaggagccagcagagcactctctcacgctgatccagccgggcaccctgcttaagtcagtagaagctcgctggcactgcccgttcctacttttccgaagtactgcgtcactttgtcgtaagtaatggcccctgtgccttcttaatccagcagtcaagcttttgggagacctgaaaatgggaaaattcacactgggtttctggactgtagtattggaagccttagttatagtatattaagcctataattatactctgatttgatgggatttttgacatttacacttgtcaaaatgcagggggttttttttggtgcagatgattaaacagtcttccctatttggtgcaatgaagtatagcagataaaatgggggaggggtaaattatcaccttcaagaaaattacatgtttttatatatatttggaattgttaaattggttttgctgaaacatttcacccttgagatattatttgaatgttggtttcaataaaggttcttgaaattgtt

SEQ ID NO: 25062 - DNA, 2533 bp, Homo sapiens
  source 1..2533: mol_type = unassigned DNA
atttccagcctttcactccatgaatagtactttgtgattattatacttctaccttgatgattgcaacaggctgctggaaagagtttggtgaacaatccaccgggcatcctccccccttcacctgcgcacgttagggagggccggcgtggcgcccagacggactctcaccctgtcgcccaggctggagtgcaatggcgccatctcggttcactgcaacctccgcctcccgggttcaaacgattctcctgcctcagcctcctgagtagctggggttacaggcacaccaccacgcccagatagcagaccccacgttagctgaaatgggaaaaaacttgaaggaggcagtgaagatgctggaggacagtcagagaagaacagaagaggaaaatggaaagaagctcatatccggagatattccaggcccactccagggcagatatgaaaatgggtgtgcttatttccacgaagaggaaagagaaggacttgcaaagatatgtaggcttgccattcattctcgatatgaagacttcgtagtggatggcttcaatgtgttatataacaagaagcctgtcatatatcttagtgctgctgctagacctggcctgggccaatacctttgtaatcagctcggcttgcccttcccctgcttgtgccgtgtaccctgtaacactgtgtttggatcccagcatcagatggatgttgccttcctggagaaactgattaaagatgatatagagcgaggaagactgcccctgttgcttgtcgcaaatgcaggaacggcagcagtaggacacacagacaagattgggagattgaaagaactctgtgagcagtatggcatatggcttcatgtggagggtgtgaatctggcaacattggctctgggttatgtctcctcatcagtgctggctgcagccaaatgtgatagcatgacgatgactcctggcccgtggctgggtttgccagctgttcctgcggtgacactgtataaacacgatgaccctgccttgactttagttgctggtcttacatcaaataagcccacagacaaactccgtgccctgcctctgtggttatctttacaatacttgggacttgatgggtttgtggagaggatcaagcatgcctgtcaactgagtcaacggttgcaggaaagtttgaagaaagtgaattacatcaaaatcttggtggaagatgagctcagctccccagtggtggtgttcagatttttccaggaattaccaggctcagatccggtgtttaaagccgtcccagtgcccaacatgacaccttcaggagtcggccgggagaggcactcgtgtgacgcgctgaatcgctggctgggagaacagctgaagcagctggtgcctgcaagcggcctcacagtcatggatctggaagctgagggcacgtgtttgcggttcagccctttgatgaccgcagcagttttaggaactcggggagaggatgtggatcagctcgtagcctgcatagaaagcaaactgccagtgctgtgctgtacgctccagttgcgtgaagagttcaagcaggaagtggaagcaacagcaggtctcctatatgttgatgaccctaactggtctggaataggggttgtcaggtatgaacatgctaatgatgataagagcagtttgaaatcagatcccgaaggggaaaacatccatgctggactcctgaagaagttaaatgaactggaatctgacctaacctttaaaataggccctgagtataagagcatgaagagctgcctttatgtcggcatggcgagcgacaacgtcgatgctgctgagctcgtggagaccattgcggccacagcccgggagatagaggagaactcgaggcttctggaaaacatgacagaagtggttcggaaaggcattcaggaagctcaagtggagctgcagaaggcaagtgaagaacggcttctggaagagggggtgttgcggcagatccctgtagtgggctccgtgctgaattggttttctccggtccaggctttacagaagggaagaacttttaacttgacagcaggctctctggagtccacagaacccatatatgtctacaaagcacaaggtgcaggagtcacgctgcctccaacgccctcgggcagtcgcaccaagcagaggcttccaggccagaagccttttaaaaggtccctgcgaggttcagatgctttgagtgagaccagctcagtcagtcacattgaagacttagaaaaggtggagcgcctatccagtgggccggagcagatcaccctcgaggccagcagcactgagggacacccaggggctcccagccctcagcacaccgaccagaccgaggccttccagaaaggggtcccacacccagaagatgaccactcacaggtagaaggaccggagagcttaagatgagactcattgtgtggtttgagactgtactgagtattgtttcagggaagatgaagttctattggaaatgtgaactgtgccacatactaatataaattactgttgtttgtgcttcactggga

SEQ ID NO: 25063 - DNA, 2683 bp, Homo sapiens
  source 1..2683: mol_type = unassigned DNA
gaaggagctgcggggcgcgggaggaggaagtagagcccgggaccgccaggccaccaccggccgcctcagccatggacgcgtccctggagaagatagcagaccccacgttagctgaaatgggaaaaaacttgaaggaggcagtgaagatgctggaggacagtcagagaacagaagaggaaaatggaaagaagctcatatccggagatattccaggcccactccagggcagaatccaaaatattggagaacaaggtcatatggctttgttgggacatagtctgggagcttatatttcaactctggacaaagagaagctgagaaaacttacaactaggatactttcagataccaccttatggctatgcagaattttcagatatgaaaatgggtgtgcttatttccacgaagaggaaagagaaggacttgcaaagatatgtaggcttgccattcattctcgatatgaagacttcgtagtggatggcttcaatgtgttatataacaagaagcctgtcatatatcttagtgctgctgctagacctggcctgggccaatacctttgtaatcagctcggcttgcccttcccctgcttgtgccgtgtaccctgtaacactgtgtttggatcccagcatcagatggatgttgccttcctggagaaactgattaaagatgatatagagcgaggaagactgcccctgttgcttgtcgcaaatgcaggaacggcagcagtaggacacacagacaagattgggagattgaaagaactctgtgagcagtatggcatatggcttcatgtggagggtgtgaatctggcaacattggctctgggttatgtctcctcatcagtgctggctgcagccaaatgtgatagcatgacgatgactcctggcccgtggctgggtttgccagctgttcctgcggtgacactgtataaacacgatgaccctgccttgactttagttgctggtcttacatcaaataagcccacagacaaactccgtgccctgcctctgtggttatctttacaatacttgggacttgatgggtttgtggagaggatcaagcatgcctgtcaactgagtcaacggttgcaggaaagtttgaagaaagtgaattacatcaaaatcttggtggaagatgagctcagctccccagtggtggtgttcagatttttccaggaattaccaggctcagatccggtgtttaaagccgtcccagtgcccaacatgacaccttcaggagtcggccgggagaggcactcgtgtgacgcgctgaatcgctggctgggagaacagctgaagcagctggtgcctgcaagcggcctcacagtcatggatctggaagctgagggcacgtgtttgcggttcagccctttgatgaccgcagcagttttaggaactcggggagaggatgtggatcagctcgtagcctgcatagaaagcaaactgccagtgctgtgctgtacgctccagttgcgtgaagagttcaagcaggaagtggaagcaacagcaggtctcctatatgttgatgaccctaactggtctggaataggggttgtcaggtatgaacatgctaatgatgataagagcagtttgaaatcagatcccgaaggggaaaacatccatgctggactcctgaagaagttaaatgaactggaatctgacctaacctttaaaataggccctgagtataagagcatgaagagctgcctttatgtcggcatggcgagcgacaacgtcgatgctgctgagctcgtggagaccattgcggccacagcccgggagatagaggagaactcgaggcttctggaaaacatgacagaagtggttcggaaaggcattcaggaagctcaagtggagctgcagaaggcaagtgaagaacggcttctggaagagggggtgttgcggcagatccctgtagtgggctccgtgctgaattggttttctccggtccaggctttacagaagggaagaacttttaacttgacagcaggctctctggagtccacagaacccatatatgtctacaaagcacaaggtgcaggagtcacgctgcctccaacgccctcgggcagtcgcaccaagcagaggcttccaggccagaagccttttaaaaggtccctgcgaggttcagatgctttgagtgagaccagctcagtcagtcacattgaagacttagaaaaggtggagcgcctatccagtgggccggagcagatcaccctcgaggccagcagcactgagggacacccaggggctcccagccctcagcacaccgaccagaccgaggccttccagaaaggggtcccacacccagaagatgaccactcacaggtagaaggaccggagagcttaagatgagactcattgtgtggtttgagactgtactgagtattgtttcagggaagatgaagttctattggaaatgtgaactgtgccacatactaatataaattactgttgtttgtgcttcactgggattttggcacaaatatgtgcctgaaaggtaggctttctaggaggggagtcagcttgtctaacttcatgtacatgtagaaccacgtttgctgtcctactacgacttttccctaagttaccataaacacattttattcacaaaaaacacttcgaatttcaagtgtctaccagtagcacccttgctctttctaaacataagcctaagtatatga

SEQ ID NO: 25064 - DNA, 2058 bp, Homo sapiens
  source 1..2058: mol_type = unassigned DNA
ttaagcagcacacttagaagaatagcagaccccacgttagctgaaatgggaaaaaacttgaaggaggcagtgaagatgctggaggacagtcagagaagaacagaagaggaaaatggaaagaagctcatatccggagatattccaggcccactccagggcagtgggcaagatatggtgagcatcctccagttagttcagaatctcatgcatggagatgaagatgaggagccccagagccccagaatccaaaatattggagaacaaggtcatatggctttgttgggacatagtctgggagcttatatttcaactctggacaaagagaagctgagaaaacttacaactaggatactttcagataccaccttatggctatgcagaattttcagatatgaaaatgggtgtgcttatttccacgaagaggaaagagaaggacttgcaaagatatgtaggcttgccattcattctcgatatgaagacttcgtagtggatggcttcaatgtgttatataacaagaagcctgtcatatatcttagtgctgctgctagacctggcctgggccaatacctttgtaatcaggatgttgccttcctggagaaactgattaaagatgatatagagcgaggaagactgcccctgttgcttgtcgcaaatgcaggaacggcagcagtaggacacacagacaagattgggagattgaaagaactctgtgagcagtatggcatatggcttcatgtggagggtgtgaatctggcaacattggctctgggttatgtctcctcatcagtgctggctgcagccaaatgtgatagcatgacgatgactcctggcccgtggctgggtttgccagctgttcctgcggtgacactgtataaacacgatgaccctgccttgactttagttgctggtcttacatcaaataagcccacagacaaactccgtgccctgcctctgtggttatctttacaatacttgggacttgatgggtttgtggagaggatcaagcatgcctgtcaactgagtcaacggttgcaggaaagtttgaagaaagtgaattacatcaaaatcttggtggaagatgagctcagctccccagtggtggtgttcagatttttccaggaattaccaggctcagatccggtgtttaaagccgtcccagtgcccaacatgacaccttcaggagtcggccgggagaggcactcgtgtgacgcgctgaatcgctgggtgagaatggcagtcacccccctttcctttcaggtccccgtccatcaccatccgacctgctggtgagggtgacgcgtgctcgtgtatgggaactgaggcccacaggaggagccgccctgccagtgctgggcctgctctggagttctgttccccattgcgttaccacctcacgagctgggtcacctctggcaagtccttctggcattgctccctcactttccttgctgctgtataaggctgtgagacaacaggcaaaaggtgggctgcagggcagctgcggtgggttctggtgagcctgggcagcacagccgggagccccaggcagagtctgccgagcatctgcagctggcagtgtggagccaggcctgcactttgatagcgttttgggcactgaatagcagctctaggatttgagtctgaagggtcttgtgaacagtgtgggatggcggcagcagcagttctagccaatgctggacacgcccagcctagcagggttggcagataagtcctggtacatccatgctggggctcagcacagctgtgagagaccacagagctgagtgtctcaagcagaaaggaactggtcataaacgaaatgaatcaatgcaggttactaagcagtgtcaagtagcatgttttatgacaacaactacaactccctgcccgccactaggagaaaagacgctgggggcagaccacatgtcagcagtgggtgtcgcttagtaatatattgtgggtcattgttattttcttctttttgtttacttgtatttcctaaatttttctacaatgaacttgtattaataagaaaaaaccataaaatttactgttttt

SEQ ID NO: 25065 - DNA, 2047 bp, Homo sapiens
  source 1..2047: mol_type = unassigned DNA
ccccgccccgccgcctctcaaccatcaggttcggcagcccgcggcgccgcctggcagctcctcctcttctccgccccgccggccgcgggcgcgggggacgtcagcgctgccagcgtggaaggagctgcggggcgcgggaggaggaagtagagcccgggaccgccaggccaccaccggccgcctcagccatggacgcgtccctggagaagatagcagaccccacgttagctgaaatgggaaaaaacttgaaggaggcagtgaagatgctggaggacagtcagagaagaacagaagaggaaaatggaaagaagctcatatccggagatattccaggcccactccagggcagtgggcaagatatggtgagcatcctccagttagttcagaatctcatgcatggagatgaagatgaggagccccagagccccagaatccaaaatattggagaacaaggtcatatggctttgttgggacatagtctgggagcttatatttcaactctggacaaagagaagctgagaaaacttacaactaggatactttcagataccaccttatggctatgcagaattttcagatatgaaaatgggtgtgcttatttccacgaagaggaaagagaaggacttgcaaagatatgtaggcttgccattcattctcgatatgaagacttcgtagtggatggcttcaatgtgttatataacaagaagcctgtcatatatcttagtgctgctgctagacctggcctgggccaatacctttgtaatcagctcggcttgcccttcccctgcttgtgccgtgtaccctgtaacactgtgtttggatcccagcatcagatggatgttgccttcctggagaaactgattaaagatgatatagagcgaggaagactgcccctgttgcttgtcgcaaatgcaggaacggcagcagtaggacacacagacaagattgggagattgaaagaactctgtgagcagtatggcatatggcttcatgtggagggtgtgaatctggcaacattggctctgggttatgtctcctcatcagtgctggctgcagccaaatgtgatagcatgacgatgactcctggcccgtggctgggtttgccagctgttcctgcggtgacactgtataaacacgatgaccctgccttgactttagttgctggtcttacatcaaataagcccacagacaaactccgtgccctgcctctgtggttatctttacaatacttgggacttgatgggtttgtggagaggatcaagcatgcctgtcaactgagtcaacggttgcaggaaagtttgaagaaagtgaattacatcaaaatcttggtggaagatgagctcagctccccagtggtggtgttcagatttttccaggaattaccaggctcagatccggtgtttaaagccgtcccagtgcccaacatgacaccttcaggagtcggccgggagaggcactcgtgtgacgcgctgaatcgctggctgggagaacagctgaagcagctggtgcctgcaagcggcctcacagtcatggatctggaagctgagggcacgtgtttgcggttcagccctttgatgaccgcagcagggtggtcccactgtgggaccacaaccaggtatgactgtgtgagaagcaggctcactaccaggctaccagggagcacaggggagcaggcgccaccttgaggcataaacccagagaaacaagacctccaagacggccaggcactggggcacacgccggtaacacagcaccgtgggagctgagacggaaggatcgcctgagcccaggattttgaaaccaccctgggcaacacagtgagaccccgtatctacaaaaaaatacacattagccaggcatggcggcatgcgcctggggtcccaagtactcgggaggtagaggagagaaaaatcacttgagcccagagaggtcaaggctacagggagctgagatcgcatcactgtactccagctggggtgaaacggcgagactctacctcaaaaataaataaatacatacataattaataaataaaacatcaaagacc

SEQ ID NO: 25066 - DNA, 1819 bp, Homo sapiens
  source 1..1819: mol_type = unassigned DNA
gaggaagtagagcccgggaccgccaggccaccaccggccgcctcagccatggacgcgtccctggagaagatagcagaccccacgttagctgaaatgggaaaaaacttgaaggaggcagtgaagatgctggaggacagtcagagaagaacagaagaggaaaatggaaagaagctcatatccggagatattccaggcccactccagggcagtgggcaagatatggtgagcatcctccagttagttcagaatctcatgcatggagatgaagatgaggagccccagagccccaggtaatgaacctggcagcttctcttttcaagtaatccaaaatattggagaacaaggtcatatggctttgttgggacatagtctgggagcttatatttcaactctggacaaagagaagctgagaaaacttacaactaggatactttcagataccaccttatggctatgcagaattttcagatatgaaaatgggtgtgcttatttccacgaagaggaaagagaaggacttgcaaagatatgtaggcttgccattcattctcgatatgaagacttcgtagtggatggcttcaatgtgttatataacaagaagcctgtcatatatcttagtgctgctgctagacctggcctgggccaatacctttgtaatcagctcggcttgcccttcccctgcttgtgccgtgtaccctgtaacactgtgtttggatcccagcagtaggacacacagacaagattgggagattgaaagaactctgtgagcagtatggcatatggcttcatgtggagggtgtgaatctggcaacattggctctgggttatgtctcctcatcagtgctggctgcagccaaatgtgatagcatgacgatgactcctggcccgtggctgggtttgccagctgttcctgcggtgacactgtataaacacgatgaccctgccttgactttagttgctggtcttacatcaaataagcccacagacaaactccgtgccctgcctctgtggttatctttacaatacttgggacttgatgggtttgtggagaggatcaagcatgcctgtcaactgagtcaacggttgcaggaaagtttgaagaaagtgaattacatcaaaatcttggtggaagatgagctcagctccccagtggtggtgttcagatttttccaggaattaccaggctcagatccggtgtttaaagccgtcccagtgcccaacatgacaccttcaggagtcggccgggagaggcactcgtgtgacgcgctgaatcgctggctgggagaacagctgaagcagctggtgcctgcaagcggcctcacagtcatggatctggaagctgagggcacgtgtttgcggttcagccctttgatgaccgcagcagggtggtcccactgtgggaccacaaccaggtatgactgtgtgagaagcaggctcactaccaggctaccagggagcacaggggagcaggcgccaccttgaggcataaacccagagaaacaagacctccaagacggccaggcactggggcacacgccggtaacacagcaccgtgggagctgagacggaaggatcgcctgagcccaggattttgaaaccaccctgggcaacacagtgagaccccgtatctacaaaaaaatacacattagccaggcatggcggcatgcgcctggggtcccaagtactcgggaggtagaggagagaaaaatcacttgagcccagagaggtcaaggctacagggagctgagatcgcatcactgtactccagctggggtgaaacggcgagactctacctcaaaaataaataaatacatacataatt

SEQ ID NO: 25067 - DNA, 3464 bp, Homo sapiens
  source 1..3464: mol_type = unassigned DNA
cattggctccgaggacttaggacctgttagcttggttgggcgactggcaaatccttccttccccggggtagaagtccagggtgagaaattggttccgaactcaaaggaacccagtgccgggccacagccgggtcacgtggccggcggccccccatgacgtgctggctgcggggcgtcacggcgacgttcgggcgacctgccgagtggccaggctacctcagtcacctgtgtggtcgcagtgctgccatggacctgggacccatgcgcaagagttaccgcggggaccgagaggcatttgaggagactcatctgacctcccttgacccagtgaaacagtttgctgcctggtttgaggaggctgttcagtgtcctgacataggggaagccaatgccatgtgtctggctacctgcaccagagatggaaaaccctctgctcgcatgttgctgctgaagggcttcgggaaagatggcttccgcttcttcactaacttcgagagtcgaaaaggaaaagagctggactctaatccctttgcttcccttgtcttctactgggagccacttaaccgtcaggtgcgtgtggaaggccctgtgaagaaactgcctgaggaggaggctgagtgctacttccactcccgccccaagagcagccagattggggctgtggtcagccaccagagttctgtgatccctgatcgggagtatctgagaaagaaaaatgaggaactggaacagctctaccaggatcaagaggtgcccaagccaaaatcctggggtggctatgtcctgtaccctcaggtgatggagttctggcaaggtcaaaccaaccgcctgcatgaccggatagtctttcggcggggcctacccacaggagattcccctttggggcccatgacccaccgcggggaggaagactggctctatgagagacttgcaccttaactctgggacctgctggcccagagtggagctagggctaggtgtcaagagagggtgtgggattgggacccaggcccttctttctaaactcaacccatttccctccctaccccttatcttcaggactcttcagagctaatcctctaagttctctgtactcagttggttctcagttagctggtcaagtggagtgtaatggtggcgtagagaatcacaaatggaaaataattccataattatttttttgaccttgcctatgattgattaggatagctccctctaggggtagcagccggtgtgactccctttctggtgacagacagggccccagcagccctgtctgttaccatgtgagtcatactggccaaagcttagtcctagcatatgcacctgagccaacctggccaatcagattgttttgtcaataatttgaaatttgaactggagagatccagaaccttgggagtcattaaagccaagtcattcatagcagccaggaaacaataggaaccaaaagcctctgcctgctgctattgcaattcccaggatctctccttccctggatccctccctcccaggtctgggctgtgcagttcctccccctgccttaaaacaccccactatctctgtaaagtctctctctctcttttttttttttttacttaatctagctagaatctatttctgttgattacaacttaactaactcatttacggataggacttttttttttctttttttcttttttcttttcttttttttttttgagatggagtctcactctgtcacccaggctggagtgcagtggtgtgatcttggctcactgcaacctctgcctcccaggttcaagcaattctcctgcctcagcctcccaagtagctgggactacaggcacacgccaccacacccaactaatttttgtatttttagtagagatggggtttcaccatgttggccaggattgtctccatctcttgaccttgtgatccacccacctcagcctcccaaagtgctgggattacaggcatgagccaccacacccagcgagacggggtttcattatgttggccaggctggtctccaactcctgacctaaagtgatctgcccgccttggcctcccaaagtgctgggattacagacatgagccaccacgcttggccgggatagtatatttttatagcacttcccctactgattgctgccttctctgtggctacaagggacccacagaattacagggaagttacagggaagcaggtttcatctcaatattgggagagatttcaaacaatcacacctgcctgagaaggagtgggctgtcactaggaatttttattcccagtccgtcaggaattttgtagaagggcttcatgtgctggtaccaataggacaggaagattttaatcagctttactatctatgtttttttatggaaactgtgtgtatgtatacatacattttccaaaaagaaaaattaaatgattatagagattatgtttttcagactactcacgtatctgcttttcttactccccacctctgctgataattcctagttcattggtttttcccccacactggaattacctggggagcttaaaaaaccctgatgcctgggtcccaccctcagagatgattgaaccagcctggccagcatggcaaaaccctgtctctactatgatatgaatgcagcctgggcactgggaaatttaaaaactccccagataattctgtgcagccaaggttgagacctcctagtctagagctttgctatacacagggtggtccacaagccaggagcatcagcatcacttggcagcgccttagagattcagaccccagacccactgaatctgaccctgcattttcactagaccccaggtgatcagctgcactagactcaacctctaaaccaagacctcccaccctcacagtctatgatcctttagtgaccctcagctgagtcctgtgctgaactgtgtttgttctccttgagcacatgcccgctaaccagggacagactggatgagcaagcaacctgctggctatggagaagagccaggctgggtaaatgtttgctgtgactaagccaggatcaaagaactgcctgttgcttgcactggctggcactgagcttgccactctgtgaactgtgcttccttcccctgcatggacctgtgcctcagtcactattatccgcaggccttctccaagggcagccctctccttgtttatccctcttaagcctgcgtgcaggaaggcacattaaccctgtggccccctgcaggcaggagggtgttgggtgcccttacctaccttgccctttttcttgtaccgtaggctgtgccgtttatgagtaagtgatgtgtgtctgtgtgtgtgtctagaagtgctgcactcaccttgtgttattggaggttgtgtaaccccctagctttgagcctggtctcagatgttccttttccgttctctgtccagccgttaccgcccccagtctgtaataaaagcctatcagccgtgcacttt

SEQ ID NO: 25068 - DNA, 1210 bp, Homo sapiens
  source 1..1210: mol_type = unassigned DNA
aaatccttccttccccggggtagaagtccagggtgagaaattggttccgaactcaaaggaacccagtgccgggccacagccgggtcacgtggccggcggccccccatgacgtgctggctgcggggcgtcacggcgacgttcgggcgacctgccgagtggccaggctacctcagtcacctgtgtggtcgcagtgctgccatggacctgggacccatgcgcaagagttaccgcggggaccgagaggcatttgaggagactcatctgacctcccttgacccagtgaaacagtttgctgcctggtttgaggaggctgttcagtgtcctgacataggggaagccaatgccatgtgtctggctacctgcaccagagatggaaaaccctctgctcgcatgttgctgctgaagggcttcgggaaagatggcttccgcttcttcactaacttcgagagtcgaaaaggaaaagagctggactctaatccctttgcttcccttgtcttctactgggagccacttaaccgtcagtatctgagaaagaaaaatgaggaactggaacagctctaccaggatcaagaggtgcccaagccaaaatcctggggtggctatgtcctgtaccctcaggtgatggagttctggcaaggtcaaaccaaccgcctgcatgaccggatagtctttcggcggggcctacccacaggagattcccctttggggcccatgacccaccgcggggaggaagactggctctatgagagacttgcaccttaactctgggacctgctggcccagagtggagctagggctaggtgtcaagagagggtgtgggattgggacccaggcccttctttctaaactcaacccatttccctccctaccccttatcttcaggactcttcagagctaatcctctaagttctctgtactcagttggttctcagttagctggtcaagtggagtgtaatggtggcgtagagaatcacaaatggaaaataattccataattatttttttgaccttgcctatgattgattaggatagctccctctaggggtagcagccggtgtgactccctttctggtgacagacagggccccagcagccctgtctgttaccatgtgagtcatactggccaaagcttagtcctagcatatgcacctgagccaacctggccaatcagattgttttgtcaataatttgaaatttgaactggagagat

SEQ ID NO: 25069 - DNA, 1152 bp, Homo sapiens
  source 1..1152: mol_type = unassigned DNA
aaaggaacccagtgccgggccacagccgggtcacgtggccggcggccccccatgacgtgctggctgcggggcgtcacggcgacgttcgggcgacctgccgagtggccaggctacctcagtcacctgtgtggtcgcagtgctgccatggacctgggacccatgcgcaagagttaccgcggggaccgagagagatggaaaaccctctgctcgcatgttgctgctgaagggcttcgggaaagatggcttccgcttcttcactaacttcgagagtcgaaaaggaaaagagctggactctaatccctttgcttcccttgtcttctactgggagccacttaaccgtcaggtgcgtgtggaaggccctgtgaagaaactgcctgaggaggaggctgagtgctacttccactcccgccccaagagcagccagattggggctgtggtcagccaccagagttctgtgatccctgatcgggagtatctgagaaagaaaaatgaggaactggaacagctctaccaggatcaagaggtgcccaagccaaaatcctggggtggctatgtcctgtaccctcaggtgatggagttctggcaaggtcaaaccaaccgcctgcatgaccggatagtctttcggcggggcctacccacaggagattcccctttggggcccatgacccaccgcggggaggaagactggctctatgagagacttgcaccttaactctgggacctgctggcccagagtggagctagggctaggtgtcaagagagggtgtgggattgggacccaggcccttctttctaaactcaacccatttccctccctaccccttatcttcaggactcttcagagctaatcctctaagttctctgtactcagttggttctcagttagctggtcaagtggagtgtaatggtggcgtagagaatcacaaatggaaaataattccataattatttttttgaccttgcctatgattgattaggatagctccctctaggggtagcagccggtgtgactccctttctggtgacagacagggccccagcagccctgtctgttaccatgtgagtcatactggccaaagcttagtcctagcatatgcacctgagccaacctggccaatcagattgttttgtcaataatttgaaatttgaact

SEQ ID NO: 25070 - DNA, 1196 bp, Homo sapiens
  source 1..1196: mol_type = unassigned DNA
aaatccttccttccccggggtagaagtccagggtgagaaattggttccgaactcaaaggaacccagtgccgggccacagccgggtcacgtggccggcggccccccatgacgtgctggctgcggggcgtcacggcgacgttcgggcgacctgccgagtggccaggctacctcagtcacctgtgtggtcgcagtgctgccatggacctgggacccatgcgcaagagttaccgcggggaccgagaggcatttgaggagactcatctgacctcccttgacccagtgaaacagtttgctgcctggtttgaggaggctgttcagtgtcctgacataggggaagccaatgccatgtgtctggctacctgcaccagagatggaaaaccctctgctcgcatgttgctgctgaagggcttcgggaaagatggcttccgcttcttcactaacttcgagagtcgaaaaggaaaagagctggtgcgtgtggaaggccctgtgaagaaactgcctgaggaggaggctgagtgctacttccactcccgccccaagagcagccagattggggctgtggtcagccaccagagttctgtgatccctgatcgggagtatctgagaaagaaaaatgaggaactggaacagctctaccaggatcaagaggtgcccaagccaaaatcctggggtggctatgtcctgtaccctcaggtgatggagttctggcaaggtcaaaccaaccgcctgcatgaccggatagtctttcggcggggcctacccacaggagattcccctttggggcccatgacccaccgcggggaggaagactggctctatgagagacttgcaccttaactctgggacctgctggcccagagtggagctagggctaggtgtcaagagagggtgtgggattgggacccaggcccttctttctaaactcaacccatttccctccctaccccttatcttcaggactcttcagagctaatcctctaagttctctgtactcagttggttctcagttagctggtcaagtggagtgtaatggtggcgtagagaatcacaaatggaaaataattccataattatttttttgaccttgcctatgattgattaggatagctccctctaggggtagcagccggtgtgactccctttctggtgacagacagggccccagcagccctgtctgttaccatgtgagtcatact

SEQ ID NO: 25071 - DNA, 1639 bp, Homo sapiens
  source 1..1639: mol_type = unassigned DNA
aagggagcttgggtaggggccaggctagcctgagtgcacccagatgcgcttctgtcagctctccctagtgcttcaaccactgctctccctgctctactttttttgctccagctcagggatgggggtgggcagggaaatcctgccaccctcacttctccccttcccatctccaggggggccatggccagtacagagtcctccctgttgagatccctaggcctcagcccaggtcctggcagcagtgaggtggagctggactgttggtttgatgaggatttcaagttcatcctgctgcctgtgagctatgcagttgtctttgtgctgggcttgggccttaacgccccaaccctatggctcttcatcttccgcctccgaccctgggatgcaacggccacctacatgttccacctggcattgtcagacaccttgtatgtgctgtcgctgcccaccctcatctactattatgcagcccacaaccactggccctttggcactgagatctgcaagttcgtccgctttcttttctattggaacctctactgcagtgtccttttcctcacctgcatcagcgtgcaccgctacctgggcatctgccacccacttcgggcactacgctggggccgccctcgcctcgcaggccttctctgcctggcagtttggttggtcgtagccggctgcctcgtgcccaacctgttctttgtcacaaccagcaacaaagggaccaccgtcctgtgccatgacaccactcggcctgaagagtttgaccactatgtgcacttcagctcggcggtcatggggctgctctttggcgtgccctgcctggtcactcttgtttgctatggactcatggctcgtcgcctgtatcagcccttgccaggctctgcacagtcgtcttctcgcctccgctctctccgcaccatagctgtggtgctgactgtctttgctgtctgcttcgtgcctttccacatcacccgcaccatttactacctggccaggctgttggaagctgactgccgagtactgaacattgtcaacgtggtctataaagtgactcggcccctggccagtgccaacagctgcctggatcctgtgctctacttgctcactggggacaaatatcgacgtcagctccgtcagctctgtggtggtggcaagccccagccccgcacggctgcctcttccctggcactagtgtccctgcctgaggatagcagctgcaggtgggcggccaccccccaggacagtagctgctctactcctagggcagatagattgtaacacgggaagccgggaagtgagagaaaaggggatgagtgcagggcagaggtgagggaacccaatagtgatacctggtaaggtgcttcttcctcttttccaggctctggagagaagccctcaccctgagggttgcagggaggcagggatatcatgggtgacctcatctctcataaccccttcagttgccgactctttttagccaatgccaatcttctactcctttctcgttgtttctgttccttcctggggccattggtcctacaatcttcctgaaaatcttccccagtcctctttccctgtcccatttcccccacagcctcctatagcatgtgtttctctacccagaccagagcattcagct

SEQ ID NO: 25072 - DNA, 1700 bp, Homo sapiens
  source 1..1700: mol_type = unassigned DNA
tctgggttccagggacgctggggccggagctgctgccgccgtctacacggtcccctcatttgacgggttcgcctcctagcagcgcctgggcgagtgacatctgggccggaccagctggtgctgcgcggcgcaggtctctcggtttcctcatctgctgcctctccagacttctgccagaacattgcacgcgacagtttcaggcacagaactgactggcagcaggggctgctccacgagtgggaatttgctccagcacttcacggactgcaagcgaggcacttgctaactcttggataacaagacctctgccagaagaaccatggctttggaaggcggagttcaggctgaggagatgggtgcggtcctcagtgagcccctgcctccctgaacataggaaacccacctgggcagccatggaatgggacaatggcacaggccaggctctgggcttgccacccaccacctgtgtctaccgcgagaacttcaagcaactgctgctgccacctgtgtattcggcggtgctggcggctggcctgccgctgaacatctgtgtcattacccagatctgcacgtcccgccgggccctgacccgcacggccgtgtacaccctaaaccttgctctggctgacctgctatatgcctgctccctgcccctgctcatctacaactatgcccaaggtgatcactggccctttggcgacttcgcctgccgcctggtccgcttcctcttctatgccaacctgcacggcagcatcctcttcctcacctgcatcagcttccagcgctacctgggcatctgccacccgctggccccctggcacaaacgtgggggccgccgggctgcctggctagtgtgtgtagccgtgtggctggccgtgacaacccagtgcctgcccacagccatcttcgctgccacaggcatccagcgtaaccgcactgtctgctatgacctcagcccgcctgccctggccacccactatatgccctatggcatggctctcactgtcatcggcttcctgctgccctttgctgccctgctggcctgctactgtctcctggcctgccgcctgtgccgccaggatggcccggcagagcctgtggcccaggagcggcgtggcaaggcggcccgcatggccgtggtggtggctgctgcctttgccatcagcttcctgccttttcacatcaccaagacagcctacctggcagtgcgctcgacgccgggcgtcccctgcactgtattggaggcctttgcagcggcctacaaaggcacgcggccgtttgccagtgccaacagcgtgctggaccccatcctcttctacttcacccagaagaagttccgccggcgaccacatgagctcctacagaaactcacagccaaatggcagaggcagggtcgctgagtcctccaggtcctgggcagccttcatatttgccattgtgtccggggcaccaggagccccaccaaccccaaaccatgcggagaattagagttcagctcagctgggcatggagttaagatccctcacaggacccagaagctcaccaaaaactatttcttcagccccttctctggcccagaccctgtgggcatggagatggacagacctgggcctggctcttgagaggtcccagtcagccatggagagctggggaaaccacattaaggtgctcacaaaaatacagtgtgacgtgtactgtca

SEQ ID NO: 25073 - DNA, 2398 bp, Homo sapiens
  source 1..2398: mol_type = unassigned DNA
gtcagcattggtgtaaaggactggagcttcagggttctcgggattcgagtcctggccctgctgcttgccagctctgtgctgtggcaagttacttcctctccccaggtctctcggtttcctcatctgctgcctctccagacttctgccagaacattgcacgcgacagtttcaggcacagaactgactggcagcaggggctgctccacgagtgggaatttgctccagcacttcacggactgcaagcgaggcacttgctaactcttggcctccctgaacataggaaacccacctgggcagccatggaatgggacaatggcacaggccaggctctgggcttgccacccaccacctgtgtctaccgcgagaacttcaagcaactgctgctgccacctgtgtattcggcggtgctggcggctggcctgccgctgaacatctgtgtcattacccagatctgcacgtcccgccgggccctgacccgcacggccgtgtacaccctaaaccttgctctggctgacctgctatatgcctgctccctgcccctgctcatctacaactatgcccaaggtgatcactggccctttggcgacttcgcctgccgcctggtccgcttcctcttctatgccaacctgcacggcagcatcctcttcctcacctgcatcagcttccagcgctacctgggcatctgccacccgctggccccctggcacaaacgtgggggccgccgggctgcctggctagtgtgtgtagccgtgtggctggccgtgacaacccagtgcctgcccacagccatcttcgctgccacaggcatccagcgtaaccgcactgtctgctatgacctcagcccgcctgccctggccacccactatatgccctatggcatggctctcactgtcatcggcttcctgctgccctttgctgccctgctggcctgctactgtctcctggcctgccgcctgtgccgccaggatggcccggcagagcctgtggcccaggagcggcgtggcaaggcggcccgcatggccgtggtggtggctgctgcctttgccatcagcttcctgccttttcacatcaccaagacagcctacctggcagtgcgctcgacgccgggcgtcccctgcactgtattggaggcctttgcagcggcctacaaaggcacgcggccgtttgccagtgccaacagcgtgctggaccccatcctcttctacttcacccagaagaagttccgccggcgaccacatgagctcctacagaaactcacagccaaatggcagaggcagggtcgctgagtcctccaggtcctgggcagccttcatatttgccattgtgtccggggcaccaggagccccaccaaccccaaaccatgcggagaattagagttcagctcagctgggcatggagttaagatccctcacaggacccagaagctcaccaaaaactatttcttcagccccttctctggcccagaccctgtgggcatggagatggacagacctgggcctggctcttgagaggtcccagtcagccatggagagctggggaaaccacattaaggtgctcacaaaaatacagtgtgacgtgtactgtcatcaaggggtatgctccatgctttgagtcaccaatgaagcgggtgagggaagatgagagggggaggtgagagcttctgggaaggggcatttgagctgggttttgagggatgattatgagctctctggagaggagtgatattccatttatttagaaagcctttactgacaccttgtgctcaggcctgtgttggttctggggccctagaagaaccagtcctagccctggtccatacgggctcccaactgctggaagtacagactggcacagcaacatcagggttgtgacagagggaagcatggctggggggagggggtacacagacagtgcccatgacccagtccaaggagtcaggaaagagctctctgaggagggagcatctgagccagatgttgagggctgagtgggaacttggcaagcagaagtggggagcactttaatgcaacccaggtatgctccatgcatatccagctgggccagcctcgtgctgggctctgccctgggcagacaggcagagggccagagcagaggacacatggccttgcgtgtgtgaaagctgagaaaatgggagctgtgcttcagctaccctccagacaagggcaagagttagccagatgctccaggcagtgggaagccaatggagggattaagcggcggaagcttcttagaagaggcagggggcgaagtgcagtggctcatgcctgtaatctcagcaatttgggaggccaaggaaggaggaatgcttgagcccaagagttttagaccagcctgggcaacacagtaagaccctgtttctacaaaaaaatataaaaaa

SEQ ID NO: 25074 - DNA, 1829 bp, Homo sapiens
  source 1..1829: mol_type = unassigned DNA
aaggacagaggaggggcccttcctgtcagctggctgggagcagaggtggctttgtcttttcggaagaactggttctgtggaatttgtgcttatttcccatcaaggatcaaggacctgctctggggctacctcagggccccacaggatgaggggctggttttcagatgagttttctgcttgcctgtcatctggatagtgtctaaaaatttgcaaactgccttcttgtcagtgtcttgctcattcttcatgacactcctgatatgtctctcggtttcctcatctgctgcctctccagacttctgccagaacattgcacgcgacagtttcaggcacagaactgactggcagcaggggctgctccacgagtgggaatttgctccagcacttcacggactgcaagcgaggcacttgctaactcttggataacaagacctctgccagaagaaccatggctttggaaggcggagttcaggctgaggagatgggtgcggtcctcagtgagcccctgcctccctgaacataggaaacccacctgggcagccatggaatgggacaatggcacaggccaggctctgggcttgccacccaccacctgtgtctaccgcgagaacttcaagcaactgctgctgccacctgtgtattcggcggtgctggcggctggcctgccgctgaacatctgtgtcattacccagatctgcacgtcccgccgggccctgacccgcacggccgtgtacaccctaaaccttgctctggctgacctgctatatgcctgctccctgcccctgctcatctacaactatgcccaaggtgatcactggccctttggcgacttcgcctgccgcctggtccgcttcctcttctatgccaacctgcacggcagcatcctcttcctcacctgcatcagcttccagcgctacctgggcatctgccacccgctggccccctggcacaaacgtgggggccgccgggctgcctggctagtgtgtgtagccgtgtggctggccgtgacaacccagtgcctgcccacagccatcttcgctgccacaggcatccagcgtaaccgcactgtctgctatgacctcagcccgcctgccctggccacccactatatgccctatggcatggctctcactgtcatcggcttcctgctgccctttgctgccctgctggcctgctactgtctcctggcctgccgcctgtgccgccaggatggcccggcagagcctgtggcccaggagcggcgtggcaaggcggcccgcatggccgtggtggtggctgctgcctttgccatcagcttcctgccttttcacatcaccaagacagcctacctggcagtgcgctcgacgccgggcgtcccctgcactgtattggaggcctttgcagcggcctacaaaggcacgcggccgtttgccagtgccaacagcgtgctggaccccatcctcttctacttcacccagaagaagttccgccggcgaccacatgagctcctacagaaactcacagccaaatggcagaggcagggtcgctgagtcctccaggtcctgggcagccttcatatttgccattgtgtccggggcaccaggagccccaccaaccccaaaccatgcggagaattagagttcagctcagctgggcatggagttaagatccctcacaggacccagaagctcaccaaaaactatttcttcagccccttctctggcccagaccctgtgggcatggagatggacagacctgggcctggctcttgagaggtcccagtcagccatggagagctggggaaaccacattaaggtgctcacaaaaatacagtgtgacgtgtactgtca

SEQ ID NO: 25075 - DNA, 1515 bp, Homo sapiens
  source 1..1515: mol_type = unassigned DNA
gccggagctgctgccgccgtctacacggtcccctcatttgacgggttcgcctcctagcagcgcctgggcgagtgacatctgggccggaccagctggtgctgcgcggcgcagataacaagacctctgccagaagaaccatggctttggaaggcggagttcaggctgaggagatgggtgcggtcctcagtgagcccctgcctccctgaacataggaaacccacctgggcagccatggaatgggacaatggcacaggccaggctctgggcttgccacccaccacctgtgtctaccgcgagaacttcaagcaactgctgctgccacctgtgtattcggcggtgctggcggctggcctgccgctgaacatctgtgtcattacccagatctgcacgtcccgccgggccctgacccgcacggccgtgtacaccctaaaccttgctctggctgacctgctatatgcctgctccctgcccctgctcatctacaactatgcccaaggtgatcactggccctttggcgacttcgcctgccgcctggtccgcttcctcttctatgccaacctgcacggcagcatcctcttcctcacctgcatcagcttccagcgctacctgggcatctgccacccgctggccccctggcacaaacgtgggggccgccgggctgcctggctagtgtgtgtagccgtgtggctggccgtgacaacccagtgcctgcccacagccatcttcgctgccacaggcatccagcgtaaccgcactgtctgctatgacctcagcccgcctgccctggccacccactatatgccctatggcatggctctcactgtcatcggcttcctgctgccctttgctgccctgctggcctgctactgtctcctggcctgccgcctgtgccgccaggatggcccggcagagcctgtggcccaggagcggcgtggcaaggcggcccgcatggccgtggtggtggctgctgcctttgccatcagcttcctgccttttcacatcaccaagacagcctacctggcagtgcgctcgacgccgggcgtcccctgcactgtattggaggcctttgcagcggcctacaaaggcacgcggccgtttgccagtgccaacagcgtgctggaccccatcctcttctacttcacccagaagaagttccgccggcgaccacatgagctcctacagaaactcacagccaaatggcagaggcagggtcgctgagtcctccaggtcctgggcagccttcatatttgccattgtgtccggggcaccaggagccccaccaaccccaaaccatgcggagaattagagttcagctcagctgggcatggagttaagatccctcacaggacccagaagctcaccaaaaactatttcttcagccccttctctggcccagaccctgtgggcatggagatggacagacctgggcctggctcttgagaggtcccagtcagccatggagagctggggaaaccacattaaggtgctcacaaaaatacagtgtgacgtgtactg

SEQ ID NO: 25076 - DNA, 800 bp, Homo sapiens
  source 1..800: mol_type = unassigned DNA
ccagtggctcctgtgaccacatcgaccaggcctccctgaacataggaaacccacctgggcagccatggaatgggacaatggcacaggccaggctctgggcttgccacccaccacctgtgtctaccgcgagaacttcaagcaactgctgctgccacctgtgtattcggcggtgctggcggctggcctgccgctgaacatctgtgtcattacccagatctgcacgtcccgccgggccctgacccgcacggccgtgtacaccctaaaccttgctctggctgacctgctatatgcctgctccctgcccctgctcatctacaactatgcccaaggtgatcactggccctttggcgacttcgcctgccgcctggtccgcttcctcttctatgccaacctgcacggcagcatcctcttcctcacctgcatcagcttccagcgctacctgggcatctgccacccgctggccccctggcacaaacgtgggggccgccgggctgcctggctagtgtgtgtagccgtgtggctggccgtgacaacccagtgcctgcccacagccatcttcgctgccacaggcatccagcgtaaccgcactgtctgctatgacctcagcccgcctgccctggccacccactatatgccctatggcatggctctcactgtcatcggcttcctgctgccctttgctgccctgctggcctgctactgtctcctggcctgccgcctgtgccgccaggatggcccggcagagcctgtggcccaggagcggcgtggcaaggcggcccgcatggccgtggtggtggctg

SEQ ID NO: 25077 - DNA, 1425 bp, Homo sapiens
  source 1..1425: mol_type = unassigned DNA
gaaacagaggaagctgctcactctgtcagagaagttgcagcctagctgagggcaggagagtggggagcctcaggtctggcttccctttgccccaacacacttgggaccaccagcgtgctgcagggacaggaggctgcctcctccctgaacataggaaacccacctgggcagccatggaatgggacaatggcacaggccaggctctgggcttgccacccaccacctgtgtctaccgcgagaacttcaagcaactgctgctgccacctgtgtattcggcggtgctggcggctggcctgccgctgaacatctgtgtcattacccagatctgcacgtcccgccgggccctgacccgcacggccgtgtacaccctaaaccttgctctggctgacctgctatatgcctgctccctgcccctgctcatctacaactatgcccaaggtgatcactggccctttggcgacttcgcctgccgcctggtccgcttcctcttctatgccaacctgcacggcagcatcctcttcctcacctgcatcagcttccagcgctacctgggcatctgccacccgctggccccctggcacaaacgtgggggccgccgggctgcctggctagtgtgtgtagccgtgtggctggccgtgacaacccagtgcctgcccacagccatcttcgctgccacaggcatccagcgtaaccgcactgtctgctatgacctcagcccgcctgccctggccacccactatatgccctatggcatggctctcactgtcatcggcttcctgctgccctttgctgccctgctggcctgctactgtctcctggcctgccgcctgtgccgccaggatggcccggcagagcctgtggcccaggagcggcgtggcaaggcggcccgcatggccgtggtggtggctgctgcctttgccatcagcttcctgccttttcacatcaccaagacagcctacctggcagtgcgctcgacgccgggcgtcccctgcactgtattggaggcctttgcagcggcctacaaaggcacgcggccgtttgccagtgccaacagcgtgctggaccccatcctcttctacttcacccagaagaagttccgccggcgaccacatgagctcctacagaaactcacagccaaatggcagaggcagggtcgctgagtcctccaggtcctgggcagccttcatatttgccattgtgtccggggcaccaggagccccaccaaccccaaaccatgcggagaattagagttcagctcagctgggcatggagttaagatccctcacaggacccagaagctcaccaaaaactatttcttcagccccttctctggcccagaccctgtgggcatggagatggacagacctgggcctggctcttgagaggtcccagtcagccatggagagctggggaaaccacattaag

SEQ ID NO: 25078 - DNA, 2351 bp, Homo sapiens
  source 1..2351: mol_type = unassigned DNA
accggtggtcagagtgaaacagaacagaacgggaggtttcacaatgtccttccatacaatctctggaatctatagataacaacagctgctaggtcaggggtcgaattttaactaccaggcttaggtcaggcaggcccaggcctggtttcgggtctggttccttggtttcgggtctggttccttggtttcaggtctggtttttaggcgccgggctacctgcctttagtttcgcttctctttccttttccgagtataaaacagtatgagagggtctctctcctccctcagtgccatcctcatccctgggtgggagttgtctggatccatagggttggagccacagataacagagccattaatctcggggtctcagcctctcttaacggaccttccaggcactgctgagaaaaccaggttaatggtttcctgcggcagcaatgagcagaagcagggccatctccagactccagagaagccaggagagggctggggtgataatggggaggaggataaaaaacagccacccaatgcgtgccttccctgtgccaggcccttgtcctgaaatgttatctcactccatcctcccaacagtcccttgggctaaattggtgatgctgcttgtttgagtgagcaaacagagggtgaatgaagtgacttgcgggcagctgggtagaggatgagtcagcattggtgtaaaggactggagcttcagggttctcgggattcgagtcctggccctgctgcttgccagctctgtgctgtggcaagttacttcctctccccaggtctctcggtttcctcatctgctgcctctccagacttctgccagaacattgcacgcgacagtttcaggcacagaactgactggcagcaggggctgctccacgagtgggaatttgctccagcacttcacggactgcaagcgaggcacttgctaactcttggataacaagacctctgccagaagaaccatggctttggaaggcggagttcaggctgaggagatgggtgcggtcctcagtgagcccctgcctccctgaacataggaaacccacctgggcagccatggaatgggacaatggcacaggccaggctctgggcttgccacccaccacctgtgtctaccgcgagaacttcaagcaactgctgctgccacctgtgtattcggcggtgctggcggctggcctgccgctgaacatctgtgtcattacccagatctgcacgtcccgccgggccctgacccgcacggccgtgtacaccctaaaccttgctctggctgacctgctatatgcctgctccctgcccctgctcatctacaactatgcccaaggtgatcactggccctttggcgacttcgcctgccgcctggtccgcttcctcttctatgccaacctgcacggcagcatcctcttcctcacctgcatcagcttccagcgctacctgggcatctgccacccgctggccccctggcacaaacgtgggggccgccgggctgcctggctagtgtgtgtagccgtgtggctggccgtgacaacccagtgcctgcccacagccatcttcgctgccacaggcatccagcgtaaccgcactgtctgctatgacctcagcccgcctgccctggccacccactatatgccctatggcatggctctcactgtcatcggcttcctgctgccctttgctgccctgctggcctgctactgtctcctggcctgccgcctgtgccgccaggatggcccggcagagcctgtggcccaggagcggcgtggcaaggcggcccgcatggccgtggtggtggctgctgcctttgccatcagcttcctgccttttcacatcaccaagacagcctacctggcagtgcgctcgacgccgggcgtcccctgcactgtattggaggcctttgcagcggcctacaaaggcacgcggccgtttgccagtgccaacagcgtgctggaccccatcctcttctacttcacccagaagaagttccgccggcgaccacatgagctcctacagaaactcacagccaaatggcagaggcagggtcgctgagtcctccaggtcctgggcagccttcatatttgccattgtgtccggggcaccaggagccccaccaaccccaaaccatgcggagaattagagttcagctcagctgggcatggagttaagatccctcacaggacccagaagctcaccaaaaactatttcttcagccccttctctggcccagaccctgtgggcatggagatggacagacctgggcctggctcttgagaggtcccagtcagccatggagagctggggaaaccacattaaggtgctcacaaaaatacagtgtgacgtgtactgtc

SEQ ID NO: 25079 - DNA, 1611 bp, Homo sapiens
  source 1..1611: mol_type = unassigned DNA
tgctctggctcctctgggttccagggacgctggggccggagctgctgccgccgtctacacggtcccctcatttgacgggttcgcctcctagcagcgcctgggcgagtgacatctgggccggaccagctggtgctgcgcggcgcaggtctctcggtttcctcatctgctgcctctccagacttctgccagaacattgcacgcgacagtttcaggcacagaactgactggcagcaggggctgctccacgagtgggaatttgctccagcacttcacggactgcaagcgaggcacttgctaactcttggcctccctgaacataggaaacccacctgggcagccatggaatgggacaatggcacaggccaggctctgggcttgccacccaccacctgtgtctaccgcgagaacttcaagcaactgctgctgccacctgtgtattcggcggtgctggcggctggcctgccgctgaacatctgtgtcattacccagatctgcacgtcccgccgggccctgacccgcacggccgtgtacaccctaaaccttgctctggctgacctgctatatgcctgctccctgcccctgctcatctacaactatgcccaaggtgatcactggccctttggcgacttcgcctgccgcctggtccgcttcctcttctatgccaacctgcacggcagcatcctcttcctcacctgcatcagcttccagcgctacctgggcatctgccacccgctggccccctggcacaaacgtgggggccgccgggctgcctggctagtgtgtgtagccgtgtggctggccgtgacaacccagtgcctgcccacagccatcttcgctgccacaggcatccagcgtaaccgcactgtctgctatgacctcagcccgcctgccctggccacccactatatgccctatggcatggctctcactgtcatcggcttcctgctgccctttgctgccctgctggcctgctactgtctcctggcctgccgcctgtgccgccaggatggcccggcagagcctgtggcccaggagcggcgtggcaaggcggcccgcatggccgtggtggtggctgctgcctttgccatcagcttcctgccttttcacatcaccaagacagcctacctggcagtgcgctcgacgccgggcgtcccctgcactgtattggaggcctttgcagcggcctacaaaggcacgcggccgtttgccagtgccaacagcgtgctggaccccatcctcttctacttcacccagaagaagttccgccggcgaccacatgagctcctacagaaactcacagccaaatggcagaggcagggtcgctgagtcctccaggtcctgggcagccttcatatttgccattgtgtccggggcaccaggagccccaccaaccccaaaccatgcggagaattagagttcagctcagctgggcatggagttaagatccctcacaggacccagaagctcaccaaaaactatttcttcagccccttctctggcccagaccctgtgggcatggagatggacagacctgggcctggctcttgagaggtcccagtcagccatggagagctggggaaaccacattaaggtgctcacaaaaatacagtg

SEQ ID NO: 25080 - DNA, 1674 bp, Homo sapiens
  source 1..1674: mol_type = unassigned DNA
tggctcctctgggttccagggacgctggggccggagctgctgccgccgtctacacggtcccctcatttgacgggttcgcctcctagcagcgcctgggcgagtgacatctgggccggaccagctggtgctgcgcggcgcagacttctgccagaacattgcacgcgacagtttcaggcacagaactgactggcagcaggggctgctccacgagtgggaatttgctccagcacttcacggactgcaagcgaggcacttgctaactcttggataacaagacctctgccagaagaaccatggctttggaaggcggagttcaggctgaggagatgggtgcggtcctcagtgagcccctgcctccctgaacataggaaacccacctgggcagccatggaatgggacaatggcacaggccaggctctgggcttgccacccaccacctgtgtctaccgcgagaacttcaagcaactgctgctgccacctgtgtattcggcggtgctggcggctggcctgccgctgaacatctgtgtcattacccagatctgcacgtcccgccgggccctgacccgcacggccgtgtacaccctaaaccttgctctggctgacctgctatatgcctgctccctgcccctgctcatctacaactatgcccaaggtgatcactggccctttggcgacttcgcctgccgcctggtccgcttcctcttctatgccaacctgcacggcagcatcctcttcctcacctgcatcagcttccagcgctacctgggcatctgccacccgctggccccctggcacaaacgtgggggccgccgggctgcctggctagtgtgtgtagccgtgtggctggccgtgacaacccagtgcctgcccacagccatcttcgctgccacaggcatccagcgtaaccgcactgtctgctatgacctcagcccgcctgccctggccacccactatatgccctatggcatggctctcactgtcatcggcttcctgctgccctttgctgccctgctggcctgctactgtctcctggcctgccgcctgtgccgccaggatggcccggcagagcctgtggcccaggagcggcgtggcaaggcggcccgcatggccgtggtggtggctgctgcctttgccatcagcttcctgccttttcacatcaccaagacagcctacctggcagtgcgctcgacgccgggcgtcccctgcactgtattggaggcctttgcagcggcctacaaaggcacgcggccgtttgccagtgccaacagcgtgctggaccccatcctcttctacttcacccagaagaagttccgccggcgaccacatgagctcctacagaaactcacagccaaatggcagaggcagggtcgctgagtcctccaggtcctgggcagccttcatatttgccattgtgtccggggcaccaggagccccaccaaccccaaaccatgcggagaattagagttcagctcagctgggcatggagttaagatccctcacaggacccagaagctcaccaaaaactatttcttcagccccttctctggcccagaccctgtgggcatggagatggacagacctgggcctggctcttgagaggtcccagtcagccatggagagctggggaaaccacattaaggtgctcacaaaaatacagtgtgacgtgtactgtca

SEQ ID NO: 25081 - DNA, 741 bp, Homo sapiens
  source 1..741: mol_type = unassigned DNA
cgggagggcttgggagagtgaaagctcacccggatctgggtggagaaagtatgacaggtcccaggctcaccctctcacacatacaaacacatgcacatacaagagaagctgctccgaaatctcatttttttatcttccaaaattcctgtggattttgcattcttctataatatttctgcatataaaaacactgttctgataaattaccatccaatgagttggctcaagtcttggagataacaagacctctgccagaagaaccatggctttggaaggcggagttcaggctgaggagatgggtgcggtcctcagtgagcccctgcctccctgaacataggaaacccacctgggcagccatggaatgggacaatggcacaggccaggctctgggcttgccacccaccacctgtgtctaccgcgagaacttcaagcaactgctgctgccacctgtgtattcggcggtgctggcggctggcctgccgctgaacatctgtgtcattacccagatctgcacgtcccgccgggccctgacccgcacggccgtgtacaccctaaaccttgctctggctgacctgctatatgcctgctccctgcccctgctcatctacaactatgcccaaggtgatcactggccctttggcgacttcgcctgccgcctggtccgcttcctcttctatgccaacctgcacggcagcatcctcttcctcacctgcatcagcttccagcgctacctgggcatct

SEQ ID NO: 25082 - DNA, 1662 bp, Homo sapiens
  source 1..1662: mol_type = unassigned DNA
agcactagtcaagtgactctaagaagggccattttcccttgttgtctttgaaaatacttcattttcttagcatttcaggagattataacatcctgtatttcagtttctgagagctttactgactgatttccctattcaaaacaatcctcatttcctacatttctgaagatctcaagatctggactactgttgaagaaattcccagtaaggctcacttatatctttagagatggcaaataactacaagaaaattgttctactgaaaggattagaggtcatcaatgattatcattttagaattgttaagtccttactgagtaacgatttaaaacttaatccaaaaatgaaagaagagtatgacaaaattcagattgctgacttgatggaggaaaagttcccaggtgatgccggtttgggcaaactaatagaattcttcaaagaaataccaacactgggagaccttgctgaaactcttaaaagagaaaagttaaaagttgcaaataaaattgaatccattccagtcaaaggaataatcccatctaaaaagacgaaacagaaagaagtgtatcctgctacacctgcatgcaccccaagcaaccgtctcacagctaaaggagcagaggagactcttggacctcagaaaagaaaaaaaccatctgaagaagagactggaaccaaaaggagtaagatgtccaaagagcagactcggccttcctgctctgcaggagccagcacgtccacagccatgggccgttccccacctccccagacctcatcatcagctccacccaacacttcctcaactgaggcatatttgatgaacttgacattatctctgactgcaggaagttttctgtcctgtgctgtttggggaagagacagagaactgcggaatctggaactttcagcaacagactcactgtctactgcccccatctattatacacccattccctttgctcactaatttgttcaagtttctctgacatacaccatgctcctttttcctttaggattttcacacaccatatttctttcacctttaaactcttacctggccaaccctatccaccctctggatcccaatattgagatcttatcctcagggaatcctcacttagacccctgtaacaggttaaatcttcatggtgttctgtttcctaggaacttctttcttttctactgtttatgacaactgaagttaataagtgtttatctttcccacctactcaaagtagttccaagattagggctagtttgtaattctgtggaccactgtaaacgagggcctagttcagtgtctgcctcatgggaagcttccaataaatacctttgctcaacgaaaaaatgaaaacccagtggctcacgcctgtaatcccagcactttgggaggccgaggcaggtggattgcctgaggtcaggagtttgagactagtctggccaacatggtgaaacactatctctactaaaaatacaaaaaaattagctgggtatggtggcttacgcctataatcccagctactcaggaggctgaggcaggggaattgcttgaaccagggaggtggaggttgcagtgagctgagatcgcaccactgcactccagcctgggtgacagagcgagactccatctcaaaataaaaaagtaaaaaaaaaaaaaaaaaa

SEQ ID NO: 25083 - DNA, 1723 bp, Homo sapiens
  source 1..1723: mol_type = unassigned DNA
gaggaagccagcactagtcaagtgactctaagaagggccattttcccttgttgtctttgaaaatacttcattttcttagcatttcaggagattataacatcctgtatttcagtttctgagagctttactgactgatttccctattcaaaacaatcctcatttcctacatttctgaagatctcaagatctggactactgttgaagaaattcccagtaaggctcacttatatctttagagatggcaaataactacaagaaaattgttctactgaaaggattagaggtcatcaatgattatcattttagaattgttaagtccttactgagtaacgatttaaaacttaatccaaaaatgaaagaagagtatgacaaaattcagattgctgacttgatggaggaaaagttcccaggtgatgccggtttgggcaaactaatagaattcttcaaagaaataccaacactgggagaccttgctgaaactcttaaaagagaaaagttaaaagtcaaaggaataatcccatctaaaaagacgaaacagaaagaagtgtatcctgctacacctgcatgcaccccaagcaaccgtctcacagctaaaggagcagaggagactcttggacctcagaaaagaaaaaaaccatctgaagaagagactggaaccaaaaggagtaagatgtccaaagagcagactcggccttcctgctctgcaggagccagcacgtccacagccatgggccgttccccacctccccagacctcatcatcagctccacccaacacttcctcaactgagagcctaaaaccattggccaaccgtcacgcaactgccagtaaaaatattttccgagaagacccaataatcgcgatggtactaaatgcaacaaaagtatttaaatatgaatcctcagaaaatgagcaaagaagaatgtttcatgctacagtggctacgcagacacagttctttcatgtgaaggttttaaacatcaacttgaagaggaaattcattaaaaagagaatcatcattatatcaaattattccaaacgtaatagtctcctagaggtgaatgaagcctcttctgtatctgaagctggtcctgaccaaacgtttgaggttccaaaggacatcatcagaagagcaaagaaaattccgaagatcaatattcttcacaaacaaacttcaggatatattgtatatggattatttatgctacatacgaaaattgtaaataggaagacgacaatctatgaaattcaggataaaacaggaagtatggctgtagtaggaaaaggagaatgccacaatatcccctgtgaaaaaggagataagcttcgactcttctgctttcgactgagaaagagggaaaatatgtcaaaactgatgtcagaaatgcatagtttcatccagatacagaaaaatacaaaccagagaagccatgactccaggagcatggcactaccccaggaacagagtcagcatccaaaaccttcagaggccagcacaaccctacctgaaagccatctcaagactcctcagatgccaccaacaaccccatccagcagttccttcaccaagaaggatgaaacccacccaggagcacagtcatcgcctgcaaactttagaatcacctcaccaactgtggcccctcctctttcttctgacacttccaccaaccgccatccagcagttccttaaataaggtcaccaaggacaaggatatcaaataac

SEQ ID NO: 25084 - DNA, 2083 bp, Homo sapiens
  source 1..2083: mol_type = unassigned DNA
agagtatgaggaagccagcactagtcaagtgactctaagaagggccattttcccttgttgtctttgaaaatacttcattttcttagcatttcaggagattataacatcctgtatttcagtttctgagagctttactgactgatttccctattcaaaacaatcctcatttcctacatttctgaagatctcaagatctggactactgttgaagaaattcccagtaaggctcacttatatctttagagatggcaaataactacaagaaaattgttctactgaaaggattagaggtcatcaatgattatcattttagaattgttaagtccttactgagtaacgatttaaaacttaatccaaaaatgaaagaagagtatgacaaaattcagattgctgacttgatggaggaaaagttcccaggtgatgccggtttgggcaaactaatagaattcttcaaagaaataccaacactgggagaccttgctgaaactcttaaaagagaaaagttaaaagttgcaaataaaattgaatccattccagtcaaaggaataatcccatctaaaaagacgaaacagaaagaagtgtatcctgctacacctgcatgcaccccaagcaaccgtctcacagctaaaggagcagaggagactcttggacctcagaaaagaaaaaaaccatctgaagaagagactggaaccaaaaggagtaagatgtccaaagagcagactcggccttcctgctctgcaggagccagcacgtccacagccatgggccgttccccacctccccagacctcatcatcagctccacccaacacttcctcaactgagagcctaaaaccattggccaaccgtcacgcaactgccagtaaaaatattttccgagaagacccaataatcgcgatggtactaaatgcaacaaaagtatttaaatatgaatcctcagaaaatgagcaaagaagaatgtttcatgctacagtggctacgcagacacagttctttcatgtgaaggttttaaacatcaacttgaagaggaaattcattaaaaagagaatcatcattatatcaaattattccaaacgtaatagtctcctagaggtgaatgaagcctcttctgtatctgaagctggtcctgaccaaacgtttgaggttccaaaggacatcatcagaagagcaaagaaaattccgaagatcaatattcttcacaaacaaacttcaggatatattgtatatggattatttatgctacatacgaaaattgtaaataggaagacgacaatctatgaaattcaggataaaacaggaagtatggctgtagtaggaaaaggagaatgccacaatatcccctgtgaaaaaggagataagcttcgactcttctgctttcgactgagaaagagggaaaatatgtcaaaactgatgtcagaaatgcatagtttcatccagatacagaaaaatacaaaccagagaagccatgactccaggagcatggcactaccccaggaacagagtcagcatccaaaaccttcagaggccagcacaaccctacctgaaagccatctcaagactcctcagatgccaccaacaaccccatccagcagttccttcaccaagaaggatgaaacccacccaggagcacagtcatcgcctgcaaactttagaatcacctcaccaactgtggcccctcctctttcttctgacacttccaccaaccgccatccagcagttccttaaataaggtcaccaaggacaaggatatcaaataactactgttcaatctttactcaagtgtggaaattttgcctgaagtcctccacctaaaaacctgatgccattggtaatgatgtttatgaagataagatcaaagcacagaaaataatatatgtatatatatctggttgaaatactatatatatatatatatatatatatatatatatatatatatatatataccagctattaattctaggaaatggagtattaagggtgcattttatttcattagttttacttttatgcattttcttcatatcatattttgcattcagaattttcataatttgaaaaaaaataaacttttttttcttaaa

SEQ ID NO: 25085 - DNA, 1597 bp, Homo sapiens
  source 1..1597: mol_type = unassigned DNA
aggaagccagcactagtcaagtgactctaagaagggccattttcccttgttgtctttgaaaatacttcattttcttagcatttcaggagattataacatcctgtatttcagtttctgagagctttactgactgatttccctattcaaaacaatcctcatttcctacatttctgaagatctcaagatctggactactgttgaagaaattcccagtaaggctcacttatatctttagagatggcaaataactacaagaaaattgttctactgaaaggattagaggtcatcaatgattatcattttagaattgttaagtccttactgagtaacgatttaaaacttaatccaaaaatgaaagaagagtatgacaaaattcagattgctgacttgatggaggaaaagttcccaggtgatgccggtttgggcaaactaatagaattcttcaaagaaataccaacactgggagaccttgctgaaactcttaaaagagaaaagttaaaagtcaaaggaataatcccatctaaaaagacgaaacagaaagaagtgtatcctgctacacctgcatgcaccccaagcaaccgtctcacagctaaaggagcagaggagactcttggacctcagaaaagaaaaaaaccatctgaagaagagactggaaccaaaaggagtaagatgtccaaagagcagactcggccttcctgctctgcaggagccagcacgtccacagccatgggccgttccccacctccccagacctcatcatcagctccacccaacacttcctcaactgagagcctaaaaccattggccaaccgtcacgcaactgccagtaaaaatattttccgagaagacccaataatcgcgatggtactaaatgcaacaaaagtatttaaatatgaatcctcagaaaatgagcaaagaagaatgtttcatgctacagtggctacgcagacacagttctttcatgtgaaggttttaaacatcaacttgaagaggaaattcattaaaaagagaatcatcattatatcaaattattccaaacgtaatagtctcctagaggtgaatgaagcctcttctgtatctgaagctggtcctgaccaaacgtttgaggttccaaaggacatcatcagaagagcaaagaaaattccgaagatcaatattcttcacaaacaaacttcaggatatattgtatatggattatttatgctacatacgaaaattgtaaataggaagacgacaatctatgaaattcaggataaaacaggaagtatggctgtagtaggaaaaggagaatgccacaatatcccctgtgaaaaaggagataagcttcgactcttctgctttcgactgagaaagagggaaaatatgtcaaaactgatgtcagaaatgcatagtttcatccagatacagaaaaatacaaaccagagaagccatgactccaggagcatggcactaccccaggaacagagtcagcatccaaaaccttcagaggccagcacaaccctacctgaaagccatctcaagactcctcagatgccaccaacaaccccatccagcagttccttcaccaaggtcaccaaggacaaggatatcaaataac

SEQ ID NO: 25086 - DNA, 1624 bp, Homo sapiens
  source 1..1624: mol_type = unassigned DNA
aggaagccagcactagtcaagtgactctaagaagggccattttcccttgttgtctttgaaaatacttcattttcttagcatttcaggagattataacatcctgtatttcagtttctgagagctttactgactgatttccctattcaaaacaatcctcatttcctacatttctgaagatctcaagatctggactactgttgaagaaattcccagtaaggctcacttatatctttagagatggcaaataactacaagaaaattgttctactgaaaggattagaggtcatcaatgattatcattttagaattgttaagtccttactgagtaacgatttaaaacttaatccaaaaatgaaagaagagtatgacaaaattcagattgctgacttgatggaggaaaagttcccaggtgatgccggtttgggcaaactaatagaattcttcaaagaaataccaacactgggagaccttgctgaaactcttaaaagagaaaagttaaaagttgcaaataaaattgaatccattccagtcaaaggaataatcccatctaaaaagacgaaacagaaagaagtgtatcctgctacacctgcatgcaccccaagcaaccgtctcacagctaaaggagcagaggagactcttggacctcagaaaagaaaaaaaccatctgaagaagagactggaaccaaaaggagtaagatgtccaaagagcagactcggccttcctgctctgcaggagccagcacgtccacagccatgggccgttccccacctccccagacctcatcatcagctccacccaacacttcctcaactgagagcctaaaaccattggccaaccgtcacgcaactgccagtaaaaatattttccgagaagacccaataatcgcgatggtactaaatgcaacaaaagtatttaaatatgaatcctcagaaaatgagcaaagaagaatgtttcatgctacagtggctacgcagacacagttctttcatgtgaaggttttaaacatcaacttgaagaggaaattcattaaaaagagaatcatcattatatcaaattattccaaacgtaatagtctcctagaggtgaatgaagcctcttctgtatctgaagctggtcctgaccaaacgtttgaggttccaaaggacatcatcagaagagcaaagaaaattccgaagatcaatattcttcacaaacaaacttcaggatatattgtatatggattatttatgctacatacgaaaattgtaaataggaagacgacaatctatgaaattcaggataaaacaggaagtatggctgtagtaggaaaaggagaatgccacaatatcccctgtgaaaaaggagataagcttcgactcttctgctttcgactgagaaagagggaaaatatgtcaaaactgatgtcagaaatgcatagtttcatccagatacagaaaaatacaaaccagagaagccatgactccaggagcatggcactaccccaggaacagagtcagcatccaaaaccttcagaggccagcacaaccctacctgaaagccatctcaagactcctcagatgccaccaacaaccccatccagcagttccttcaccaaggtcaccaaggacaaggatatcaaataac

SEQ ID NO: 25087 - DNA, 771 bp, Homo sapiens
  source 1..771: mol_type = unassigned DNA
gacacccactgcccttaacagaaaaaatactgctgagcaaagggtttaacaggactctcggtctaccagaagttcagtgcattttccaggattttcaaggcttcgatgctgtcatgttgtgagcccactatccacttgtgtttttccatgaataatgaaggaaacctgaggaatcatgaatgtaatcattgagtttctgagagctttactgactgatttccctattcaaaacaatcctcatttcctacatttctgaagatctcaagatctggactactgttgaagaaattcccagtaaggctcacttatatctttagagatggcaaataactacaagaaaattgttctactgaaaggattagaggtcatcaatgattatcattttagaattgttaagtccttactgagtaacgatttaaaacttaatccaaaaatgaaagaagagtatgacaaaattcagattgctgacttgatggaggaaaagttcccaggtgatgccggtttgggcaaactaatagaattcttcaaagaaataccaacactgggagaccttgctgaaactcttaaaagagaaaagttaaaagttgcaaataaaattgaatccattccagtcaaaggaataatcccatctaaaaagacgaaacagaaagaagtgtatcctgctacacctgcatgcaccccaagcaaccgtctcacagctaaaggagcagaggagactcttggacctcagaaaagaaaaaaaccatctgaagaagagactggaaccaaaag

SEQ ID NO: 25088 - DNA, 1409 bp, Homo sapiens
  source 1..1409: mol_type = unassigned DNA
gagaggctgcagcggcagcagctgtcgcgccagtcgcaacagaagcaggtccgaggcacagcccgatcccgccatggagcagccgaggaaggcggtggtagtgacgggagctagaaaagctaggccttggcgacagcgtggacctgcatgtgtacgagattccggttgagtaccaaacagtccagagactcatccccgccctgtgggagaagcacagtccacagctggtggtgcatgtgggggtgtcaggcatggcgaccacagtcacactggagaaatgtggacacaacaagggctacaaggggctggacaactgccgcttttgccccggctcccagtgctgcgtggaggacgggcctgaaagcattgactccatcatcgacatggatgctgtgtgcaagcgagtcaccacgttgggcctggatgtgtcggtgaccatctcgcaggatgccggcagatatctctgcgactttacctactacacctctttgtaccagagtcacggtcgatcagccttcgtccacgtgcccccactggggaagccgtacaacgcggaccagctgggcagggcactgagagccatcattgaggagatgttggacctcctggagcagtcagagggcaaaatcaactattgccacaaacactgagggacgctcaggtctcctaagacctcatcctgctggggaccccacgaggggacatccaccctctggggtgtggccaggaaaagacaagctcttcagcttggggatccgatctggaagagagattctgatctgcccacctcctcttcctccttctctacaaaagctccggttgattcgagggaagtggtgaaaatttttttttctcccattttcctccctgcatctggggacacagctgccgtgaccagggaggccagcctgggaggtccagatgcccagggagaatcttggtctggtgaatccatgagctgcgataccacggctggggccatatgttcacctgctttcctgtccgttggtgaaggaatttcagaattcattttatatccaagactggcttttaccaaatttaaaagcctctcaatgcgtcctcgaccttgaactgtgctcaacagcctggccctttctggggccaccctgggatatggctggctggctggctttctttctttctttctttctttctttcttgctttctttctttcttgctttctttcttctctctctctctttttttttttttttaaatagtgctagtttgggcacagagtaatttatattccctttggttaaaatgcaggctttttagccaacaacaaaagtgttttccccccacccccactcgcccaccagggtgatgccacttttgcctcctgccctgaaaattggacttaagatgccatgtcttggccaggcgca

SEQ ID NO: 25089 - DNA, 7084 bp, Homo sapiens
  source 1..7084: mol_type = unassigned DNA
ctcgcgcggccgagaggctgcagcggcagcagctgtcgcgccagtcgcaacagaagcaggtccgaggcacagcccgatcccgccatggagcagccgaggaaggcggtggtagtgacgggatttggcccttttggggaacacaccgtgaacgccagttggattgcagttcaggagctagaaaagctaggccttggcgacagcgtggacctgcatgtgtacgagattccggttgagtaccaaacagtccagagactcatccccgccctgtgggagaagcacagtccacagctggtggtgcatgtgggggtgtcaggcatggcgaccacagtcacactggagaaatgtggacacaacaagggctacaaggggctggacaactgccgcttttgccccggctcccagtgctgcgtggaggacgggcctgaaagcattgactccatcatcgacatggatgctgtgtgcaagcgagtcaccacgttgggcctggatgtgtcggtgaccatctcgcaggatgccggcagatatctctgcgactttacctactacacctctttgtaccagagtcacggtcgatcagccttcgtccacgtgcccccactggggaagccgtacaacgcggaccagctgggcagggcactgagagccatcattgaggagatgttggacctcctggagcagtcagagggcaaaatcaactattgccacaaacactgagggacgctcaggtctcctaagacctcatcctgctggggaccccacgaggggacatccaccctctggggtgtggccaggaaaagacaagctcttcagcttggggatccgatctggaagagagattctgatctgcccacctcctcttcctccttctctacaaaagctccggttgattcgagggaagtggtgaaaatttttttttctcccattttcctccctgcatctggggacacagctgccgtgaccagggaggccagcctgggaggtccagatgcccagggagaatcttggtctggtgaatccatgagctgcgataccacggctggggccatatgttcacctgctttcctgtccgttggtgaaggaatttcagaattcattttatatccaagactggcttttaccaaatttaaaagcctctcaatgcgtcctcgaccttgaactgtgctcaacagcctggccctttctggggccaccctgggatatggctggctggctggctttctttctttctttctttctttctttcttgctttctttctttcttgctttctttcttctctctctctctttttttttttttttaaatagtgctagtttgggcacagagtaatttatattccctttggttaaaatgcaggctttttagccaacaacaaaagtgttttccccccacccccactcgcccaccagggtgatgccacttttgcctcctgccctgaaaattggacttaagatgccatgtcttggccaggcgcagtggctcatgcctgtaatcccagcactttggaaggccagggtgggcggatcacctgagatcaggagttcaagatcagcctggccaacatggtgaaaccctgcctctactaaaaatacaaaaattagccgggcatggtgatgagtgcctgtagtcccagctactcgggaggctgaggctggagaatcgcttgaacttgggaggcagaggttgcagtgagctgagattgcacagctgcactccagcctgggtgacagagcgagactctgtctcaaaacaattggacttaagatggcatgtctttgttttagggccaaaaatgaggcccccttgcttaaggcatggggtccgtggccaggcaacggggtgggactgctgccccagatgtggccatgggggtcgtggtcctttcaacaccaagctatgagctgtcgccatggagaccagggccacctgtggaaaggcggattttgtctgcttttgacttttcttttttaatatgtaaaactccacatcagcggaaacccccccctacttctggcctggagcttcagggttttggtgctgggacgagtttgttgttctccttagcggggtggcgcggggggctcaaaacgggggcgcgggggctggagttggcagagctctgcatgtcccggcatgtctgagcaggaggaattccgggcggccaaagggttttatgtagattgcttttggacactcgcccaggagtcaggagttgatttttatctcacttcctggtaaccttgaacttaccaggcagggatgagatgacgtaaacttcctcagatgatgtaagttcagccacatcttgctgcccattagggagagaggacgacccccacagtgaaagtaattgagtgaaatgcacgttctggaaatcagtttctattttggcctggaggaatgtggctatactgcttccctgagtgtgacacagttggaatctaatcttgttggtttcccaacatctaggtttttgtttgtttgtttgtttttatgatagggtcttgttctgttgaccaggctggagtacagtagtgtgatcatggatcactgcagcctctacctcctgggctcaagtgatcctcccatctcagcctcctgagtagctgggactacaggcatgcaccaccacacctggctaatttttaaattttttatacagacagggtttcaccatgttgcccaggctggtctcgaactcctggactcaaactgatcctcctttctcggcctcccaaagtgctgggattacaggcatgagccactgcacccagcccagttctttcttaaaacagctgagagttttgttttcttcagcgttcaccttccttgtctccagttccgatgctggcagtggttcctacctctgttgggtttctagatagtttgggaacggggttgatgggtttctgtgaaacacattttccaagtcttgggctttctctggaggggaaggtggatgctggcgggtgacttgcagtgggcgcctggcagtgggtgtggactgtaactgacaggtggaaatgagtagggacactattgttccctccatgccagcttttttttttgctggaaatgccccctccacacccctggtagctctgtgtcctgagaaatccagagtgtgggagacatcactgcatctgtccccccagcttctgtgaagggaagctgtggcctcttttgaatgtggggaacaactgaagactcaggggtcacccagaggtctggtggaaagcaacttcaggtttcatcttgctctattcctcaaaggtctggtctgtgggcctctgaggagaaaacaggtctagccaagacagggacaaaatggggaaggggatgtgccaggcctgaactgagctaagcacctgccccgggctccacacttccatctttcttttgtcttcatttcacctctgtgtttaaagcactgtgtgacatagctccttagagatataacctattgtctgctcattgtcacgtgtgtgtgtgtcatctttgtattcttgcagtggtttcacatttccttacccagtcaagccagtatcccatccttcctcataatgcacaacatttggctcattttatttttctcattgttattttttatttttattttttgagatggattctcacactgttactcgggctagagtgcaatggcgtgatctcggctcactgcaacctccacctcctgggtttacacaattctcctgcctcagcctcccgagtagctgggattacaggcgcccgtcaccacacctggctaatttttgtatttttagtagagatgcagcttcaccatgttggccaggctggtcttgaaatcctgacctcaggtgatctgcctgccttggcctcccaaagtgctgggattacaggtgtgagctactgcgcctggccaagttttttacaaatatttttcttttggtggaactcatctgtgcactctctggtgtgtttttccacctttgttgggtcttggcttaaaatatcctcatgtgggctaggtgtggttactcacacctgtaatcctagcactttgggaggttgaggcaggagaatcccttgagccaggagttcaagaccagcctgggcaacatagcaagagatcccatatctaccaaaacatacaagaattagccagatgtggtggtgcatgcctgtggtcccagatactcaggaggctgaggcaggaggatcacctatgcctgggaggttgaagccccagtgagccatgatcacaccactgtagtccagcccgggtgacacagcaagactctgtctcaaaaaaaaaaaaaaaaaaaatcctcatgcaagaagggaaggaccaagtcccattccctcttgcctcattttcagagcctggggtaggggctacaggtggcataggaagggtctgcaaggtgggtgggacttggcaggtgttgggaagaggaataggggtggcaagtgtcaatggtgaaaagacaggctgaggggtgtggtgggaaggctgggggagaaaggtgagaagtgattgggggggcttccctgatgagtcctcatggagggtgctgaggcagggaacaggggtgcagggacagtgatcagggcacctggtaccctgaccaacttgatgatggcatctcttttaagatgcccaagtctgcgcacttttattcctttattcggcccctagcaccccctccccaccccaaagaaggtcagttgcatgcgtgtggggatgtagctcaaaaaagaaataagatggagtggaaaggaaagaaaggaagaagcaggaattcaaggtgggtgggctgagcttggggccacctagcccacctgctccaatcaagggctggaacaaacctgaggccacttggagaggcagggctgggcagggacagggggtgggggccgaaatcacagcttccccatcagagccagatgtgtgaaggaaatgtcccagatggcagtagtttctcggcaaggaggggaatcctggagatggttcatgtctgtgatcccagtgctttgggaggctgaggtgggaggattgcttgagcccgggagttcgagaccagccctgggcaacatggcgagaccccatctctacagaaattaaaaaaaaaaattagccagttgtggtgtcaagcacctgtagtcccagctacttgggaggctgagttgggaggcttatctgagcccaggaggtgaaggctgcaatgagccatgattacactactgtaccccagcctgggcaacagagcaagaccctgcctcaaaattaagaaaaaaaaaaggggggccaggcgcagtggcttatgcctgttatcccagcactttgggaggccaaggcagactgatcgcttgaggccaggagtttgcgaccagcctggccaacatagcaaaaccccatctctactaaaaatacaaaaattagtcaagagtggatggtgcgtgcctgtaatcccagctacctgggaggctgagacaggagaattgcttgaacctgggaggcagaggttgcagtggtgtgagatcacgccactgcattccagactgggcaacatagcaagactctgtcacaaaaaaaaaaaaaaaaaagaattccctgctctgcttttctgctcgttgctggcatagaaacatctagaacagaaagtatccactctggggcagatgggagagctggaaaagtagattcaagatgccttttagtcttggaagtttcttccaggaagcaagaccagctggtatgtttacacctgcactccagtgccctggggaggtgaccaggtggagggggatggctcatggaaatctgtcccgcacagctggcccccttttggctgccactgtctagactgttggcctttgacctctctgcctcttgtggcgtctgaacctagacgtcccttttggagacagctggacaaagccctattctccgcagccccagcctctatcctgaggcctctgggagctgcgtgacggccagcatggggtgctgatcatggtcaaggaggcaggtctttgccaggttgccccatgcagccacccatcctcagcatcctaacttgagggggcaggagagggctttgtttttataatccggattaaatttcccttccctgggcacaagtgcctcatgagggcccggggctgctggttgggagggaaagcatccccgtttttgcagtgaggaggccggccgagggctggggttccacttagacccttggcagaatggctgttgaggggcaggcgctgcccagtgcccacgtctggaaagctaattcccgggtggacgctgaacatacctgctgagagactctgtcccctggtttccaggacagttgtcacaagctgagtggggggggactcccaggacttgagggacccagtcccaccccaaactgctccccctcccccaaattccctttctcctcctgctctttctccccgctgtgcctcccccagttacccacagaagtgcctgcctctccagcgctcacagaacacacaaaaagggacaggaattggtcactgggtagtggccgtggctcctgacgatccagaccagcgtctggcccaagccattcagaggtggggtctggggcctgggggttttgtgtcgtgacactttgtctcaaggagattccacatagggatttgaattaggctttctgcttgccaaggcctgtggcatctgagcctggctgagggccgggcaagcctcccctgagcctttggaagccgagttcactctctgcctgcccaggggagcaccggcttggttctgggggctcctctaacatctcaggtttttatcttgtcttaaatttctttctaggaaaaaacccttccctgccaaaggtgactgtgttttctgccgccgaaggagggcccggtccctccaggctcagtgtggcttctccctgacccccgccctagaacttttgccagtgccttttctgaaactcctgtgtcccgggccccccaggcggagaaggatatgccggattctgcctggggctgggctctaggagaccccaaatttgacaccacagaaagcaaataaaacacttgaaatacgcatac

SEQ ID NO: 25090 - DNA, 839 bp, Homo sapiens
  source 1..839: mol_type = unassigned DNA
accagtgcagggaccgggtcgcgccgtgctatggccctgtaccacactgaggagcgcggccagccctgctcgcagaattaccgcctcttctttagaaaatggcattcctatgaagaaagcacgaaatgatgaatatgagaatctgtttaatatgattgtagaaatacctcggtggacaaatgctaaaatggagattgccaccaaggagccaatgaatcccattaaacaatatgtaaaggatggaaagctacgctatgtggcgaatatcttcccttacaagggttatatatggaattatggtaccctccctcagacttgggaagatccccatgaaaaagataagagcacgaactgctttggagataatgatcctattgatgtttgcgaaataggctcaaagattctttcttgtggagaagttattcatgtgaagatccttggaattttggctcttattgatgaaggtgaaacagattggaaattaattgctatcaatgcgaatgatcctgaagcctcaaagtttcatggtctcagaaatattccagtatatacaataaatcgcatagtcatcctgccttcacttgacaggagccaaacttccagcctgtcctacctgcctgcacatcaggattcctgtgtgcccctggatgcagccctacatgttgttttgtatttttgttccctcttgggtctacaaagttacttatcttgtttttgagtctttttgatgttaatctgtttataaggtatctattttaggtaggttagcctgagggagtacattgaaacacgaatttagtgcccctcctgtcaaaaggtctctgttttttccgaagcag

SEQ ID NO: 25091 - DNA, 1684 bp, Homo sapiens
  source 1..1684: mol_type = unassigned DNA
ccgcgcgcacagcaggaccgtcattgacgccatgagcgcgctgctgcggctgctgcgcacgggtgccccagccgctgcgtgcctgcggttggggaccagtgcagggaccgggtcgcgccgtgctatggccctgtaccacactgaggagcgcggccagccctgctcgcagaattaccgcctcttctttaagaatgtaactggtcactacatttccccctttcatgatattcctctgaaggtgaactctaaagaggaaaatggcattcctatgaagaaagcacgaaatgatgaatatgagaatctgtttaatatgattgtagaaatacctcggtggacaaatgctaaaatggagattgccaccaaggagccaatgaatcccattaaacaatatgtaaaggatggaaagctacgctatgtggcgaatatcttcccttacaagggttatatatggaattatggtaccctccctcagacttgggaagatccccatgaaaaagataagagcacgaactgctttggagataatgatcctattgatgtttgcgaaataggctcaaagattctttcttgtggagaagttattcatgtgaagatccttggaattttggctcttattgatgaaggtgaaacagattggaaattaattgctatcaatgcgaatgatcctgaagcctcaaagtttcatgatattgatgatgttaagaagttcaaaccgggttacctggaagctactcttaattggtttagattatataaggtaccagatggaaaaccagaaaaccagtttgcttttaatggagaattcaaaaacaaggcttttgctcttgaagttattaaatccactcatcaatgttggaaagcattgcttatgaagaagtgtaatggaggagctataaattgcacaaacgtgcagatatctgatagccctttccgttgcactcaagaggaagcaagatcattagttgaatcggtatcatcttcaccaaataaagaaagtaatgaagaagagcaagtgtggcacttccttggcaagtgattgaaacatctgaaattctgctgtcaagattcccatctctaaggactccaagtgctagagacaagggggtctatgagcatttactgacttcctgttaaaacttcattttttcaaactttttgagctatgcaatatataaataaacagtaagaattttaaattactctcctttggacatttattgatataaaaagaagattttggccaggcacggtggctcatgcctgtaatttcagcactttgggaggccgaggtgggcagatcacaaggtcaggagttcaagaccagcctggccagtatgttgaaaccccatctctattaaaaatacaaaaattagccaggcgtggtggtgcatgcctgtagacccagctactcaggaggctgaggcagaagaactgcttgagcccaggaggcagaggttgcagtgagcagagattgtgccactgcactccagcctaggcgacagagagagactccgtctcaaaaaaaaaaaaaagattttgtttcatttcatagcacaaatttagaggcattgagttgaccatttctagtttctatacctgaaggaacccattgattttaccagtttttatttctgtagattggatgtaaaaatcacagattcaataaattaataaactttgtgta

SEQ ID NO: 25092 - DNA, 1414 bp, Homo sapiens
  source 1..1414: mol_type = unassigned DNA
ccgtcattgacgccatgagcgcgctgctgcggctgctgcgcacgggtgccccagccgctgcgtgcctgcggttggggaccagtgcagggaccgggtcgcgccgtgctatggccctgtaccacactgaggagcgcggccagccctgctcgcagaattaccgcctcttctttaagaatgtaactggtcactacatttccccctttcatgatattcctctgaaggtgaactctaaagaggaaaatggcattcctatgaagaaagcacgaaatgatgaatatgagaatctgtttaatatgattgtagaaatacctcggtggacaaatgctaaaatggagattgccaccaaggagccaatgaatcccattaaacaatatgtaaaggatggaaagctacgctatgtggcgaatatcttcccttacaagggttatatatggaattatggtaccctccctcagattctttcttgtggagaagttattcatgtgaagatccttggaattttggctcttattgatgaaggtgaaacagattggaaattaattgctatcaatgcgaatgatcctgaagcctcaaagtttcatgatattgatgatgttaagaagttcaaaccgggttacctggaagctactcttaattggtttagattatataaggtaccagatggaaaaccagaaaaccagtttgcttttaatggagaattcaaaaacaaggcttttgctcttgaagttattaaatccactcatcaatgttggaaagcattgcttatgaagaagtgtaatggaggagctataaattgcacaaacgtgcagatatctgatagccctttccgttgcactcaagaggaagcaagatcattagttgaatcggtatcatcttcaccaaataaagaaagtaatgaagaagagcaagtgtggcacttccttggcaagtgattgaaacatctgaaattctgctgtcaagattcccatctctaaggactccaagtgctagagacaagggggtctatgagcatttactgacttcctgttaaaacttcattttttcaaactttttgagctatgcaatatataaataaacagtaagaattttaaattactctcctttggacatttattgatataaaaagaagattttggccaggcacggtggctcatgcctgtaatttcagcactttgggaggccgaggtgggcagatcacaaggtcaggagttcaagaccagcctggccagtatgttgaaaccccatctctattaaaaatacaaaaattagccaggcgtggtggtgcatgcctgtagacccagctactcaggaggctgaggcagaagaactgcttgagcccaggaggcagaggttgcagtgagcagagattgtgccactgcactccagcctaggcgacagagagagactccgtctc

SEQ ID NO: 25093 - DNA, 667 bp, Homo sapiens
  source 1..667: mol_type = unassigned DNA
atgagcgcgctgctgcggctgctgcgcacgggtgccccagccgctgcgtgcctgcggttggggaccagtgcagggaccgggtcgcgccgtgctatggccctgtaccacactgaggagcgcggccagccctgctcgcagaattaccgcctcttctttaatattgatgatgttaagaagttcaaaccgggttacctggaagctactcttaattggtttagattatataaggtaccagatggaaaaccagaaaaccagtttgcttttaatggagaattcaaaaacaaggcttttgctcttgaagttattaaatccactcatcaatgttggaaagcattgcttatgaagaagtgtaatggaggagctataaattgcacaaacgtgcagatatctgatagccctttccgttgcactcaagaggaagcaagatcattagttgaatcggtatcatcttcaccaaataaagaaagtaatgaagaagagcaagtgtggcacttccttggcaagtgattgaaacatctgaaattctgctgtcaagattcccatctctaaggactccaagtgctagagacaagggggtctatgagcatttactgacttcctgttaaaacttcattttttcaaactttttgagctatgcaatatataaataaacagtaagaattttaaa

SEQ ID NO: 25094 - DNA, 1221 bp, Homo sapiens
  source 1..1221: mol_type = unassigned DNA
ccgtcattgacgccatgagcgcgctgctgcggctgctgcgcacgggtgccccagccgctgcgtgcctgcggttggggaccagtgcagggaccgggtcgcgccgtgctatggccctgtaccacactgaggagcgcggccagccctgctcgcagaattaccgcctcttctttaagaatgtaactggtcactacatttccccctttcatgatattcctctgaaggtgaactctaaagaggacactgaggctcaaggcatttttatagacttgtctaagatctgggaaaatggcattcctatgaagaaagcacgaaatgatgaatatgagaatctgtttaatatgattgtagaaatacctcggtggacaaatgctaaaatggagattgccaccaaggagccaatgaatcccattaaacaatatgtaaaggatggaaagctacgctatgtggcgaatatcttcccttacaagggttatatatggaattatggtaccctccctcagacttgggaagatccccatgaaaaagataagagcacgaactgctttggagataatgatcctattgatgtttgcgaaataggctcaaagattctttcttgtggagaagttattcatgtgaagatccttggaattttggctcttattgatgaaggtgaaacagattggaaattaattgctatcaatgcgaatgatcctgaagcctcaaagtttcatgatattgatgatgttaagaagttcaaaccgggttacctggaagctactcttaattggtttagattatataaggtaccagatggaaaaccagaaaaccagtttgcttttaatggagaattcaaaaacaaggcttttgctcttgaagttattaaatccactcatcaatgttggaaagcattgcttatgaagaagtgtaatggaggagctataaattgcacaaacgtgcagatatctgatagccctttccgttgcactcaagaggaagcaagatcattagttgaatcggtatcatcttcaccaaataaagaaagtaatgaagaagagcaagtgtggcacttccttggcaagtgattgaaacatctgaaattctgctgtcaagattcccatctctaaggactccaagtgctagagacaagggggtctatgagcatttactgacttcctgttaaaacttcattttttcaaactttttgagctatgcaatatataaataaacagtaagaatttt

SEQ ID NO: 25095 - DNA, 1122 bp, Homo sapiens
  source 1..1122: mol_type = unassigned DNA
ccgtcattgacgccatgagcgcgctgctgcggctgctgcgcacgggtgccccagccgctgcgtgcctgcggttggggaccagtgcagggaccgggtcgcgccgtgctatggccctgtaccacactgaggagcgcggccagccctgctcgcagaattaccgcctcttctttaagaatgtaactggtcactacatttccccctttcatgatattcctctgaaggtgaactctaaagaggaaaatggcattcctatgaagaaagcacgaaatgatgaatatgagattgccaccaaggagccaatgaatcccattaaacaatatgtaaaggatggaaagctacgctatgtggcgaatatcttcccttacaagggttatatatggaattatggtaccctccctcagacttgggaagatccccatgaaaaagataagagcacgaactgctttggagataatgatcctattgatgtttgcgaaataggctcaaagattctttcttgtggagaagttattcatgtgaagatccttggaattttggctcttattgatgaaggtgaaacagattggaaattaattgctatcaatgcgaatgatcctgaagcctcaaagtttcatgatattgatgatgttaagaagttcaaaccgggttacctggaagctactcttaattggtttagattatataaggtaccagatggaaaaccagaaaaccagtttgcttttaatggagaattcaaaaacaaggcttttgctcttgaagttattaaatccactcatcaatgttggaaagcattgcttatgaagaagtgtaatggaggagctataaattgcacaaacgtgcagatatctgatagccctttccgttgcactcaagaggaagcaagatcattagttgaatcggtatcatcttcaccaaataaagaaagtaatgaagaagagcaagtgtggcacttccttggcaagtgattgaaacatctgaaattctgctgtcaagattcccatctctaaggactccaagtgctagagacaagggggtctatgagcatttactgacttcctgttaaaacttcattttttcaaactttttgagctatgcaatatataaataaacagtaagaatttt

SEQ ID NO: 25096 - DNA, 859 bp, Homo sapiens
  source 1..859: mol_type = unassigned DNA
atgagcgcgctgctgcggctgctgcgcacgggtgccccagccgctgcgtgcctgcggttggggaccagtgcagggaccgggtcgcgccgtgctatggccctgtaccacactgaggagcgcggccagccctgctcgcagaattaccgcctcttctttaagaatgtaactggtcactacatttccccctttcatgatattcctctgaaggtgaactctaaagagattctttcttgtggagaagttattcatgtgaagatccttggaattttggctcttattgatgaaggtgaaacagattggaaattaattgctatcaatgcgaatgatcctgaagcctcaaagtttcatgatattgatgatgttaagaagttcaaaccgggttacctggaagctactcttaattggtttagattatataaggtaccagatggaaaaccagaaaaccagtttgcttttaatggagaattcaaaaacaaggcttttgctcttgaagttattaaatccactcatcaatgttggaaagcattgcttatgaagaagtgtaatggaggagctataaattgcacaaacgtgcagatatctgatagccctttccgttgcactcaagaggaagcaagatcattagttgaatcggtatcatcttcaccaaataaagaaagtaatgaagaagagcaagtgtggcacttccttggcaagtgattgaaacatctgaaattctgctgtcaagattcccatctctaaggactccaagtgctagagacaagggggtctatgagcatttactgacttcctgttaaaacttcattttttcaaactttttgagctatgcaatatataaataaacagtaagaattttaaa

SEQ ID NO: 25097 - DNA, 2059 bp, Homo sapiens
  source 1..2059: mol_type = unassigned DNA
agtcatttcttctgcggaacctccacccctccagtgggtgcgggaccctaggcagcaggccaggcaccgccgctctgactgggggccccgaagcagttaacgggccggacagcaaagtggaaagttagaccagctgggaccaggggaggtgggcacccggctgcgggaggagcggccaggctggcactgcccccctaacttgctctcgatcctgccggtctcgtcccgcagagccggtgccatctgtgggggctttgggccaggggtctccggacagcatgagcgtgggcttcatcggcgctggccagctggcttttgccctggccaagggcttcacagcagcaggcgtcttggctgcccacaagataatggctagctccccagacatggacctggccacagtttctgctctcaggaagatgggggtgaagttgacaccccacaacaaggagacggtgcagcacagtgatgtgctcttcctggctgtgaagccacacatcatccccttcatcctggatgaaataggcgccgacattgaggacagacacattgtggtgtcctgcgcggccggcgtcaccatcagctccattgagaagaagctgtcagcgtttcggccagcccccagggtcatccgctgcatgaccaacactccagtcgtggtgcgggagggggccaccgtgtatgccacaggcacgcacgcccaggtggaggacgggaggctcatggagcagctgctgagcagcgtgggcttctgcacggaggtggaagaggacctgattgatgccgtcacggggctcagtggcagcggccccgcctacgcattcacagccctggatgccctggctgatgggggtgtgaagatgggacttccaaggcgcctggcagtccgcctcggggcccaggccctcctgggggctgccaagatgctgctgcactcagaacagcacccaggccagctcaaggacaacgtcagctctcctggtggggccaccatccatgccttgcatgtgctggagagtgggggcttccgctccctgctcatcaacgctgtggaggcctcctgcatccgcacacgggagctgcagtccatggctgaccaggagcaggtgtcaccagccgccatcaagaagaccatcctggacaaggtgaagctggactcccctgcagggaccgctctgtcaccttctggccacaccaagctgctcccccgcagcctggccccagcgggcaaggattgacacgtcctgcctgaccaccatcctgccaccaccttctcttctcttgtcactagggggactagggggtccccaaagtggcccactttctgtggctctgatcagcgcaggggccagccagggacatagccagggaggggccacatcacttcccactggaaatctctgtggtctgcaagtgcttcccagcccagaacaggggtggattccccaacctcaacctcctttcttctctgctcccaaaccatgtcaggaccaccttcctctagagctcgggagcccggagggtcttcacccactcctactccagtatcagctggcacgggctccttcctgagagcaaaggtcaaggaccccctctgtgaaggctcagcagaggtgggatcccacgccccctcccggcccctccctgccctccattcagggagaaacctctccttcccgtgtgagaagggccagagggtccaggcatcccaagtccagcgtgaagggccacagcccctcttggctgccaagcacgcagatcccatggacatttggggaaagggctccttgggctgctggtgaacttctgtggccaccacctcctgctcctgacctccctgggagggtgctatcagttctgtcctggccctttcagttttataagttggtttccagcccccagtgtcctgacttctgtctgccacatgaggagggaggccctgcctgtgtgggagggtggttactgtgggtggaatagtggaggccttcaactgattagacaaggcccgcccacatcttggagggcatctgccttactgattaaaatgtcaatgtaatct

SEQ ID NO: 25098 - DNA, 1716 bp, Homo sapiens
  source 1..1716: mol_type = unassigned DNA
agtcatttcttctgcggaacctccacccctccagtgggtgcgggaccctaggcagcaggccaggcaccgccgctctgactgggggccccgaagcagttaacgggccggacagcaaagtggaaagttagaccagctgggaccaggggaggtgggcacccggctgcgggaggagcggccaggctggcactgcccccctaacttgctctcgatcctgccggtctcgtcccgcagagccggtgccatctgtgggggctttgggccaggggtctccggacagcatgagcgtgggcttcatcggcgctggccagctggcttttgccctggccaagggcttcacagcagcaggcgtcttggctgcccacaagataatggctagctccccagacatggacctggccacagtttctgctctcaggaagatgggggtgaagttgacaccccacaacaaggagacggtgcagcacagtgatgtgctcttcctggctgtgaagccacacatcatccccttcatcctggatgaaataggcgccgacattgaggacagacacattgtggtgtcctgcgcggccggcgtcaccatcagctccattgagaagaagctgtcagcgtttcggccagcccccagggtcatccgctgcatgaccaacactccagtcgtggtgcgggagggggccaccgtgtatgccacaggcacgcacgcccaggtggaggacgggaggctcatggagcagctgctgagcagcgtgggcttctgcacggaggtggaagaggacctgattgatgccgtcacggggctcagtggcagcggccccgcctacgcattcacagccctggatgccctggctgatgggggtgtgaagatgggacttccaaggcgcctggcagtccgcctcggggcccaggccctcctgggggctgccaagatgctgctgcactcagaacagcacccaggccagctcaaggacaacgtcagctctcctggtggggccaccatccatgccttgcatgtgctggagagtgggggcttccgctccctgctcatcaacgctgtggaggcctcctgcatccgcacacgggagctgcagtccatggctgaccaggagcaggtgtcaccagccgccatcaagaagaccatcctggacaaggaccaccttcctctagagctcgggagcccggagggtcttcacccactcctactccagtatcagctggcacgggctccttcctgagagcaaaggtcaaggaccccctctgtgaaggctcagcagaggtgggatcccacgccccctcccggcccctccctgccctccattcagggagaaacctctccttcccgtgtgagaagggccagagggtccaggcatcccaagtccagcgtgaagggccacagcccctcttggctgccaagcacgcagatcccatggacatttggggaaagggctccttgggctgctggtgaacttctgtggccaccacctcctgctcctgacctccctgggagggtgctatcagttctgtcctggccctttcagttttataagttggtttccagcccccagtgtcctgacttctgtctgccacatgaggagggaggccctgcctgtgtgggagggtggttactgtgggtggaatagtggaggccttcaactgattagacaaggcccgcccacatcttggagggcatctgccttactgattaaaatgtcaatgtaatct

SEQ ID NO: 25099 - DNA, 1346 bp, Homo sapiens
  source 1..1346: mol_type = unassigned DNA
agctgggttggggtcgggctccgggaatggtgggcggcggtcgccgggtggggcgcgacgagccggtgccatctgtgggggctttgggccaggggtctccggacagcatgagcgtgggcttcatcggcgctggccagctggcttttgccctggccaagggcttcacagcagcaggcgtcttggctgcccacaagataatggctagctccccagacatggacctggccacagtttctgctctcaggaagatgggggtgaagttgacaccccacaacaaggagacggtgcagcacagtgatgtgctcttcctggctgtgaagccacacatcatccccttcatcctggatgaaataggcgccgacattgaggacagacacattgtggtgtcctgcgcggccggcgtcaccatcagctccattgagaagaagctgtcagcgtttcggccagcccccagggtcatccgctgcatgaccaacactccagtcgtggtgcgggagggggccaccgtgtatgccacaggcacgcacgcccaggtggaggacgggaggctcatggagcagctgctgagcagcgtgggcttctgcacggaggtggaagaggacctgattgatgccgtcacggggctcagtggcagcggccccgcctacgcattcacagccctggatgccctggctgatgggggtgtgaagatgggacttccaaggcgcctggcagtccgcctcggggcccaggccctcctgggggctgccaagatgctgctgcactcagaacagcacccaggccagctcaaggacaacgtcagctctcctggtggggccaccatccatgccttgcatgtgctggagagtgggggcttccgctccctgctcatcaacgctgtggaggcctcctgcatccgcacacgggagctgcagtccatggctgaccaggagcaggtgtcaccagccgccatcaagaagaccatcctggacaaggtgaagctggactcccctgcagggaccgctctgtcaccttctggccacaccaagctgctcccccgcagcctggccccagcgggcaaggattgacacgtcctgcctgaccaccatcctgccaccaccttctcttctcttgtcactagggggactagggggtccccaaagtggcccactttctgtggctctgatcagcgcaggggccagccagggacatagccagggaggggccacatcacttcccactggaaatctctgtggtctgcaagtgcttcccagcccagaacaggggtggattccccaacctcaacctcctttcttctctgctcccaaaccatgtcaggaccaccttcctctagagctcgggagccc

SEQ ID NO: 25100 - DNA, 1717 bp, Homo sapiens
  source 1..1717: mol_type = unassigned DNA
agtcatttcttctgcggaacctccacccctccagtgggtgcgggaccctaggcagcaggccaggcaccgccgctctgactgggggccccgaagcagttaacgggccggacagcaaagtggaaagttagaccagctgggaccaggggaggtgggcacccggctgcgggaggagcggccaggctggcactgcccccctaacttgctctcgatcctgccggtctcgtcccgcagagccggtgccatctgtgggggctttgggccaggggtctccggacagcatgagcgtgggcttcatcggcgctggccagctggcttttgccctggccaagggcttcacagcagcaggcgtcttggctgcccacaagataatggctagctccccagacatggacctggccacagtttctgctctcaggaagatgggggtgaagttgacaccccacaacaaggagacggtgcagcacagtgatgtgctcttcctggctgtgaagccacacatcatccccttcatcctggatgaaataggcgccgacattgaggacagacacattgtggtgtcctgcgcggccggcgtcaccatcagctccattgagaagaagctgtcagcgtttcggccagcccccagggtcatccgctgcatgaccaacactccagtcgtggtgcgggagggggccaccgtgtatgccacaggcacgcacgcccaggtggaggacgggaggctcatggagcagctgctgagcagcgtgggcttctgcacggaggtggaagaggacctgattgatgccgtcacggggctcagtggcagcggccccgcctacgcattcacagccctggatgccctggctgatgggggtgtgaagatgggacttccaaggcgcctggcagtccgcctcggggcccaggccctcctggggggctgccaagatgctgctgcactcagaacagcacccaggccagctcaaggacaacgtcagctctcctggtggggccaccatccatgccttgcatgtgctggagagtgggggcttccgctccctgctcatcaacgctgtggaggcctcctgcatccgcacacgggagctgcagtccatggctgaccaggagcaggtgtcaccagccgccatcaagaagaccatcctggacaaggaccaccttcctctagagctcgggagcccggagggtcttcacccactcctactccagtatcagctggcacgggctccttcctgagagcaaaggtcaaggaccccctctgtgaaggctcagcagaggtgggatcccacgccccctcccggcccctccctgccctccattcagggagaaacctctccttcccgtgtgagaagggccagagggtccaggcatcccaagtccagcgtgaagggccacagcccctcttggctgccaagcacgcagatcccatggacatttggggaaagggctccttgggctgctggtgaacttctgtggccaccacctcctgctcctgacctccctgggagggtgctatcagttctgtcctggccctttcagttttataagttggtttccagcccccagtgtcctgacttctgtctgccacatgaggagggaggccctgcctgtgtgggagggtggttactgtgggtggaatagtggaggccttcaactgattagacaaggcccgcccacatcttggagggcatctgccttactgattaaaatgtcaatgtaatct

SEQ ID NO: 25101 - DNA, 1411 bp, Homo sapiens
  source 1..1411: mol_type = unassigned DNA
gcgtggcggccgcagcgctgagggagccggtgccatctgtgggggctttgggccaggggtctccggacagcatgagcgtgggcttcatcggcgctggccagctggcttttgccctggccaagggcttcacagcagcaggcgtcttggctgcccacaagataatggctagctccccagacatggacctggccacagtttctgctctcaggaagatgggggtgaagttgacaccccacaacaaggagacggtgcagcacagtgatgtgctcttcctggctgtgaagccacacatcatctccattgagaagctgtcagcgtttcggccagcccccagggtcatccgctgcatgaccaacactccagtcgtggtgcgggagggggccaccgtgtatgccacaggcacgcacgcccaggtggaggacgggaggctcatggagcagctgctgagcagcgtgggcttctgcacggaggtggaagaggacctgattgatgccgtcacggggctcagtggcagcggccccgcctacggggctgccaagatgctgctgcactcagaacagcacccaggccagctcaaggacaacgtcagctctcctggtggggccaccatccatgccttgcatgtgctggagagtgggggcttccgctccctgctcatcaacgctgtggaggcctcctgcatccgcacacggtgggcccccgcgctgcccgcttccctggtctccagtccttgcatggcagaggcctctctcacacacatctgctcattcacgcactcagcagatacgtattgagctccagcccagtgttgcgcaggacacagggggccccgaggttccctgggttactgtgggcagtgcccctccccaccttccgtttcctgcgaggagggaacatccatagagggacccggatgctgtgccctgtgctccccacataggttcaccattgtcatagctaggagtgtcatttgagccaggggccacaccagtggggtggcggggtggccagccacattaggaaacttctgtgggggcccaccttcctcctgccctcgctgtgggattaagttagaccagtaggacacgcagcaacatccaggcacaaggaaaattccatggaaggtgaaagaagcaaagagcaagagaaagacagagtttgctgtttgcctgggatcccacagctggtcaaaggcagagccaggctgggagccgctgtccccagttcaggtctgcagggtgggtgaggacgtctttctcgccacactgcccactctccagtccagacaccctcagactctgcgagtgccaccctgtaacagtgaggggaacacgaggggcctggcctcacctccagcctgcaggggagacaggtgtaaacccacatcccgtggtggggccacgagaactca

SEQ ID NO: 25102 - DNA, 1714 bp, Homo sapiens
  source 1..1714: mol_type = unassigned DNA
gtcagtggaggcagcagcggtagaggcggcggcgaggactggcgacggcgaggagatagtgtctgccttctggagagctgaccaaacactaaggatgctgaagttccgaacagtccatgggggcctgaggctcctgggaatccgccgaacctccaccgcccccgctgcctccccaaatgtccggcgcctggagtataagcccatcaagaaagtcatggtggccaacagaggtgagattgccatccgtgtgttccgggcctgcacggagctgggcatccgcaccgtagccatctactctgagcaggacacgggccagatgcaccggcagaaagcagatgaagcctatctcatcggccgcggcctggcccccgtgcaggcctacctgcacatcccagacatcatcaaggtggccaaggagaacaacgtagatgcagtgcaccctggctacgggttcctctctgagcgagcggacttcgcccaggcctgccaggatgcaggggtccggtttattgggccaagcccagaagtggtccgcaagatgggagacaaggtggaggcccgggccatcgccattgctgcgggtgttcccgttgtccctggcacagatgcccccatcacgtccctgcatgaggcccacgagttctccaacacctacggcttccccatcatcttcaaggcggcctatgggggtggagggcgtggcatgagggtggtgcacagctacgaggagctggaggagaattacacccgggcctactcagaggctctggccgcctttgggaatggggcgctgtttgtggagaagttcatcgagaagccacggcacatcgaggtgcagatcttgggggaccagtatgggaacatcctgcacctgtacgagcgagactgctccatccagcggcggcaccagaaggtggtcgagattgcccccgccgcccacctggacccgcagcttcggactcggctcaccagcgactctgtgaaactcgctaaacaggtgggctacgagaacgcaggcaccgtggagttcctggtggacaggcacggcaagcactacttcatcgaggtcaactcccgcctgcaggtggagcacacggtcacagaggagatcaccgacgtagacctggtccatgctcagatccacgtggctgagggcaggagcctacccgacctgggcctgcggcaggagaacatccgcatcaacgggtgtgccatccagtgccgggtcaccaccgaggaccccgcgcgcagcttccagccggacaccggccgcattgaggtgttccggagcggagagggcatgggcatccgcctggataatgcttccgccttccaaggagccgtcatctcgccccactacgactccctgctggtcaaagtcattgcccacggcaaagaccaccccacggccgccaccaagatgagcagggcccttgcggagttccgcgtccgaggtgtgaaggtcagaagacaccaggcacagcccttggccgcagccctgggccgcccctgtggacaggaagccaggaggccccaggctgctgtgactgcccccaccggccctggtagccccacccttgtccgtgtgccaccagcggcccgtgtcctgtcctcccgtctcgggggacctagccagacaacaccagagactagcactgaggtgtccccaacaattttattataaataaaaacaagactcccagtgggtggctgc

SEQ ID NO: 25103 - DNA, 4004 bp, Homo sapiens
  source 1..4004: mol_type = unassigned DNA
caggcagcaggcctcaggcccagacttgggtgttacaggaacagtgtggcctctctggaactctgcagaccaactgccgtgatgctgaagttccgaacagtccatgggggcctgaggctcctgggaatccgccgaacctccaccgcccccgctgcctccccaaatgtccggcgcctggagtataagcccatcaagaaagtcatggtggccaacagaggtgagattgccatccgtgtgttccgggcctgcacggagctgggcatccgcaccgtagccatctactctgagcaggacacgggccagatgcaccggcagaaagcagatgaagcctatctcatcggccgcggcctggcccccgtgcaggcctacctgcacatcccagacatcatcaaggtggccaaggagaacaacgtagatgcagtgcaccctggctacgggttcctctctgagcgagcggacttcgcccaggcctgccaggatgcaggggtccggtttattgggccaagcccagaagtggtccgcaagatgggagacaaggtggaggcccgggccatcgccattgctgcgggtgttcccgttgtccctggcacagatgcccccatcacgtccctgcatgaggcccacgagttctccaacacctacggcttccccatcatcttcaaggcggcctatgggggtggagggcgtggcatgagggtggtgcacagctacgaggagctggaggagaattacacccgggcctactcagaggctctggccgcctttgggaatggggcgctgtttgtggagaagttcatcgagaagccacggcacatcgaggtgcagatcttgggggaccagtatgggaacatcctgcacctgtacgagcgagactgctccatccagcggcggcaccagaaggtggtcgagattgcccccgccgcccacctggacccgcagcttcggactcggctcaccagcgactctgtgaaactcgctaaacaggtgggctacgagaacgcaggcaccgtggagttcctggtggacaggcacggcaagcactacttcatcgaggtcaactcccgcctgcaggtggagcacacggtcacagaggagatcaccgacgtagacctggtccatgctcagatccacgtggctgagggcaggagcctacccgacctgggcctgcggcaggagaacatccgcatcaacgggtgtgccatccagtgccgggtcaccaccgaggaccccgcgcgcagcttccagccggacaccggccgcattgaggtgttccggagcggagagggcatgggcatccgcctggataatgcttccgccttccaaggagccgtcatctcgccccactacgactccctgctggtcaaagtcattgcccacggcaaagaccaccccacggccgccaccaagatgagcagggcccttgcggagttccgcgtccgaggtgtgaagaccaacatcgccttcctgcagaatgtgctcaacaaccagcagttcctggcaggcactgtggacacccagttcatcgacgagaacccagagctgttccagctgcggcctgcacagaaccgggcccaaaagctgttgcactacctcggccatgtcatggtaaacggtccaaccaccccgattcccgtcaaggccagccccagccccacggaccccgttgtccctgcagtgcccataggcccgcccccggctggtttcagagacatcctgctgcgagaggggcctgagggctttgctcgagctgtgcggaaccacccggggctgctgctgatggacacgaccttcagggacgcccaccagtcactgctggccactcgtgtgcgcacccacgatctcaaaaagatcgccccctatgttgcccacaacttcagcaagctcttcagcatggagaactggggaggagccacgtttgacgtcgccatgcgcttcctgtatgagtgcccctggcggcggctgcaggagctccgggagctcatccccaacatccctttccagatgctgctgcggggggccaatgctgtgggctacaccaactacccagacaacgtggtcttcaagttctgtgaagtggccaaagagaatggcatggatgtcttccgtgtgtttgactccctcaactacttgcccaacatgctgctgggcatggaggcggcaggaagtgccggaggcgtggtggaggctgccatctcatacacgggcgacgtggccgaccccagccgcaccaagtactcactgcagtactacatgggcttggccgaagagctggtgcgagctggcacccacatcctgtgcatcaaggacatggccgggctgctgaagcccacggcctgcaccatgctggtcagctccctccgggaccgcttccccgacctcccactgcacatccacacccacgacacgtcaggggcaggcgtggcagccatgctggcctgtgcccaggctggagctgatgtggtggatgtggcagctgattccatgtctgggatgacttcacagcccagcatgggggccctggtggcctgtaccagagggactcccctggacacagaggtgcccatggagcgcgtgtttgactacagtgagtactgggagggggctcggggactgtacgcggccttcgactgcacggccaccatgaagtctggcaactcggacgtgtatgaaaatgagatcccagggggccagtacaccaacctgcacttccaggcccacagcatggggcttggctccaagttcaaggaggtcaagaaggcctatgtggaggccaaccagatgctgggcgatctcatcaaggtgacgccctcctccaagatcgtgggggacctggcccagtttatggtgcagaatggattgagccgggcagaggccgaagctcaggcggaagagctgtcctttccccgctccgtggtggagttcctgcagggctacatcggtgtcccccatggggggttccccgaaccctttcgctctaaggtactgaaggacctgccaagggtggaggggcggcctggagcctccctccctcccctggatctgcaggcactggagaaggagctggtagaccggcatggggaggaggtgacgccggaagatgtgctctcagcagctatgtaccccgatgtgtttgcccacttcaaggacttcactgccacctttggccccctggatagcctgaatactcgcctcttcctgcagggacccaagatcgcagaggagtttgaggtggagctggagcggggcaagacgctgcacatcaaagccctggccgtgagcgacctgaaccgggccggccagaggcaggtcttctttgagctcaatgggcagctgcggtccatcttggtcaaggacacccaggccatgaaggagatgcacttccaccccaaggccctaaaggacgtgaagggccagatcggggcgcccatgcctgggaaggtgatagacatcaaagtggtggcaggggccaaggtggccaagggccagcccctgtgtgtgctcagtgccatgaagatggagactgtggtgacctcacccatggagggtactgtccgcaaggttcatgtgaccaaggacatgacactggaaggtgacgacctcatcctggagatcgagtgatcttgccccagaccggcagcctggccatccccaagccttcaacagaagctgtgctgccacggcaggcccaggccagccagtgcccgaggccaggaaggccgggccgtggaggtcctgtccacagctggacaggagagacaccgcctgcggtggttcattcctttcagccatcgtcctttcctccggcggacagctgcttacatgttcatctcttgccaaataagggtcccctcctcactggagactacaagtggtgggtcaggtggtcctaggacccaggggaggtttaggggtcctatctcctgggggaaggggagatctaagatgtcccaggtcctgggaagtttactcaataaagctggctttcccctgccctccatgctgga

SEQ ID NO: 25104 - DNA, 4005 bp, Homo sapiens
  source 1..4005: mol_type = unassigned DNA
gtcagtggaggcagcagcggtagaggcggcggcgaggactggcgacggcgaggagatagtgtctgccttctggagagctgaccaaacactaaggatgctgaagttccgaacagtccatgggggcctgaggctcctgggaatccgccgaacctccaccgcccccgctgcctccccaaatgtccggcgcctggagtataagcccatcaagaaagtcatggtggccaacagaggtgagattgccatccgtgtgttccgggcctgcacggagctgggcatccgcaccgtagccatctactctgagcaggacacgggccagatgcaccggcagaaagcagatgaagcctatctcatcggccgcggcctggcccccgtgcaggcctacctgcacatcccagacatcatcaaggtggccaaggagaacaacgtagatgcagtgcaccctggctacgggttcctctctgagcgagcggacttcgcccaggcctgccaggatgcaggggtccggtttattgggccaagcccagaagtggtccgcaagatgggagacaaggtggaggcccgggccatcgccattgctgcgggtgttcccgttgtccctggcacagatgcccccatcacgtccctgcatgaggcccacgagttctccaacacctacggcttccccatcatcttcaaggcggcctatgggggtggagggcgtggcatgagggtggtgcacagctacgaggagctggaggagaattacacccgggcctactcagaggctctggccgcctttgggaatggggcgctgtttgtggagaagttcatcgagaagccacggcacatcgaggtgcagatcttgggggaccagtatgggaacatcctgcacctgtacgagcgagactgctccatccagcggcggcaccagaaggtggtcgagattgcccccgccgcccacctggacccgcagcttcggactcggctcaccagcgactctgtgaaactcgctaaacaggtgggctacgagaacgcaggcaccgtggagttcctggtggacaggcacggcaagcactacttcatcgaggtcaactcccgcctgcaggtggagcacacggtcacagaggagatcaccgacgtagacctggtccatgctcagatccacgtggctgagggcaggagcctacccgacctgggcctgcggcaggagaacatccgcatcaacgggtgtgccatccagtgccgggtcaccaccgaggaccccgcgcgcagcttccagccggacaccggccgcattgaggtgttccggagcggagagggcatgggcatccgcctggataatgcttccgccttccaaggagccgtcatctcgccccactacgactccctgctggtcaaagtcattgcccacggcaaagaccaccccacggccgccaccaagatgagcagggcccttgcggagttccgcgtccgaggtgtgaagaccaacatcgccttcctgcagaatgtgctcaacaaccagcagttcctggcaggcactgtggacacccagttcatcgacgagaacccagagctgttccagctgcggcctgcacagaaccgggcccaaaagctgttgcactacctcggccatgtcatggtaaacggtccaaccaccccgattcccgtcaaggccagccccagccccacggaccccgttgtccctgcagtgcccataggcccgcccccggctggtttcagagacatcctgctgcgagaggggcctgagggctttgctcgagctgtgcggaaccacccggggctgctgctgatggacacgaccttcagggacgcccaccagtcactgctggccactcgtgtgcgcacccacgatctcaaaaagatcgccccctatgttgcccacaacttcagcaagctcttcagcatggagaactggggaggagccacgtttgacgtcgccatgcgcttcctgtatgagtgcccctggcggcggctgcaggagctccgggagctcatccccaacatccctttccagatgctgctgcggggggccaatgctgtgggctacaccaactacccagacaacgtggtcttcaagttctgtgaagtggccaaagagaatggcatggatgtcttccgtgtgtttgactccctcaactacttgcccaacatgctgctgggcatggaggcggcaggaagtgccggaggcgtggtggaggctgccatctcatacacgggcgacgtggccgaccccagccgcaccaagtactcactgcagtactacatgggcttggccgaagagctggtgcgagctggcacccacatcctgtgcatcaaggacatggccgggctgctgaagcccacggcctgcaccatgctggtcagctccctccgggaccgcttccccgacctcccactgcacatccacacccacgacacgtcaggggcaggcgtggcagccatgctggcctgtgcccaggctggagctgatgtggtggatgtggcagctgattccatgtctgggatgacttcacagcccagcatgggggccctggtggcctgtaccagagggactcccctggacacagaggtgcccatggagcgcgtgtttgactacagtgagtactgggagggggctcggggactgtacgcggccttcgactgcacggccaccatgaagtctggcaactcggacgtgtatgaaaatgagatcccagggggccagtacaccaacctgcacttccaggcccacagcatggggcttggctccaagttcaaggaggtcaagaaggcctatgtggaggccaaccagatgctgggcgatctcatcaaggtgacgccctcctccaagatcgtgggggacctggcccagtttatggtgcagaatggattgagccgggcagaggccgaagctcaggcggaagagctgtcctttccccgctccgtggtggagttcctgcagggctacatcggtgtcccccatggggggttccccgaaccctttcgctctaaggtactgaaggacctgccaagggtggaggggcggcctggagcctccctccctcccctggatctgcaggcactggagaaggagctggtagaccggcatggggaggaggtgacgccggaagatgtgctctcagcagctatgtaccccgatgtgtttgcccacttcaaggacttcactgccacctttggccccctggatagcctgaatactcgcctcttcctgcagggacccaagatcgcagaggagtttgaggtggagctggagcggggcaagacgctgcacatcaaagccctggccgtgagcgacctgaaccgggccggccagaggcaggtcttctttgagctcaatgggcagctgcggtccatcttggtcaaggacacccaggccatgaaggagatgcacttccaccccaaggccctaaaggacgtgaagggccagatcggggcgcccatgcctgggaaggtgatagacatcaaagtggtggcaggggccaaggtggccaagggccagcccctgtgtgtgctcagtgccatgaagatggagactgtggtgacctcacccatggagggtactgtccgcaaggttcatgtgaccaaggacatgacactggaaggtgacgacctcatcctggagatcgagtgatcttgccccagaccggcagcctggccatccccaagccttcaacagaagctgtgctgccacggcaggcccaggccagccagtgcccgaggccaggaaggccgggccgtggaggtcctgtccacagctggacaggagagacaccgcctgcggtggttcattcctttcagccatcgtcctttcctccggcggacagctgcttacatgttcatctcttgccaaataagggtcccctcctcactggagactacaagtggtgggtcaggtggtcctaggacccaggggaggtttaggggtcctatctcctgggggaaggggagatctaagatgtcccaggtcctgggaagtttactcaataaagctggctttcccctgcc

SEQ ID NO: 25105 - DNA, 4192 bp, Homo sapiens
  source 1..4192: mol_type = unassigned DNA
gtcagtggaggcagcagcggtagaggcggcggcgaggactggcgacggcgaggagctgccttctagtctcacctgtggacactttgccaaaggagtcgggcctgacggtggaagatgggaaatggccaaaagaataaaccatttcctcttacttaccgaatgaaaagcttgcttcatcttggcgttcaagactctctaatatgattccacctgttgggctctttcttccatttgcctccgcagatagtgtctgccttctggagagctgaccaaacactaaggatgctgaagttccgaacagtccatgggggcctgaggctcctgggaatccgccgaacctccaccgcccccgctgcctccccaaatgtccggcgcctggagtataagcccatcaagaaagtcatggtggccaacagaggtgagattgccatccgtgtgttccgggcctgcacggagctgggcatccgcaccgtagccatctactctgagcaggacacgggccagatgcaccggcagaaagcagatgaagcctatctcatcggccgcggcctggcccccgtgcaggcctacctgcacatcccagacatcatcaaggtggccaaggagaacaacgtagatgcagtgcaccctggctacgggttcctctctgagcgagcggacttcgcccaggcctgccaggatgcaggggtccggtttattgggccaagcccagaagtggtccgcaagatgggagacaaggtggaggcccgggccatcgccattgctgcgggtgttcccgttgtccctggcacagatgcccccatcacgtccctgcatgaggcccacgagttctccaacacctacggcttccccatcatcttcaaggcggcctatgggggtggagggcgtggcatgagggtggtgcacagctacgaggagctggaggagaattacacccgggcctactcagaggctctggccgcctttgggaatggggcgctgtttgtggagaagttcatcgagaagccacggcacatcgaggtgcagatcttgggggaccagtatgggaacatcctgcacctgtacgagcgagactgctccatccagcggcggcaccagaaggtggtcgagattgcccccgccgcccacctggacccgcagcttcggactcggctcaccagcgactctgtgaaactcgctaaacaggtgggctacgagaacgcaggcaccgtggagttcctggtggacaggcacggcaagcactacttcatcgaggtcaactcccgcctgcaggtggagcacacggtcacagaggagatcaccgacgtagacctggtccatgctcagatccacgtggctgagggcaggagcctacccgacctgggcctgcggcaggagaacatccgcatcaacgggtgtgccatccagtgccgggtcaccaccgaggaccccgcgcgcagcttccagccggacaccggccgcattgaggtgttccggagcggagagggcatgggcatccgcctggataatgcttccgccttccaaggagccgtcatctcgccccactacgactccctgctggtcaaagtcattgcccacggcaaagaccaccccacggccgccaccaagatgagcagggcccttgcggagttccgcgtccgaggtgtgaagaccaacatcgccttcctgcagaatgtgctcaacaaccagcagttcctggcaggcactgtggacacccagttcatcgacgagaacccagagctgttccagctgcggcctgcacagaaccgggcccaaaagctgttgcactacctcggccatgtcatggtaaacggtccaaccaccccgattcccgtcaaggccagccccagccccacggaccccgttgtccctgcagtgcccataggcccgcccccggctggtttcagagacatcctgctgcgagaggggcctgagggctttgctcgagctgtgcggaaccacccggggctgctgctgatggacacgaccttcagggacgcccaccagtcactgctggccactcgtgtgcgcacccacgatctcaaaaagatcgccccctatgttgcccacaacttcagcaagctcttcagcatggagaactggggaggagccacgtttgacgtcgccatgcgcttcctgtatgagtgcccctggcggcggctgcaggagctccgggagctcatccccaacatccctttccagatgctgctgcggggggccaatgctgtgggctacaccaactacccagacaacgtggtcttcaagttctgtgaagtggccaaagagaatggcatggatgtcttccgtgtgtttgactccctcaactacttgcccaacatgctgctgggcatggaggcggcaggaagtgccggaggcgtggtggaggctgccatctcatacacgggcgacgtggccgaccccagccgcaccaagtactcactgcagtactacatgggcttggccgaagagctggtgcgagctggcacccacatcctgtgcatcaaggacatggccgggctgctgaagcccacggcctgcaccatgctggtcagctccctccgggaccgcttccccgacctcccactgcacatccacacccacgacacgtcaggggcaggcgtggcagccatgctggcctgtgcccaggctggagctgatgtggtggatgtggcagctgattccatgtctgggatgacttcacagcccagcatgggggccctggtggcctgtaccagagggactcccctggacacagaggtgcccatggagcgcgtgtttgactacagtgagtactgggagggggctcggggactgtacgcggccttcgactgcacggccaccatgaagtctggcaactcggacgtgtatgaaaatgagatcccagggggccagtacaccaacctgcacttccaggcccacagcatggggcttggctccaagttcaaggaggtcaagaaggcctatgtggaggccaaccagatgctgggcgatctcatcaaggtgacgccctcctccaagatcgtgggggacctggcccagtttatggtgcagaatggattgagccgggcagaggccgaagctcaggcggaagagctgtcctttccccgctccgtggtggagttcctgcagggctacatcggtgtcccccatggggggttccccgaaccctttcgctctaaggtactgaaggacctgccaagggtggaggggcggcctggagcctccctccctcccctggatctgcaggcactggagaaggagctggtagaccggcatggggaggaggtgacgccggaagatgtgctctcagcagctatgtaccccgatgtgtttgcccacttcaaggacttcactgccacctttggccccctggatagcctgaatactcgcctcttcctgcagggacccaagatcgcagaggagtttgaggtggagctggagcggggcaagacgctgcacatcaaagccctggccgtgagcgacctgaaccgggccggccagaggcaggtcttctttgagctcaatgggcagctgcggtccatcttggtcaaggacacccaggccatgaaggagatgcacttccaccccaaggccctaaaggacgtgaagggccagatcggggcgcccatgcctgggaaggtgatagacatcaaagtggtggcaggggccaaggtggccaagggccagcccctgtgtgtgctcagtgccatgaagatggagactgtggtgacctcacccatggagggtactgtccgcaaggttcatgtgaccaaggacatgacactggaaggtgacgacctcatcctggagatcgagtgatcttgccccagaccggcagcctggccatccccaagccttcaacagaagctgtgctgccacggcaggcccaggccagccagtgcccgaggccaggaaggccgggccgtggaggtcctgtccacagctggacaggagagacaccgcctgcggtggttcattcctttcagccatcgtcctttcctccggcggacagctgcttacatgttcatctcttgccaaataagggtcccctcctcactggagactacaagtggtgggtcaggtggtcctaggacccaggggaggtttaggggtcctatctcctgggggaaggggagatctaagatgtcccaggtcctgggaagtttactcaataaagctggctttcccctgc

SEQ ID NO: 25106 - DNA, 699 bp, Homo sapiens
  source 1..699: mol_type = unassigned DNA
gctggggcacctgaaggagacttgggggcacccgcgtcgtgcctcctgggttgtgaggagtcgccgctgccgccactgcctgtgcttcatgaggaagatgctcgccgccgtctcccgcgtgctgtctggcgcttctcagaagccggcaagcagagtgctggtagcatcccgtaattttgcaaatgatgctacatttgaaattaagaaatgtgaccttcaccggctggaagaaggccctcctgtcacaacagtgctcaccagggaggatgggctcaaatactacaggatgatgcagactgtacgccgaatggagttgaaagcagatcagctgtataaacagaaaattattcgtggtttctgtcacttgtgtgatggtcagtttctccttcctctaacacaggaagcttgctgtgtgggcctggaggccggcatcaaccccacagaccatctcatcacagcctaccgggctcacggctttactttcacccggggcctttccgtccgagaaattctcgcagagcttacaggacgaaaaggaggttgtgctaaagggaaaggaggatcgatgcacatgtatgccaagaacttctacgggggcaatggcatcgtgggagcgcaggtgcccctgggcgctgggattgctctagcctgtaagtataatggaaaagatgaggtctgcctgactttatatggcgatgg

SEQ ID NO: 25107 - DNA, 709 bp, Homo sapiens
  source 1..709: mol_type = unassigned DNA
gaaacattggagagtttcattctcatacaggagcaggtcatgtgaaagtaaaatggtttggggcagttggattcatgcttcgcccctcccctgtttattaccaggtggatggaatggatatcctgtgcgtccgagaggcaacaaggtttgctgctgcctattgtagatctgggaaggggcccatcctgatggagctgcagacttaccgttaccacggacacagtatgagtgaccctggagtcagttaccgtacacgagaagaaattcaggaagtaagaagtaagagtgaccctattatgcttctcaaggacaggatggtgaacagcaatcttgccagtgtggaagaactaaaggaaattgatgtggaagtgaggaaggagattgaggatgctgcccagtttgccacggccgatcctgagccacctttggaagagctgggctaccacatctactccagcgacccaccttttgaagttcgtggtgccaatcagtggatcaagtttaagtcagtcagttaaggggaggagaaggagaggttataccttcagggggctaccagacagtgttctcaacttggttaaggaggaagaaaacccagtcaatgaaattcaatgaaattcttggaaacttccattaagtgtgtagattgagcaggtagtaattgcatgcagtttgtacattagtgcattaaaagatgaattattgagtg

SEQ ID NO: 25108 - DNA, 734 bp, Homo sapiens
  source 1..734: mol_type = unassigned DNA
gacttgggggcacccgcgtcgtgcctcctgggttgtgaggagtcgccgctgccgccactgcctgtgcttcatgaggaagatgctcgccgccgtctcccgcgtgctgtctggcgcttctcagaagccggcaagcagagtgctggtagcatcccgtaattttgcaaatgatgctacatttgaaattaagaaatgtgaccttcaccggctggaagaaggccctcctgtcacaacagtgctcaccagggaggatgggctcaaatactacaggatgatgcagactgtacgccgaatggagttgaaagcagatcagctgtataaacagaaaattattcgtggtttctgtcacttgtgtgatggtcaggaagcttgctgtgtgggcctggaggccggcatcaaccccacagaccatctcatcacagcctaccgggctcacggctttactttcacccggggcctttccgtccgagaaattctcgcagagcttacaggacgaaaaggaggttgtgctaaagggaaaggaggatcgatgcacatgtatgccaagaacttctacgggggcaatggcatcgtgggagcgcaggtagtcaaggacgaggattgtgtgctgctttagatttggccctggactttgtcttcaaaaactttcacagccccagacaacttttcctgaagtagtacagccatgtgctgcacagtgacgctttggtcaatgtcgcatatatgatgttggaccc

SEQ ID NO: 25109 - DNA, 3484 bp, Homo sapiens
  source 1..3484: mol_type = unassigned DNA
agcgcatgacgttattacgactctgtcacgccgcggtgcgactgaggcgtggcgtctgctggggcacctgaaggagacttgggggcacccgcgtcgtgcctcctgggttgtgaggagtcgccgctgccgccactgcctgtgcttcatgaggaagatgctcgccgccgtctcccgcgtgctgtctggcgcttctcagaagccgagacatggtcttgctacgttgcccagtctggtctccatctccaggctcaagcagtcctcccacctcggcctcccaaagtgctgggattactctcactctcttaaaaccaggcaggcaagcagagtgctggtagcatcccgtaattttgcaaatgatgctacatttgaaattaagaaatgtgaccttcaccggctggaagaaggccctcctgtcacaacagtgctcaccagggaggatgggctcaaatactacaggatgatgcagactgtacgccgaatggagttgaaagcagatcagctgtataaacagaaaattattcgtggtttctgtcacttgtgtgatggtcaggaagcttgctgtgtgggcctggaggccggcatcaaccccacagaccatctcatcacagcctaccgggctcacggctttactttcacccggggcctttccgtccgagaaattctcgcagagcttacaggacgaaaaggaggttgtgctaaagggaaaggaggatcgatgcacatgtatgccaagaacttctacgggggcaatggcatcgtgggagcgcaggtgcccctgggcgctgggattgctctagcctgtaagtataatggaaaagatgaggtctgcctgactttatatggcgatggtgctgctaaccagggccagatattcgaagcttacaacatggcagctttgtggaaattaccttgtattttcatctgtgagaataatcgctatggaatgggaacgtctgttgagagagcggcagccagcactgattactacaagagaggcgatttcattcctgggctgagagtggatggaatggatatcctgtgcgtccgagaggcaacaaggtttgctgctgcctattgtagatctgggaaggggcccatcctgatggagctgcagacttaccgttaccacggacacagtatgagtgaccctggagtcagttaccgtacacgagaagaaattcaggaagtaagaagtaagagtgaccctattatgcttctcaaggacaggatggtgaacagcaatcttgccagtgtggaagaactaaaggaaattgatgtggaagtgaggaaggagattgaggatgctgcccagtttgccacggccgatcctgagccacctttggaagagctgggctaccacatctactccagcgacccaccttttgaagttcgtggtgccaatcagtggatcaagtttaagtcagtcagttaaggggaggagaaggagaggttataccttcagggggctaccagacagtgttctcaacttggttaaggaggaagaaaacccagtcaatgaaattcaatgaaattcttggaaacttccattaagtgtgtagattgagcaggtagtaattgcatgcagtttgtacattagtgcattaaaagatgaattattgagtgcttaaagattatttttgacttaaaatagtatactttgaacaaatactctaattatgaaaaggaagaacaattccttgtatgcctgtttcccctgcccccagccacctttttgggaggagaccattatggcggggcccctcacagcattctaccaaccatagcacccaccccgagcagcgctggtgctgcagcctgttcgcgctgaccatttctctacaagatacaatatttattatcaggcaagaggacagttccattttaaaataagacttttgtaatcattccaattttgtaatcatttcaaaggccacataacttagttttctctacttacacattcagtataaatatgaagctattttctgttcatatcaaacattaactacaaggcacattcgtatcagttttgtgtttctcaaattgaagtaccataccagttctgaggcagtgtcccagcttccatgtttgttaaataccccttgtttgtttcaccattccagcaagtgctgaagggtgtactttttttgagacagggtcgggctctgttgcccaggctggagtgcagtggtgtgatcatggctcactgcagcctccacacctcctgggctcaagcaatcctcccacctcagcctcctgcatagctgggactacaagtgaatttcctaatattccgggaggtcaaaaccaaggctcactgttttcacaatacacacagttctatgtttataaataacaggtttcaaaagaaactcaggacagtatttaaaacaagttcttaaactattaattgaacaatggcatttttaaatatgtaaacacagcggaattcgtgtatacactaacagaagctttaacaaaacatgtagcgtggtgggacactctgccacagcttagctgattggtatcaagccttgtctttggtttctgaggcctcctgagcccttctgtactgggagaccgcactccagagtctgcagaggagaccacccctgggaaacaaacacagctgtcttcagagtcagtgcttcaagccaacagagcttaaaactgcagtccctaatttaaaaacctaatgaaaataaaaacattctcctcacatatggaggtgacgctcgtgtcccagcagtagtaggacatggccttagaggtacgtacctgcagagagctggctatttcaaatgactcgggaacaagaaggcaggctgcagtttaaagaagggggtgggtccagcgtgcaggcacgcttgccatgtgcctccacccactcccagccaggcattaatggcaggagattggccagctcttctctgtcacattcctatttctgacttctgcctggctttcagtttctgccccaccttggctttttcccagcttgaacctaatagaactccagagtttggggggaggcccagccctttgttttctgctcttgaagcatattcacacataaaaagttgtattctcttatacaaactgttttgaggctcttaccgtagtcgaaggtatcttagatcttccttagtgatctcattaagaatatccgaaagtgtataaccctcttcaacaatctgaaacaaagatcagatccttaagagctgagcagctgtgtaacaacagcataagaatttctttgttgtaaatttaccttttcaattgtctttgcatcagctccttgcagccgcaaccagtctataagctctttatctgttctctgcccgtaggggcctgctgggttctctgtaatacctgtaacgattggcaatttgttatatattagtctaaccataaaactcttcaaaagtaaccagttggattaataaatgattccagaatgtaaatgtgatgtgaaaaagagatg

SEQ ID NO: 25110 - DNA, 1527 bp, Homo sapiens
  source 1..1527: mol_type = unassigned DNA
gaaggagacttgggggcacccgcgtcgtgcctcctgggttgtgaggagtcgccgctgccgccactgcctgtgcttcatgaggaagatgctcgccgccgtctcccgcgtgctgtctggcgcttctcagaagccgtttgcagggtccccccccccccgccaccttacagtaggaagaaaattgagttccagatatgaagtcacctttgaaagtgcccaggcaagcagagtgctggtagcatcccgtaattttgcaaatgatgctacatttgaaattaagaaatgtgaccttcaccggctggaagaaggccctcctgtcacaacagtgctcaccagggaggatgggctcaaatactacaggatgatgcagactgtacgccgaatggagttgaaagcagatcagctgtataaacagaaaattattcgtggtttctgtcacttgtgtgatggtcaggaagcttgctgtgtgggcctggaggccggcatcaaccccacagaccatctcatcacagcctaccgggctcacggctttactttcacccggggcctttccgtccgagaaattctcgcagagcttacaggacgaaaaggaggttgtgctaaagggaaaggaggatcgatgcacatgtatgccaagaacttctacgggggcaatggcatcgtgggagcgcaggtgcccctgggcgctgggattgctctagcctgtaagtataatggaaaagatgaggtctgcctgactttatatggcgatggtgctgctaaccagggccagatattcgaagcttacaacatggcagctttgtggaaattaccttgtattttcatctgtgagaataatcgctatggaatgggaacgtctgttgagagagcggcagccagcactgattactacaagagaggcgatttcattcctgggctgagagtggatggaatggatatcctgtgcgtccgagaggcaacaaggtttgctgctgcctattgtagatctgggaaggggcccatcctgatggagctgcagacttaccgttaccacggacacagtatgagtgaccctggagtcagttaccgtacacgagaagaaattcaggaagtaagaagtaagagtgaccctattatgcttctcaaggacaggatggtgaacagcaatcttgccagtgtggaagaactaaaggaaattgatgtggaagtgaggaaggagattgaggatgctgcccagtttgccacggccgatcctgagccacctttggaagagctgggctaccacatctactccagcgacccaccttttgaagttcgtggtgccaatcagtggatcaagtttaagtcagtcagttaaggggaggagaaggagaggttataccttcagggggctaccagacagtgttctcaacttggttaaggaggaagaaaacccagtcaatgaaattcaatgaaattcttggaaacttccattaagtgtgtagattgagcaggtagtaattgcatgcagtttgtacattagtgcattaaaagatgaattattgagtgctt

SEQ ID NO: 25111 - DNA, 471 bp, Homo sapiens
  source 1..471: mol_type = unassigned DNA
gcgactgaggcgtggcgtctgctggggcacctgaaggagacttgggggcacccgcgtcgtgcctcctgggttgtgaggagtcgccgctgccgccactgcctgtgcttcatgaggaagatgctcgccgccgtctcccgcgtgctgtctggcgcttctcagaagccgtttgcagggtccccccccccccgccaccttacagtaggaagaaaattgagttccagatatgaagtcacctttgaaagtgcccaggcaagcagagtgctggtagcatcccgtaattttgcaaatgatgctacatttgaaattaagaaatgtgaccttcaccggctggaagaaggccctcctgtcacaacagtgctcaccagggaggatgggctcaaatactacaggatgatgcagactgtacgccgaatggagttgaaagcagatcagctgtataaacagaaaattattcgtggtttctgtcacttg

SEQ ID NO: 25112 - DNA, 3310 bp, Homo sapiens
  source 1..3310: mol_type = unassigned DNA
actgaggcgtggcgtctgctggggcacctgaaggagacttgggggcacccgcgtcgtgcctcctgggttgtgaggagtcgccgctgccgccactgcctgtgcttcatgaggaagatgctcgccgccgtctcccgcgtgctgtctggcgcttctcagaagccggcaagcagagtgctggtagcatcccgtaattttgcaaatgatgctacatttgaaattaagaaatgtgaccttcaccggctggaagaaggccctcctgtcacaacagtgctcaccagggaggatgggctcaaatactacaggatgatgcagactgtacgccgaatggagttgaaagcagatcagctgtataaacagaaaattattcgtggtttctgtcacttgtgtgatggtcaggaagcttgctgtgtgggcctggaggccggcatcaaccccacagaccatctcatcacagcctaccgggctcacggctttactttcacccggggcctttccgtccgagaaattctcgcagagcttacaggacgaaaaggaggttgtgctaaagggaaaggaggatcgatgcacatgtatgccaagaacttctacgggggcaatggcatcgtgggagcgcaggtgcccctgggcgctgggattgctctagcctgtaagtataatggaaaagatgaggtctgcctgactttatatggcgatggtgctgctaaccagggccagatattcgaagcttacaacatggcagctttgtggaaattaccttgtattttcatctgtgagaataatcgctatggaatgggaacgtctgttgagagagcggcagccagcactgattactacaagagaggcgatttcattcctgggctgagagtggatggaatggatatcctgtgcgtccgagaggcaacaaggtttgctgctgcctattgtagatctgggaaggggcccatcctgatggagctgcagacttaccgttaccacggacacagtatgagtgaccctggagtcagttaccgtacacgagaagaaattcaggaagtaagaagtaagagtgaccctattatgcttctcaaggacaggatggtgaacagcaatcttgccagtgtggaagaactaaaggaaattgatgtggaagtgaggaaggagattgaggatgctgcccagtttgccacggccgatcctgagccacctttggaagagctgggctaccacatctactccagcgacccaccttttgaagttcgtggtgccaatcagtggatcaagtttaagtcagtcagttaaggggaggagaaggagaggttataccttcagggggctaccagacagtgttctcaacttggttaaggaggaagaaaacccagtcaatgaaattcaatgaaattcttggaaacttccattaagtgtgtagattgagcaggtagtaattgcatgcagtttgtacattagtgcattaaaagatgaattattgagtgcttaaagattatttttgacttaaaatagtatactttgaacaaatactctaattatgaaaaggaagaacaattccttgtatgcctgtttcccctgcccccagccacctttttgggaggagaccattatggcggggcccctcacagcattctaccaaccatagcacccaccccgagcagcgctggtgctgcagcctgttcgcgctgaccatttctctacaagatacaatatttattatcaggcaagaggacagttccattttaaaataagacttttgtaatcattccaattttgtaatcatttcaaaggccacataacttagttttctctacttacacattcagtataaatatgaagctattttctgttcatatcaaacattaactacaaggcacattcgtatcagttttgtgtttctcaaattgaagtaccataccagttctgaggcagtgtcccagcttccatgtttgttaaataccccttgtttgtttcaccattccagcaagtgctgaagggtgtactttttttgagacagggtcgggctctgttgcccaggctggagtgcagtggtgtgatcatggctcactgcagcctccacacctcctgggctcaagcaatcctcccacctcagcctcctgcatagctgggactacaagtgaatttcctaatattccgggaggtcaaaaccaaggctcactgttttcacaatacacacagttctatgtttataaataacaggtttcaaaagaaactcaggacagtatttaaaacaagttcttaaactattaattgaacaatggcatttttaaatatgtaaacacagcggaattcgtgtatacactaacagaagctttaacaaaacatgtagcgtggtgggacactctgccacagcttagctgattggtatcaagccttgtctttggtttctgaggcctcctgagcccttctgtactgggagaccgcactccagagtctgcagaggagaccacccctgggaaacaaacacagctgtcttcagagtcagtgcttcaagccaacagagcttaaaactgcagtccctaatttaaaaacctaatgaaaataaaaacattctcctcacatatggaggtgacgctcgtgtcccagcagtagtaggacatggccttagaggtacgtacctgcagagagctggctatttcaaatgactcgggaacaagaaggcaggctgcagtttaaagaagggggtgggtccagcgtgcaggcacgcttgccatgtgcctccacccactcccagccaggcattaatggcaggagattggccagctcttctctgtcacattcctatttctgacttctgcctggctttcagtttctgccccaccttggctttttcccagcttgaacctaatagaactccagagtttggggggaggcccagccctttgttttctgctcttgaagcatattcacacataaaaagttgtattctcttatacaaactgttttgaggctcttaccgtagtcgaaggtatcttagatcttccttagtgatctcattaagaatatccgaaagtgtataaccctcttcaacaatctgaaacaaagatcagatccttaagagctgagcagctgtgtaacaacagcataagaatttctttgttgtaaatttaccttttcaattgtctttgcatcagctccttgcagccgcaaccagtctataagctctttatctgttctctgcccgtaggggcctgctgggttctctgtaatacctgtaacgattggcaatttgttatatattagtctaaccataaaactcttcaaaagtaaccagttggattaataaatgattccagaatgtaaa

SEQ ID NO: 25113 - DNA, 731 bp, Homo sapiens
  source 1..731: mol_type = unassigned DNA
gccgcggtgcgactgaggcgtggcgtctgctggggcacctgaaggagacttgggggcacccgcgtcgtgcctcctgggttgtgaggagtcgccgctgccgccactgcctgtgcttcatgaggaagatgctcgccgccgtctcccgcgtgctgtctggcgcttctcagaagccgagacatggtcttgctacgttgcccagtctggtctccatctccaggctcaagcagtcctcccacctcggcctcccaaagtgctgggattactctcactctcttaaaaccaggcaggcaagcagagtgctggtagcatcccgtaattttgcaaatgatgctacatttgaaattaagaaatgtgaccttcaccggctggaagaaggccctcctgtcacaacagtgctcaccagggaggatgggctcaaatactacaggatgatgcagactgtacgccgaatggagttgaaagcagatcagctgtataaacagaaaattattcgtggtttctgtcacttgtgtgatggtcaggaagcttgctgtgtgggcctggaggccggcatcaaccccacagaccatctcatcacagcctaccgggctcacggctttactttcacccggggcctttccgtccgagaaattctcgcagagcttacaggacgaaaaggaggttgtgctaaagggaaaggaggatcgatgcacatgtatgccaagaacttctacgggggcaatggcatcgtg

SEQ ID NO: 25114 - DNA, 3277 bp, Homo sapiens
  source 1..3277: mol_type = unassigned DNA
agcgcatgacgttattacgactctgtcacgccgcggtgcgactgaggcgtggcgtctgctggggcacctgaaggagacttgggggcacccgcgtcgtgcctcctgggttgtgaggagtcgccgctgccgccactgcctgtgcttcatgaggaagatgctcgccgccgtctcccgcgtgctgtctggcgcttctcagaagccggcaagcagagtgctggtagcatcccgtaattttgcaaatgatgctacatttgaaattaagaaatgtgaccttcaccggctggaagaaggccctcctgtcacaacagtgctcaccagggaggatgggctcaaatactacaggatgatgcagactgtacgccgaatggagttgaaagcagatcagctgtataaacagaaaattattcgtggtttctgtcacttgtgtgatggtcaggaagcttgctgtgtgggcctggaggccggcatcaaccccacagaccatctcatcacagcctaccgggctcacggctttactttcacccggggcctttccgtccgagaaattctcgcagagcttacaggacgaaaaggaggttgtgctaaagggaaaggaggatcgatgcacatgtatgccaagaacttctacgggggcaatggcatcgtgggagcgcagggccagatattcgaagcttacaacatggcagctttgtggaaattaccttgtattttcatctgtgagaataatcgctatggaatgggaacgtctgttgagagagcggcagccagcactgattactacaagagaggcgatttcattcctgggctgagagtggatggaatggatatcctgtgcgtccgagaggcaacaaggtttgctgctgcctattgtagatctgggaaggggcccatcctgatggagctgcagacttaccgttaccacggacacagtatgagtgaccctggagtcagttaccgtacacgagaagaaattcaggaagtaagaagtaagagtgaccctattatgcttctcaaggacaggatggtgaacagcaatcttgccagtgtggaagaactaaaggaaattgatgtggaagtgaggaaggagattgaggatgctgcccagtttgccacggccgatcctgagccacctttggaagagctgggctaccacatctactccagcgacccaccttttgaagttcgtggtgccaatcagtggatcaagtttaagtcagtcagttaaggggaggagaaggagaggttataccttcagggggctaccagacagtgttctcaacttggttaaggaggaagaaaacccagtcaatgaaattcaatgaaattcttggaaacttccattaagtgtgtagattgagcaggtagtaattgcatgcagtttgtacattagtgcattaaaagatgaattattgagtgcttaaagattatttttgacttaaaatagtatactttgaacaaatactctaattatgaaaaggaagaacaattccttgtatgcctgtttcccctgcccccagccacctttttgggaggagaccattatggcggggcccctcacagcattctaccaaccatagcacccaccccgagcagcgctggtgctgcagcctgttcgcgctgaccatttctctacaagatacaatatttattatcaggcaagaggacagttccattttaaaataagacttttgtaatcattccaattttgtaatcatttcaaaggccacataacttagttttctctacttacacattcagtataaatatgaagctattttctgttcatatcaaacattaactacaaggcacattcgtatcagttttgtgtttctcaaattgaagtaccataccagttctgaggcagtgtcccagcttccatgtttgttaaataccccttgtttgtttcaccattccagcaagtgctgaagggtgtactttttttgagacagggtcgggctctgttgcccaggctggagtgcagtggtgtgatcatggctcactgcagcctccacacctcctgggctcaagcaatcctcccacctcagcctcctgcatagctgggactacaagtgaatttcctaatattccgggaggtcaaaaccaaggctcactgttttcacaatacacacagttctatgtttataaataacaggtttcaaaagaaactcaggacagtatttaaaacaagttcttaaactattaattgaacaatggcatttttaaatatgtaaacacagcggaattcgtgtatacactaacagaagctttaacaaaacatgtagcgtggtgggacactctgccacagcttagctgattggtatcaagccttgtctttggtttctgaggcctcctgagcccttctgtactgggagaccgcactccagagtctgcagaggagaccacccctgggaaacaaacacagctgtcttcagagtcagtgcttcaagccaacagagcttaaaactgcagtccctaatttaaaaacctaatgaaaataaaaacattctcctcacatatggaggtgacgctcgtgtcccagcagtagtaggacatggccttagaggtacgtacctgcagagagctggctatttcaaatgactcgggaacaagaaggcaggctgcagtttaaagaagggggtgggtccagcgtgcaggcacgcttgccatgtgcctccacccactcccagccaggcattaatggcaggagattggccagctcttctctgtcacattcctatttctgacttctgcctggctttcagtttctgccccaccttggctttttcccagcttgaacctaatagaactccagagtttggggggaggcccagccctttgttttctgctcttgaagcatattcacacataaaaagttgtattctcttatacaaactgttttgaggctcttaccgtagtcgaaggtatcttagatcttccttagtgatctcattaagaatatccgaaagtgtataaccctcttcaacaatctgaaacaaagatcagatccttaagagctgagcagctgtgtaacaacagcataagaatttctttgttgtaaatttaccttttcaattgtctttgcatcagctccttgcagccgcaaccagtctataagctctttatctgttctctgcccgtaggggcctgctgggttctctgtaatacctgtaacgattggcaatttgttatatattagtctaaccataaaactcttcaaaagtaaccagttggattaataaatgattccagaatgtaaatgtgatgtgaaaaagagatg

SEQ ID NO: 25115 - DNA, 129 bp, Homo sapiens
  source 1..129: mol_type = unassigned DNA
gccaatcagtggatcaagtttaagtcagttaaggggaggagaaggagaggttataccttcagggggctaccagacagtgttctcaacttggttaaggaggaagaaaacccagtcaatgaaattcaatga

SEQ ID NO: 25116 - DNA, 3391 bp, Homo sapiens
  source 1..3391: mol_type = unassigned DNA
agcgcatgacgttattacgactctgtcacgccgcggtgcgactgaggcgtggcgtctgctggggcacctgaaggagacttgggggcacccgcgtcgtgcctcctgggttgtgaggagtcgccgctgccgccactgcctgtgcttcatgaggaagatgctcgccgccgtctcccgcgtgctgtctggcgcttctcagaagccggcaagcagagtgctggtagcatcccgtaattttgcaaatgatgctacatttgaaattaagaaatgtgaccttcaccggctggaagaaggccctcctgtcacaacagtgctcaccagggaggatgggctcaaatactacaggatgatgcagactgtacgccgaatggagttgaaagcagatcagctgtataaacagaaaattattcgtggtttctgtcacttgtgtgatggtcagtttctccttcctctaacacaggaagcttgctgtgtgggcctggaggccggcatcaaccccacagaccatctcatcacagcctaccgggctcacggctttactttcacccggggcctttccgtccgagaaattctcgcagagcttacaggacgaaaaggaggttgtgctaaagggaaaggaggatcgatgcacatgtatgccaagaacttctacgggggcaatggcatcgtgggagcgcaggtgcccctgggcgctgggattgctctagcctgtaagtataatggaaaagatgaggtctgcctgactttatatggcgatggtgctgctaaccagggccagatattcgaagcttacaacatggcagctttgtggaaattaccttgtattttcatctgtgagaataatcgctatggaatgggaacgtctgttgagagagcggcagccagcactgattactacaagagaggcgatttcattcctgggctgagagtggatggaatggatatcctgtgcgtccgagaggcaacaaggtttgctgctgcctattgtagatctgggaaggggcccatcctgatggagctgcagacttaccgttaccacggacacagtatgagtgaccctggagtcagttaccgtacacgagaagaaattcaggaagtaagaagtaagagtgaccctattatgcttctcaaggacaggatggtgaacagcaatcttgccagtgtggaagaactaaaggaaattgatgtggaagtgaggaaggagattgaggatgctgcccagtttgccacggccgatcctgagccacctttggaagagctgggctaccacatctactccagcgacccaccttttgaagttcgtggtgccaatcagtggatcaagtttaagtcagtcagttaaggggaggagaaggagaggttataccttcagggggctaccagacagtgttctcaacttggttaaggaggaagaaaacccagtcaatgaaattcaatgaaattcttggaaacttccattaagtgtgtagattgagcaggtagtaattgcatgcagtttgtacattagtgcattaaaagatgaattattgagtgcttaaagattatttttgacttaaaatagtatactttgaacaaatactctaattatgaaaaggaagaacaattccttgtatgcctgtttcccctgcccccagccacctttttgggaggagaccattatggcggggcccctcacagcattctaccaaccatagcacccaccccgagcagcgctggtgctgcagcctgttcgcgctgaccatttctctacaagatacaatatttattatcaggcaagaggacagttccattttaaaataagacttttgtaatcattccaattttgtaatcatttcaaaggccacataacttagttttctctacttacacattcagtataaatatgaagctattttctgttcatatcaaacattaactacaaggcacattcgtatcagttttgtgtttctcaaattgaagtaccataccagttctgaggcagtgtcccagcttccatgtttgttaaataccccttgtttgtttcaccattccagcaagtgctgaagggtgtactttttttgagacagggtcgggctctgttgcccaggctggagtgcagtggtgtgatcatggctcactgcagcctccacacctcctgggctcaagcaatcctcccacctcagcctcctgcatagctgggactacaagtgaatttcctaatattccgggaggtcaaaaccaaggctcactgttttcacaatacacacagttctatgtttataaataacaggtttcaaaagaaactcaggacagtatttaaaacaagttcttaaactattaattgaacaatggcatttttaaatatgtaaacacagcggaattcgtgtatacactaacagaagctttaacaaaacatgtagcgtggtgggacactctgccacagcttagctgattggtatcaagccttgtctttggtttctgaggcctcctgagcccttctgtactgggagaccgcactccagagtctgcagaggagaccacccctgggaaacaaacacagctgtcttcagagtcagtgcttcaagccaacagagcttaaaactgcagtccctaatttaaaaacctaatgaaaataaaaacattctcctcacatatggaggtgacgctcgtgtcccagcagtagtaggacatggccttagaggtacgtacctgcagagagctggctatttcaaatgactcgggaacaagaaggcaggctgcagtttaaagaagggggtgggtccagcgtgcaggcacgcttgccatgtgcctccacccactcccagccaggcattaatggcaggagattggccagctcttctctgtcacattcctatttctgacttctgcctggctttcagtttctgccccaccttggctttttcccagcttgaacctaatagaactccagagtttggggggaggcccagccctttgttttctgctcttgaagcatattcacacataaaaagttgtattctcttatacaaactgttttgaggctcttaccgtagtcgaaggtatcttagatcttccttagtgatctcattaagaatatccgaaagtgtataaccctcttcaacaatctgaaacaaagatcagatccttaagagctgagcagctgtgtaacaacagcataagaatttctttgttgtaaatttaccttttcaattgtctttgcatcagctccttgcagccgcaaccagtctataagctctttatctgttctctgcccgtaggggcctgctgggttctctgtaatacctgtaacgattggcaatttgttatatattagtctaaccataaaactcttcaaaagtaaccagttggattaataaatgattccagaatgtaaatgtgatgtgaaaaagagatg

SEQ ID NO: 25117 - DNA, 1387 bp, Homo sapiens
  source 1..1387: mol_type = unassigned DNA
aggccaggccttccggcggtcgttacgggacgccgctgccatctacagcactccgtgaagaatatgctggccgccttcatctcccgcgtgttgaggcgagttgcccagaaatcagctcgcagagtgctggtggcatcccgtaactcctcaaatgacgctacatttgaaattaagaaatgtgatctttatctgttggaagagggtccccctgtcactacagtgctcactagggcggaggggcttaaatactacaggatgatgctgactgttcgccgcatggaattgaaggcagatcagctgtacaaacagaaattcattcgcggtttctgtcacctgtgcgatggtcaggaagcttgttgcgtgggccttgaggccggcataaacccctcggatcacgtcattacatcctatagggctcatggtgtgtgctatactcggggactttctgtccgatccattctcgcagagctgacgggaagaagaggaggttgtgctaaaggaaaaggaggatcgatgcatatgtataccaagaacttctatgggggcaatggcatcgtcggtgcacagggccccctgggcgctggcattgctctggcctgtaaatataaaggaaacgatgagatctgtttgactttatatggggatggcgctgcgaatcaggggcagatagccgaagctttcaatatggcagctttatggaaattaccttgtgttttcatctgtgagaataacctatatggaatgggaacatctactgagagagcagcagccagccctgattactacaagaggggcaattttatccctgggctaaaggtcgatggaatggatgttctgtgtgttcgtgaggcaacaaaatttgcagctaactactgtagatctggaaaggggcccatactgatggagctgcaaacctaccgttatcatggacacagtatgagtgatcctggagtcagttatcgtacacgagaagaaattcaggaagtaagaagtaagagggatcctataataattctccaagatagaatggtaaacagcaagctcgccactgtggaagaattaaaggaaattggggctgaggtgaggaaagaaattgatgatgctgcccagtttgctaccactgatcctgagccacatttggaagaattaggccatcacatctacagcagtgattcatcttttgaagttcgtggtgcaaatccatggatcaagtttaagtccgtcagttaaagggaggctacgtgtgaatttatcatcagtctctcaatggaatgttcatggtcaaatttaagaaactgtgttctcaactcaaggaggaataaaactcataaaacaaaagccttgtaagcatttattaaaagagattattaaaagagattgaaagaca

SEQ ID NO: 25118 - DNA, 1527 bp, Homo sapiens
  source 1..1527: mol_type = unassigned DNA
cccctctgttgtcgtttggcagcggatagaggacacgaccaagatggcggcggtgtctggcttggtgcggagaccccttcgggaggtctccgggctgctgaagaggcgctttcactggaccgcgccggctgcgctgcaggtgacagttcgtgatgctataaatcagggtatggatgaggagctggaaagagatgagaaggtatttctgcttggagaagaagttgcccagtatgatggggcatacaaggttagtcgagggctgtggaagaaatatggagacaagaggattattgacactcccatatcagagatgggctttgctggaattgctgtaggtgcagctatggctgggttgcggcccatttgtgaatttatgaccttcaatttctccatgcaagccattgaccaggttataaactcagctgccaagacctactacatgtctggtggccttcagcctgtgcctatagtcttcagagggcccaatggtgcctcagcaggtgtagctgcccagcactcacagtgctttgctgcctggtatgggcactgcccaggcttaaaggtggtcagtccctggaattcagaggatgctaaaggacttattaaatcagccattcgggataacaatccagtggtggtgctagagaatgaattgatgtatggggttccttttgaatttcctccggaagctcagtcaaaagattttctgattcctattggaaaagccaaaatagaaaggcaaggaacacatataactgtggtttcccattcaagacctgtgggccactgcttagaagctgcagcagtgctatctaaagaaggagttgaatgtgaggtgataaatatgcgtaccattagaccaatggacatggaaaccatagaagccagtgtcatgaagacaaatcatcttgtaactgtggaaggaggctggccacagtttggagtaggagctgaaatctgtgccaggatcatggaaggtcctgcgttcaatttcctggatgctcctgctgttcgtgtcactggtgctgatgtccctatgccttatgcaaagattctagaggacaactctatacctcaggtcaaagacatcatatttgcaataaagaaaacattaaatatttagtttggacttgaatatcaagtcgttgaaatttatttgaaatacttgctggcactgcacctggatttgtactgcaagacctgactattcataacggaaaacgatttctaaagcaacagcaggtatttttgtacagggaagtttaaatgtgtttgtgtatggaaaactctccactctcctcccctagatgccatgcttccttttgtctgttacggttgccatgttctttgaataacaaattatataacattttatcctctctcaccacaaggacaaagtatggatgtggcagagtcctcatgaaagatgtatccaaacaagataacttatatgtataaaattaaagcatataatatacatttactgttagtttgttttgataaggaataaaggaatttctaacatga

SEQ ID NO: 25119 - DNA, 1478 bp, Homo sapiens
  source 1..1478: mol_type = unassigned DNA
gccggcccctctgttgtcgtttggcagcggatagaggacacgaccaagatggcggcggtgtctggcttggtgcggagaccccttcgggaggtgacagttcgtgatgctataaatcagggtatggatgaggagctggaaagagatgagaaggtatttctgcttggagaagaagttgcccagtatgatggggcatacaaggttagtcgagggctgtggaagaaatatggagacaagaggattattgacactcccatatcagagatgggctttgctggaattgctgtaggtgcagctatggctgggttgcggcccatttgtgaatttatgaccttcaatttctccatgcaagccattgaccaggttataaactcagctgccaagacctactacatgtctggtggccttcagcctgtgcctatagtcttcagagggcccaatggtgcctcagcaggtgtagctgcccagcactcacagtgctttgctgcctggtatgggcactgcccaggcttaaaggtggtcagtccctggaattcagaggatgctaaaggacttattaaatcagccattcgggataacaatccagtggtggtgctagagaatgaattgatgtatggggttccttttgaatttcctccggaagctcagtcaaaagattttctgattcctattggaaaagccaaaatagaaaggcaaggaacacatataactgtggtttcccattcaagacctgtgggccactgcttagaagctgcagcagtgctatctaaagaaggagttgaatgtgaggtgataaatatgcgtaccattagaccaatggacatggaaaccatagaagccagtgtcatgaagacaaatcatcttgtaactgtggaaggaggctggccacagtttggagtaggagctgaaatctgtgccaggatcatggaaggtcctgcgttcaatttcctggatgctcctgctgttcgtgtcactggtgctgatgtccctatgccttatgcaaagattctagaggacaactctatacctcaggtcaaagacatcatatttgcaataaagaaaacattaaatatttagtttggacttgaatatcaagtcgttgaaatttatttgaaatacttgctggcactgcacctggatttgtactgcaagacctgactattcataacggaaaacgatttctaaagcaacagcaggtatttttgtacagggaagtttaaatgtgtttgtgtatggaaaactctccactctcctcccctagatgccatgcttccttttgtctgttacggttgccatgttctttgaataacaaattatataacattttatcctctctcaccacaaggacaaagtatggatgtggcagagtcctcatgaaagatgtatccaaacaagataacttatatgtataaaattaaagcatataatatacatttactgttagtttgttttgataaggaataaaggaatttctaacatga

SEQ ID NO: 25120 - DNA, 1397 bp, Homo sapiens
  source 1..1397: mol_type = unassigned DNA
acgaccaagatggcggcggtgtctggcttggtgcggagaccccttcgggaggtctccgggctgctgaagaggcgctttcactggaccgcgccggctgcgctgcaggtgacagttcgtgatgctataaatcagggtatggatgaggagctggaaagagatgagaaggtatttctgcttggagaagaagttgcccagtatgatggggcatacaaggttagtcgagggctgtggaagaaatatggagacaagaggattattgacactcccatatcagagatgggctttgctggaattgctgtaggtgcagctatggctgggttgcggcccatttgtgaatttatgaccttcaatttctccatgcaagccattgaccaggttataaactcagctgccaagacctactacatgtctggtgtagctgcccagcactcacagtgctttgctgcctggtatgggcactgcccaggcttaaaggtggtcagtccctggaattcagaggatgctaaaggacttattaaatcagccattcgggataacaatccagtggtggtgctagagaatgaattgatgtatggggttccttttgaatttcctccggaagctcagtcaaaagattttctgattcctattggaaaagccaaaatagaaaggcaaggaacacatataactgtggtttcccattcaagacctgtgggccactgcttagaagctgcagcagtgctatctaaagaaggagttgaatgtgaggtgataaatatgcgtaccattagaccaatggacatggaaaccatagaagccagtgtcatgaagacaaatcatcttgtaactgtggaaggaggctggccacagtttggagtaggagctgaaatctgtgccaggatcatggaaggtcctgcgttcaatttcctggatgctcctgctgttcgtgtcactggtgctgatgtccctatgccttatgcaaagattctagaggacaactctatacctcaggtcaaagacatcatatttgcaataaagaaaacattaaatatttagtttggacttgaatatcaagtcgttgaaatttatttgaaatacttgctggcactgcacctggatttgtactgcaagacctgactattcataacggaaaacgatttctaaagcaacagcaggtatttttgtacagggaagtttaaatgtgtttgtgtatggaaaactctccactctcctcccctagatgccatgcttccttttgtctgttacggttgccatgttctttgaataacaaattatataacattttatcctctctcaccacaaggacaaagtatggatgtggcagagtcctcatgaaagatgtatccaaacaagataacttatatgtataaaattaaagcatataatatacatttact

SEQ ID NO: 25121 - DNA, 3576 bp, Homo sapiens
  source 1..3576: mol_type = unassigned DNA
actgcatctccgactctgcccagactcttcactccgcggcaccctcaaaccccagcccaggccggggcgcacaagccagccagcgcacctgcagtcctcgcccggacgcgccgcgccccctcggaaccaggctctgctccgagcagccttcgcccctcaagccagccacagtccccgccaggccgggtgggcgtcaagatgaaggcggcccgcttcgtgctgcgcagcgctggctcgctcaacggcgccggcctggtgccccgagaggtggagcatttctcgcgctacagcccgtccccgctgtccatgaagcagctactggactttggttcagaaaatgcatgtgaaagaacttcttttgcatttttgcgacaagaattgcctgtgagactcgccaacattctgaaggaaattgatatcctcccgacccaattagtaaatacctcttcagtgcaattggttaaaagctggtatatacagagcctgatggatttggtggaattccatgagaaaagcccagatgaccagaaagcattatcagactttgtagatacactcatcaaagttcgaaatagacaccataatgtagtccctacaatggcacaaggaatcatagagtataaagatgcctgtacagttgacccagtcaccaatcaaaatcttcaatatttcttggatcgattttacatgaaccgtatttctactcggatgctgatgaaccagcacattcttatatttagtgactcacagacaggaaacccaagccacattggaagcattgatcctaactgtgatgtggtagcagtggtccaagatgcctttgagtgttcaaggatgctctgtgatcagtattatttatcatctccagaattaaagcttacacaagtgaatggaaaatttccagaccaaccaattcacatcgtgtatgttccttctcacctccatcatatgctctttgaactatttaagaatgcaatgcgggcaacagttgaacaccaggaaaatcagccttcccttacaccaatagaggttattgttgtcttgggaaaagaagaccttaccattaagatttcagacagaggaggtggtgttcccctgagaattattgaccgcctctttagttatacatactccactgcaccaacgcctgtgatggataattcccggaatgctcctttggctggttttggttacggcttgccaatttctcgtctgtatgcaaagtactttcaaggagatctgaatctctactctttatcaggatatggaacagatgctatcatctacttaaaggctttgtcttctgagtctatagaaaaacttccagtttttaacaagtcagccttcaaacattatcagatgagctctgaggctgatgactggtgtatcccaagcagggaaccaaagaacctggcaaaagaagtggccatgtgaagagggacactcaggacactttacgggatcaaagtgggtctacaccagtgctgcttcctgaatgtttgtgtgtgaacccttgtttcctccaaaacaaacgacagcaacgaaaactccttaatcagaacactgatccaatgaggaatggagcttgtttctgtgacccaggagaacttagtgcaagactacaggagttaacagatggccagctccttattttttaatgtagaataactcctgagtttatatcaaatcctgaagaaataagcctcagttttccatctgtttttgataagaataagaaagggagtgagtgtgaagatggtggttagcagtttcactaagactgatattttaggcctcttgttcacatcaaaagatattggtgtcagaataccagcattttcctgccatgcaaaggattaaaacttagtttacactatgtggttacaaatatatgtcaatgtacattttgaacatatttatgtgctatggaaggaaatgctggtgactaaaataaggtttactctgaaagaggaggaattttattcaaagcattcaaacattttattcaagtgtttcaaaattcaaagcattgtattcaaagttgcagtgaaggcatcaacttatgtaaaaactcagaaggaaggctcctctgataaaaacacagctcctttattatgctgcttttcttgttcactttacacactaagtaaacacttattgtcaggtgcctagtcttgagtgaattgttagatgtgcactgaactcgggatgttggggattggagagagagaattgccaaagtaacagcaaaaatatctcttactttgctttgtttataaataaattagtagattggaaaaactagtgttagggaaagaaatcacatgttcagagcctaattcagtaggaagggcttttctctaccctgaaatgaaggtaatccaaaggcatccattttctaggcttaaaagatatatttttgatatatttaattatattctctacactccagcattaatatgtctgtttaaaaattactaattctcaaatggctcaagaacattagaatttaagtaccttttagagtaattattttaagcaaatagcctggacgtaagagattctcatgccagcatgctttcatttgtcagttgttgtgactgagagataatgaatgacacctgaaatgcatatggtatttttgggagagttaaggtataatttgaaggttggcagaccagttgcgctgattactcttagagaagaagaaatggaaaaatgaaagaaggcaggaaggaaagaaaggatataggaagagagggaagcagaaggcaggcatttttctattttccccacaaattatttcaaaaaaaatctgtattttctgggatatgtcattggcaagaggaagaactggtgttttgaaagcagtatggattctttaaatgcctctcactcttacaagatagtaggctttgagataataaacttacccgtgtcaattaacatttaaactggcatatagaaaaaaaggaggatttttctgcattgtaaaataatcagtatggtttatatgttgaatttgacatttgtgtgtaatttcatggtggcctagtgttgtggtgcttctggtaatggtaatagaagctcaactatttttttgtggatttcagtttttatcatcagaagtcctagacagtgacatttcttaatggtgggagtccagctcatgcatttctgattatacaaaacagtttgcagtaggttatttgtcatttcagttttttactgaaatttgagctaaacatttttacatgtaaatacttgtatttaccaaagatttaaatcagttgattaattaattaactcaaatactgtgaactatctctaaaacactagaaaaaagaaatgttagtatctcaattacaccaactgtgcaaatgaactttgataaaatagaaataatctacattggcctttgtgaaatctggggaagagctttaggattctagtagatggatactgaatactcaggcccacttaaattattaatgtatacattgtgtttttgtctttatgctatgtacagagaaatgtgataattttttataataaatattttttatgatgataaaa

SEQ ID NO: 25122 - DNA, 3491 bp, Homo sapiens
  source 1..3491: mol_type = unassigned DNA
aagacttgaacttgaatctcgaaccactgcatctccgactctgcccagactcttcactccgcggcaccctcaaaccccagcccaggccggggcgcacaagccagccagcgcacctgcagtcctcgcccggacgcgccgcgccccctcggaaccaggctctgctccgagcagccttcgcccctcaaggtggagcatttctcgcgctacagcccgtccccgctgtccatgaagcagctactggactttggttcagaaaatgcatgtgaaagaacttcttttgcatttttgcgacaagaattgcctgtgagactcgccaacattctgaaggaaattgatatcctcccgacccaattagtaaatacctcttcagtgcaattggttaaaagctggtatatacagagcctgatggatttggtggaattccatgagaaaagcccagatgaccagaaagcattatcagactttgtagatacactcatcaaagttcgaaatagacaccataatgtagtccctacaatggcacaaggaatcatagagtataaagatgcctgtacagttgacccagtcaccaatcaaaatcttcaatatttcttggatcgattttacatgaaccgtatttctactcggatgctgatgaaccagcacattcttatatttagtgactcacagacaggaaacccaagccacattggaagcattgatcctaactgtgatgtggtagcagtggtccaagatgcctttgagtgttcaaggatgctctgtgatcagtattatttatcatctccagaattaaagcttacacaagtgaatggaaaatttccagaccaaccaattcacatcgtgtatgttccttctcacctccatcatatgctctttgaactatttaagaatgcaatgcgggcaacagttgaacaccaggaaaatcagccttcccttacaccaatagaggttattgttgtcttgggaaaagaagaccttaccattaagatttcagacagaggaggtggtgttcccctgagaattattgaccgcctctttagttatacatactccactgcaccaacgcctgtgatggataattcccggaatgctcctttggctggttttggttacggcttgccaatttctcgtctgtatgcaaagtactttcaaggagatctgaatctctactctttatcaggatatggaacagatgctatcatctacttaaaggctttgtcttctgagtctatagaaaaacttccagtttttaacaagtcagccttcaaacattatcagatgagctctgaggctgatgactggtgtatcccaagcagggaaccaaagaacctggcaaaagaagtggccatgtgaagagggacactcaggacactttacgggatcaaagtgggtctacaccagtgctgcttcctgaatgtttgtgtgtgaacccttgtttcctccaaaacaaacgacagcaacgaaaactccttaatcagaacactgatccaatgaggaatggagcttgtttctgtgacccaggagaacttagtgcaagactacaggagttaacagatggccagctccttattttttaatgtagaataactcctgagtttatatcaaatcctgaagaaataagcctcagttttccatctgtttttgataagaataagaaagggagtgagtgtgaagatggtggttagcagtttcactaagactgatattttaggcctcttgttcacatcaaaagatattggtgtcagaataccagcattttcctgccatgcaaaggattaaaacttagtttacactatgtggttacaaatatatgtcaatgtacattttgaacatatttatgtgctatggaaggaaatgctggtgactaaaataaggtttactctgaaagaggaggaattttattcaaagcattcaaacattttattcaagtgtttcaaaattcaaagcattgtattcaaagttgcagtgaaggcatcaacttatgtaaaaactcagaaggaaggctcctctgataaaaacacagctcctttattatgctgcttttcttgttcactttacacactaagtaaacacttattgtcaggtgcctagtcttgagtgaattgttagatgtgcactgaactcgggatgttggggattggagagagagaattgccaaagtaacagcaaaaatatctcttactttgctttgtttataaataaattagtagattggaaaaactagtgttagggaaagaaatcacatgttcagagcctaattcagtaggaagggcttttctctaccctgaaatgaaggtaatccaaaggcatccattttctaggcttaaaagatatatttttgatatatttaattatattctctacactccagcattaatatgtctgtttaaaaattactaattctcaaatggctcaagaacattagaatttaagtaccttttagagtaattattttaagcaaatagcctggacgtaagagattctcatgccagcatgctttcatttgtcagttgttgtgactgagagataatgaatgacacctgaaatgcatatggtatttttgggagagttaaggtataatttgaaggttggcagaccagttgcgctgattactcttagagaagaagaaatggaaaaatgaaagaaggcaggaaggaaagaaaggatataggaagagagggaagcagaaggcaggcatttttctattttccccacaaattatttcaaaaaaaatctgtattttctgggatatgtcattggcaagaggaagaactggtgttttgaaagcagtatggattctttaaatgcctctcactcttacaagatagtaggctttgagataataaacttacccgtgtcaattaacatttaaactggcatatagaaaaaaaggaggatttttctgcattgtaaaataatcagtatggtttatatgttgaatttgacatttgtgtgtaatttcatggtggcctagtgttgtggtgcttctggtaatggtaatagaagctcaactatttttttgtggatttcagtttttatcatcagaagtcctagacagtgacatttcttaatggtgggagtccagctcatgcatttctgattatacaaaacagtttgcagtaggttatttgtcatttcagttttttactgaaatttgagctaaacatttttacatgtaaatacttgtatttaccaaagatttaaatcagttgattaattaattaactcaaatactgtgaactatctctaaaacactagaaaaaagaaatgttagtatctcaattacaccaactgtgcaaatgaactttgataaaatagaaataatctacattggcctttgtgaaatctggggaagagctttaggattctagtagatggatactgaatactcaggcccacttaaattattaatgtatacattgtgtttttgtctttatgctatgtacagagaaatgtgataattttttataataaatattttttatgatgat

SEQ ID NO: 25123 - DNA, 4272 bp, Homo sapiens
  source 1..4272: mol_type = unassigned DNA
actcgtcactgcgcagccaatcggcaggcgggaagcactccggcccgaacgtgcgggcggggcagggtggcggccccgcacggtaggggagcagagtgggcaggccgggggtgagggctcgcgctccgggagctgcacggggctgcgtggaaagagcgccgagcggtggcgtcgttgtcgccccctcctcgtcgggaagaatcgtttggtctcctgccgtgcccggaatcccagtcagaagttccagcctgccactgttctctgatgccatgccagcaccaactcaactgttttttcctctcatccgtaactgtgaactgagcaggatctatggcactgcatgttactgccaccacaaacatctctgttgttcctcatcgtacattcctcagagtcgactgagatacacacctcatccagcatatgctaccttttgcaggccaaaggagaactggtggcagtacacccaaggaaggagatatgcttccacaccacagaaattttacctcacacctccacaagtcaatagcatccttaaagctaatgaatacagtttcaaagtgccagaatttgacggcaaaaatgtcagttctatccttggatttgacagcaatcagctgcctgcaaatgcacccattgaggaccggagaagtgcagcaacctgcttgcagaccagagggatgcttttgggggtttttgatggccatgcaggttgtgcttgttcccaggcagtcagtgaaagactcttttattatattgctgtctctttgttaccccatgagactttgctagagattgaaaatgcagtggagagcggccgggcactgctacccattctccagtggcacaagcaccccaatgattactttagtaaggaggcatccaaattgtactttaacagcttgaggacttactggcaagagcttatagacctcaacactggtgagtcgactgatattgatgttaaggaggctctaattaatgccttcaagaggcttgataatgacatctccttggaggcgcaagttggtgatcctaattcttttctcaactacctggtgcttcgagtggcattttctggagccactgcttgtgtggcccatgtggatggtgttgaccttcatgtggccaatactggcgatagcagagccatgctgggtgtgcaggaagaggacggctcatggtcagcagtcacgctgtctaatgaccacaatgctcaaaatgaaagagaactagaacggctgaaattggaacatccaaagagtgaggccaagagtgtcgtgaaacaggatcggctgcttggcttgctgatgccatttagggcatttggagatgtaaagttcaaatggagcattgaccttcaaaagagagtgatagaatctggcccagaccagttgaatgacaatgaatataccaagtttattcctcctaattatcacacacctccttatctcactgctgagccagaggtaacttaccaccgattaaggccacaggataagtttctggtgttggctactgatgggttgtgggagactatgcataggcaggatgtggttaggattgtgggtgagtacctaactggcatgcatcaccaacagccaatagctgttggtggctacaaggtgactctgggacagatgcatggccttttaacagaaaggagaaccaaaatgtcctcggtatttgaggatcagaacgcagcaacccatctcattcgccacgctgtgggcaacaacgagtttgggactgttgatcatgagcgcctctctaaaatgcttagtcttcctgaagagcttgctcgaatgtacagagatgacattacaatcattgtagttcagttcaattctcatgttgtaggggcgtatcaaaaccaagaatagtgagtggctctttcactggcaattctcaaatgatatacatttaaagggcagattttttaaaaagatactactataataaacatttccagttggtcattctaagcatttacccttttgatactctagctagtcaggtactccaaattgactttgcagcagggtggcagggtcaggagagtctggtcctgcctagctcagatttcatggcacctgcacttgaagcaagtcacttctttatcacaggtgtcttgaaacattagcttcttttaccaacctgagaaaattaggatgacctggcaaataagatcttgaataggccaaaagcaagtatcttgctgtgtgtagtctcttggttaaagtgaagaaacagtactgttcacacctttcttcactgagattccagtgtacatgagaacatatatttattgcatgattttctagatacacagtctatgcattattcatatacatttattttagcctaaagtggttttcaaatccagttcttcaagccataaatgaccaagatccaagcaatctgaatttgtttttgtgattatttgactggaatgcttcttaagtggaataactatactccgttatccacccgatttcctaatgtaattgaaagattttctattttgccacacacttggagacaataagggtttttagttttatctactcttctattgaagttaaagaaagaaaaaaagatttttttatttgtattaatgaaaagctttagtttaaaataaggagatccagaataaaaagaagagactgatctcttcaattattgtcatctgtagccaccagcacatcactcttatgtaatccccaaaggcttggcatgccgtaagtgtgtggtgggtagactgctgccggggaatcgtacttcttatttagtaatgataagacttttcattatttttggaattttaaagatgacataaataagtttaaatatcaatttggggagtaaggtttaatattgccatcgggtattgagacaggaggaagtttctgtttttctccatttagacataggtcaattaaaatatttgggtttaaaatgactaaatgctttaaacatattgtagcttaagatatatgtgttaagatatatacatgagaaactttaaaaggtaactactgtgcatgcctgatgcttaatagaatacttagtggcatcaaatgtttgcagcagtctccataattatattcagtcccttctaatactgtatcaatgtaaatgaaataaatatattcaaattggctttttgatatgcatcaagtggcattttgttcctgtgtttaatagtgatctgtatacagctgtgcacatattgtcatcacttattctagcatcactgttaaggctgtgattatgtttgatattcacctggattttaatacaagccaatatcagcttcccattgtgtaataacttgggtgtttaggagtcttttcacattttttggggatatgaactagatgttcaagaactccttctggactgtggatactgaatcagtgtactattggctgcagaatttgtttcaattgaaaatagactcaggaagattgctgctcagaatatcatataatgtttattttttgaggtgtttttgtttttatttgtgtgtttttttttttttaagtcagcttggaacttttttcctgggtagtatttgggagagggaaaggctgtactatatatttatttctaaatgttttgactgggcatttttcttttaatgaaatatgtggactgctctagcaaaccctattttcagctactatttgaatattcttgaacaccaccactgaagagtttcatatacaccaaataatgtctcatctctatagtacagggaatataaaattggtttcctgtggtcatgatcaagatagtagtattattacacaagaaacttggtctgcagtctggaagcttgtctgctctatagaaatgaaaatgcagcatgaagttgacattgtggaaatgaaagtaattgggtattagaaatctgaaagtactgtcatctaaaagcaattgtgattttattgtaattggttgtcactgttgtacggtgtctagaattaaagaatacatgtaaactttcatggtatttagcctttcttaaatttttttaaaatttaaactttctaacctatgtattcaacttctgtatttatatttaatcagtggttcatgttatataatacacccttaactagttaaatggaatgttggtatggtacagagtaccatattgctaagaaaactgtcttataaaagatgtatatgtgtgaagacatgaaagtttaatgtacagaatggttggagaaatgcctatggtgaattaaagcttcatatctgctt

SEQ ID NO: 25124 - DNA, 4358 bp, Homo sapiens
  source 1..4358: mol_type = unassigned DNA
agagtgggcaggccgggggtgagggctcgcgctccgggagctgcacggggctgcgtggaaagagcgccgagcggtggcgtcgttgtcgccccctcctcgtcgggaagaatcgtttggtctcctgccgtgcccggttcgtattccctactccctgccacgagccgccccgtccgggatcctccacccgtccaaagttgtgagggggcgccgggcgtgctcgcggatcggcggccgcgggcgtgcggagggctggacgagccctggagcgccaggagaatgtgtgtgtgtcccgggcccagacgaattggaatcccagtcagaagttccagcctgccactgttctctgatgccatgccagcaccaactcaactgttttttcctctcatccgtaactgtgaactgagcaggatctatggcactgcatgttactgccaccacaaacatctctgttgttcctcatcgtacattcctcagagtcgactgagatacacacctcatccagcatatgctaccttttgcaggccaaaggagaactggtggcagtacacccaaggaaggagatatgcttccacaccacagaaattttacctcacacctccacaagtcaatagcatccttaaagctaatgaatacagtttcaaagtgccagaatttgacggcaaaaatgtcagttctatccttggatttgacagcaatcagctgcctgcaaatgcacccattgaggaccggagaagtgcagcaacctgcttgcagaccagagggatgcttttgggggtttttgatggccatgcaggttgtgcttgttcccaggcagtcagtgaaagactcttttattatattgctgtctctttgttaccccatgagactttgctagagattgaaaatgcagtggagagcggccgggcactgctacccattctccagtggcacaagcaccccaatgattactttagtaaggaggcatccaaattgtactttaacagcttgaggacttactggcaagagcttatagacctcaacactggtgagtcgactgatattgatgttaaggaggctctaattaatgccttcaagaggcttgataatgacatctccttggaggcgcaagttggtgatcctaattcttttctcaactacctggtgcttcgagtggcattttctggagccactgcttgtgtggcccatgtggatggtgttgaccttcatgtggccaatactggcgatagcagagccatgctgggtgtgcaggaagaggacggctcatggtcagcagtcacgctgtctaatgaccacaatgctcaaaatgaaagagaactagaacggctgaaattggaacatccaaagagtgaggccaagagtgtcgtgaaacaggatcggctgcttggcttgctgatgccatttagggcatttggagatgtaaagttcaaatggagcattgaccttcaaaagagagtgatagaatctggcccagaccagttgaatgacaatgaatataccaagtttattcctcctaattatcacacacctccttatctcactgctgagccagaggtaacttaccaccgattaaggccacaggataagtttctggtgttggctactgatgggttgtgggagactatgcataggcaggatgtggttaggattgtgggtgagtacctaactggcatgcatcaccaacagccaatagctgttggtggctacaaggtgactctgggacagatgcatggccttttaacagaaaggagaaccaaaatgtcctcggtatttgaggatcagaacgcagcaacccatctcattcgccacgctgtgggcaacaacgagtttgggactgttgatcatgagcgcctctctaaaatgcttagtcttcctgaagagcttgctcgaatgtacagagatgacattacaatcattgtagttcagttcaattctcatgttgtaggggcgtatcaaaaccaagaatagtgagtggctctttcactggcaattctcaaatgatatacatttaaagggcagattttttaaaaagatactactataataaacatttccagttggtcattctaagcatttacccttttgatactctagctagtcaggtactccaaattgactttgcagcagggtggcagggtcaggagagtctggtcctgcctagctcagatttcatggcacctgcacttgaagcaagtcacttctttatcacaggtgtcttgaaacattagcttcttttaccaacctgagaaaattaggatgacctggcaaataagatcttgaataggccaaaagcaagtatcttgctgtgtgtagtctcttggttaaagtgaagaaacagtactgttcacacctttcttcactgagattccagtgtacatgagaacatatatttattgcatgattttctagatacacagtctatgcattattcatatacatttattttagcctaaagtggttttcaaatccagttcttcaagccataaatgaccaagatccaagcaatctgaatttgtttttgtgattatttgactggaatgcttcttaagtggaataactatactccgttatccacccgatttcctaatgtaattgaaagattttctattttgccacacacttggagacaataagggtttttagttttatctactcttctattgaagttaaagaaagaaaaaaagatttttttatttgtattaatgaaaagctttagtttaaaataaggagatccagaataaaaagaagagactgatctcttcaattattgtcatctgtagccaccagcacatcactcttatgtaatccccaaaggcttggcatgccgtaagtgtgtggtgggtagactgctgccggggaatcgtacttcttatttagtaatgataagacttttcattatttttggaattttaaagatgacataaataagtttaaatatcaatttggggagtaaggtttaatattgccatcgggtattgagacaggaggaagtttctgtttttctccatttagacataggtcaattaaaatatttgggtttaaaatgactaaatgctttaaacatattgtagcttaagatatatgtgttaagatatatacatgagaaactttaaaaggtaactactgtgcatgcctgatgcttaatagaatacttagtggcatcaaatgtttgcagcagtctccataattatattcagtcccttctaatactgtatcaatgtaaatgaaataaatatattcaaattggctttttgatatgcatcaagtggcattttgttcctgtgtttaatagtgatctgtatacagctgtgcacatattgtcatcacttattctagcatcactgttaaggctgtgattatgtttgatattcacctggattttaatacaagccaatatcagcttcccattgtgtaataacttgggtgtttaggagtcttttcacattttttggggatatgaactagatgttcaagaactccttctggactgtggatactgaatcagtgtactattggctgcagaatttgtttcaattgaaaatagactcaggaagattgctgctcagaatatcatataatgtttattttttgaggtgtttttgtttttatttgtgtgtttttttttttttaagtcagcttggaacttttttcctgggtagtatttgggagagggaaaggctgtactatatatttatttctaaatgttttgactgggcatttttcttttaatgaaatatgtggactgctctagcaaaccctattttcagctactatttgaatattcttgaacaccaccactgaagagtttcatatacaccaaataatgtctcatctctatagtacagggaatataaaattggtttcctgtggtcatgatcaagatagtagtattattacacaagaaacttggtctgcagtctggaagcttgtctgctctatagaaatgaaaatgcagcatgaagttgacattgtggaaatgaaagtaattgggtattagaaatctgaaagtactgtcatctaaaagcaattgtgattttattgtaattggttgtcactgttgtacggtgtctagaattaaagaatacatgtaaactttcatggtatttagcctttcttaaatttttttaaaatttaaactttctaacctatgtattcaacttctgtatttatatttaatcagtggttcatgttatataatacacccttaactagttaaatggaatgttggtatggtacagagtaccatattgctaagaaaactgtcttataaaagatgtatatgtgtgaagacatgaaagtttaatgtacagaatggttggagaaatgcctatggtgaattaaagcttcatatctgctttctg

SEQ ID NO: 25125 - DNA, 2140 bp, Homo sapiens
  source 1..2140: mol_type = unassigned DNA
attcaccgggctggagcgagacctcgcccctcctccgctcccgcctccccgccgccgcctcctctaatgagcatctctgccttgctttcaatgggccggtgctgctgtcgctgctgctgcccgcgcgggttgtggatgttgtcggctccgtgttgtgatgacaggagaatgtgtgtgtgtcccgggcccagacgaattggaatcccagtcagaagttccagcctgccactgttctctgatgccatgccagcaccaactcaactgttttttcctctcatccgtaactgtgaactgagcaggatctatggcactgcatgttactgccaccacaaacatctctgttgttcctcatcgtacattcctcagagtcgactgagatacacacctcatccagcatatgctaccttttgcaggccaaaggagaactggtggcagtacacccaaggaaggagatatgcttccacaccacagaaattttacctcacacctccacaagtcaatagcatccttaaagctaatgaatacagtttcaaagtgccagaatttgacggcaaaaatgtcagttctatccttggatttgacagcaatcagctgcctgcaaatgcacccattgaggaccggagaagtgcagcaacctgcttgcagaccagagggatgcttttgggggtttttgatggccatgcaggttgtgcttgttcccaggcagtcagtgaaagactcttttattatattgctgtctctttgttaccccatgagactttgctagagattgaaaatgcagtggagagcggccgggcactgctacccattctccagtggcacaagcaccccaatgattactttagtaaggaggcatccaaattgtactttaacagcttgaggacttactggcaagagcttatagacctcaacactggtgagtcgactgatattgatgttaaggaggctctaattaatgccttcaagaggcttgataatgacatctccttggaggcgcaagttggtgatcctaattcttttctcaactacctggtgcttcgagtggcattttctggagccactgcttgtgtggcccatgtggatggtgttgaccttcatgtggccaatactggcgatagcagagccatgctgggtgtgcaggaagaggacggctcatggtcagcagtcacgctgtctaatgaccacaatgctcaaaatgaaagagaactagaacggctgaaattggaacatccaaagagtgaggccaagagtgtcgtgaaacaggatcggctgcttggcttgctgatgccatttagggcatttggagatgtaaagttcaaatggagcattgaccttcaaaagagagtgatagaatctggcccagaccagttgaatgacaatgaatataccaagtttattcctcctaattatcacacacctccttatctcactgctgagccagaggtaacttaccaccgattaaggccacaggataagtttctggtgttggctactgatgggttgtgggagactatgcataggcaggatgtggttaggattgtgggtgagtacctaactggcatgcatcaccaacagccaatagctgttggtggctacaaggtgactctgggacagatgcatggccttttaacagaaaggagaaccaaaatgtcctcggtatttgaggatcagaacgcagcaacccatctcattcgccacgctgtgggcaacaacgagtttgggactgttgatcatgagcgcctctctaaaatgcttagtcttcctgaagagcttgctcgaatgtacagagatgacattacaatcattgtagttcagttcaattctcatgttgtaggggcgtatcaaaaccaagaatagtgagtggctctttcactggcaattctcaaatgatatacatttaaagggcagattttttaaaaagatactactataataaacatttccagttggtcattctaagcatttacccttttgatactctagctagtcaggtactccaaattgactttgcagcagggtggcagggtcaggagagtctggtcctgcctagctcagatttcatggcacctgcacttgaagcaagtcacttctttatcacaggtgtcttgaaacattagcttcttttaccaacctgagaaaa

SEQ ID NO: 25126 - DNA, 581 bp, Homo sapiens
  source 1..581: mol_type = unassigned DNA
agagtgggcaggccgggggtgagggctcgcgctccgggagctgcacggggctgcgtggaaagagcgccgagcggtggcgtcgttgtcgccccctcctcgtcgggaagaatcgtttggtctcctgccgtgcccggttcgtattccctactccctgccacgagccgccccgtccgggatcctccacccgtccaaagttgtgagggggcgccgggcgtgctcgcggatcggcggccgcgggcgtgcggagggctggacgagccctggagcgccaggagaatgtgtgtgtgtcccgggcccagacgaattggaatcccagtcagaagttccagcctgccactgttctctgatgccatgccagcaccaactcaactgttttttcctctcatccgtaactgtgaactgagcaggatctatggcactgcatgttactgccaccacaaacatctctgttgttcctcatcgtacattcctcagagtcgactgagatacacacctcatccagcatatgctaccttttgcaggccaaaggagaactggtggcagtacacccaaggaaggagatatgcttccacaccacagaa

SEQ ID NO: 25127 - DNA, 596 bp, Homo sapiens
  source 1..596: mol_type = unassigned DNA
aagaatcgtttggtctcctgccgtgcccggttcgtattccctactccctgccacgagccgccccgtccgggatcctccacccgtccaaagttgtgagggggcgccgggcgtgctcgcggatcggcggccgcgggcgtgcggagggctggacgagccctggagcgccaggaatcccagtcagaagttccagcctgccactgttctctgatgccatgccagcaccaactcaactgttttttcctctcatccgtaactgtgaactgagcaggatctatggcactgcatgttactgccaccacaaacatctctgttgttcctcatcgtacattcctcagagtcgactgagatacacacctcatccagcatatgctaccttttgcaggccaaaggagaactggtggcagtacacccaaggaaggagatatgcttccacaccacagaaattttacctcacacctccacaagtcaatagcatccttaaagctaatgaatacagtttcaaagtgccagaatttgacggcaaaaatgtcagttctatccttggatttgacagcaatcagctgcctgcaaatgcacccattgaggaccggagaagt

SEQ ID NO: 25128 - DNA, 1284 bp, Homo sapiens
  source 1..1284: mol_type = unassigned DNA
atagaacgctcattaattacagcacagttttcataaattccaacttccctaggaattttgtcttttgaaggcatgttggaagttggggcattaggatataatctcagtccatgtactaagcctctgcataactgaaagatagagtcaataaaattcactctctcattttttgtttttaatctcaagaatttttgccttgaaggaaaaatgtagtggagaatttgatgtttgaacgttagaagagtgagactcaaagatgtgagctgacttttccaagattatttgggagttggtggcagacctatgcccgttagcctggcaaattgccacagtggactagagaagcaagttttgcaagaccatctactgggctttccccagccaaatctgttgtacattctgcacagtttgtactgcacaaaggacgacaaagaaaagagaaaattgaagtttgagtataggagccaggagttcagtcgtggttccacgaatgattgggagttgtgcctgccagaatataccctgtagaaatagtacatgatgaatcccagtcagaagttccagcctgccactgttctctgatgccatgccagcaccaactcaactgttttttcctctcatccgtaactgtgaactgagcaggatctatggcactgcatgttactgccaccacaaacatctctgttgttcctcatcgtacattcctcagagtcgactgagatacacacctcatccagcatatgctaccttttgcaggccaaaggagaactggtggcagtacacccaaggaaggagatatgcttccacaccacagaaattttacctcacacctccacaagtcaatagcatccttaaagctaatgaatacagtttcaaagtgccagaatttgacggcaaaaatgtcagttctatccttggatttgacagcaatcagctgcctgcaaatgcacccattgaggaccggagaagtgcagcaacctgcttgcagaccagagggatgcttttgggggtttttgatggccatgcaggttgtgcttgttcccaggcagtcagtgaaagactcttttattatattgctgtctctttgttaccccatgagactttgctagagattgaaaatgcagtggagagcggccgggcactgctacccattctccagtggcacaagcaccccaatgattactttagtaaggaggcatccaaattgtactttaacagcttgaggacttactggcaagagcttatagacctcaacactggtgagtcgactgatattgatgttaa

SEQ ID NO: 25129 - DNA, 341 bp, Homo sapiens
  source 1..341: mol_type = unassigned DNA
ctcgtcactgcgcagccaatcggcaggcgggaagcactccggcccgaacgtgcgggcggggcagggtggcggccccgcacggaatcccagtcagaagttccagcctgccactgttctctgatgccatgccagcaccaactcaactgttttttcctctcatccgtaactgtgaactgagcaggatctatggcactgcatgttactgccaccacaaacatctctgttgttcctcatcgtacattcctcagagtcgactgagatacacacctcatccagcatatgctaccttttgcaggccaaaggagaactggtggcagtacacccaaggaaggagatatgct

SEQ ID NO: 25130 - DNA, 2554 bp, Homo sapiens
  source 1..2554: mol_type = unassigned DNA
acggtaggggagcagagtgggcaggccgggggtgagggctcgcgctccgggagctgcacggggctgcgtggaaagagcgccgagcggtggcgtcgttgtcgccccctcctcgtcgggaagaatcgtttggtctcctgccgtgcccggagaatgtgtgtgtgtcccgggcccagacgaattggaatcccagtcagaagttccagcctgccactgttctctgatgccatgccagcaccaactcaactgttttttcctctcatccgtaactgtgaactgagcaggatctatggcactgcatgttactgccaccacaaacatctctgttgttcctcatcgtacattcctcagagtcgactgagatacacacctcatccagcatatgctaccttttgcaggccaaaggagaactggtggcagtacacccaaggaaggagatatgcttccacaccacagaaattttacctcacacctccacaagtcaatagcatccttaaagctaatgaatacagtttcaaagtgccagaatttgacggcaaaaatgtcagttctatccttggatttgacagcaatcagctgcctgcaaatgcacccattgaggaccggagaagtgcagcaacctgcttgcagaccagagggatgcttttgggggtttttgatggccatgcaggttgtgcttgttcccaggcagtcagtgaaagactcttttattatattgctgtctctttgttaccccatgagactttgctagagattgaaaatgcagtggagagcggccgggcactgctacccattctccagtggcacaagcaccccaatgattactttagtaaggaggcatccaaattgtactttaacagcttgaggacttactggcaagagcttatagacctcaacactggtgagtcgactgatattgatgttaaggaggctctaattaatgccttcaagaggcttgataatgacatctccttggaggcgcaagttggtgatcctaattcttttctcaactacctggtgcttcgagtggcattttctggagccactgcttgtgtggcccatgtggatggtgttgaccttcatgtggccaatactggcgatagcagagccatgctgggtgtgcaggaagaggacggctcatggtcagcagtcacgctgtctaatgaccacaatgctcaaaatgaaagagaactagaacggctgaaattggaacatccaaagagtgaggccaagagtgtcgtgaaacaggatcggctgcttggcttgctgatgccatttagggcatttggagatgtaaagttcaaatggagcattgaccttcaaaagagagtgatagaatctggcccagaccagttgaatgacaatgaatataccaagtttattcctcctaattatcacacacctccttatctcactgctgagccagaggtaacttaccaccgattaaggccacaggataagtttctggtgttggctactgatgggttgtgggagactatgcataggcaggatgtggttaggattgtgggtgagtacctaactggcatgcatcaccaacagccaatagctgttggtggctacaaggtgactctgggacagatgcatggccttttaacagaaaggagaaccaaaatgtcctcggtatttgaggatcagaacgcagcaacccatctcattcgccacgctgtgggcaacaacgagtttgggactgttgatcatgagcgcctctctaaaatgcttagtcttcctgaagagcttgctcgaatgtacagagatgacattacaatcattgtagttcagttcaattctcatgttgtaggggcgtatcaaaaccaagaatagtgagtggctctttcactggcaattctcaaatgatatacatttaaagggcagattttttaaaaagatactactataataaacatttccagttggtcattctaagcatttacccttttgatactctagctagtcaggtactccaaattgactttgcagcagggtggcagggtcaggagagtctggtcctgcctagctcagatttcatggcacctgcacttgaagcaagtcacttctttatcacaggtgtcttgaaacattagcttcttttaccaacctgagaaaattaggatgacctggcaaataagatcttgaataggccaaaagcaagtatcttgctgtgtgtagtctcttggttaaagtgaagaaacagtactgttcacacctttcttcactgagattccagtgtacatgagaacatatatttattgcatgattttctagatacacagtctatgcattattcatatacatttattttagcctaaagtggttttcaaatccagttcttcaagccataaatgaccaagatccaagcaatctgaatttgtttttgtgattatttgactggaatgcttcttaagtggaataactatactccgttatccacccgatttcctaatgtaattgaaagattttctattttgccacacacttggagacaataagggtttttagttttatctactcttctattgaagttaaagaaagaaaaaaa

SEQ ID NO: 25131 - DNA, 544 bp, Homo sapiens
  source 1..544: mol_type = unassigned DNA
aacatttgagcacatcttctggctcagtcatgtacacttaacctctggatgactttcaggaatcccagtcagaagttccagcctgccactgttctctgatgccatgccagcaccaactcaactgttttttcctctcatccgtaactgtgaactgagcaggatctatggcactgcatgttactgccaccacaaacatctctgttgttcctcatcgtacattcctcagagtcgactgagatacacacctcatccagcatatgctaccttttgcaggccaaaggagaactggtggcagtacacccaaggaaggagatatgcttccacaccacagaaattttacctcacacctccacaagtcaatagcatccttaaagctaatgaatacagtttcaaagtgccagaatttgacggcaaaaatgtcagttctatccttggatttgacagcaatcagctgcctgcaaatgcacccattgaggaccggagaagtgcagcaacctgcttgcagaccagagggatgcttttgggggtttttgatggccatgca

SEQ ID NO: 25132 - DNA, 1692 bp, Homo sapiens
  source 1..1692: mol_type = unassigned DNA
gacaacccaacagtgtggagcagacccacagagagggagacccagagaggtgtgcagtggcatggaagcagcagcagctgccagctgctatggcagacaccttcctggaacacctctgcctactggacattgactccgagcccgtggctgctcgcagtaccagcatcattgccaccatcgggccagcatctcgctccgtggagcgcctcaaggagatgatcaaggccgggatgaacattgcgcgactcaacttctcccacggctcccacgagtaccatgctgagtccatcgccctggacaccaagggaccggagatccgcactgggatcctgcaggggggtccagagtcggaagtggagctggtgaagggctcccaggtgctggtgactgtggaccccgcgttccggacgcgggggaacgcgaacaccgtgtgggtggactaccccaatattgtccgggtcgtgccggtggggggccgcatctacattgacgacgggctcatctccctagtggtccagaaaatcggcccagagggactggtgacccaagtggagaacggcggcgtcctgggcagccggaagggcgtgaacttgccaggggcccaggtggacttgcccgggctgtccgagcaggacgtccgagacctgcgcttcggggtggagcatggggtggacatcgtctttgcctcctttgtgcggaaagccagcgacgtggctgccgtcagggctgctctgggtccggaaggacacggcatcaagatcatcagcaaaattgagaaccacgaaggcgtgaagaggtttgatgaaatcctggaggtgagcgacggcatcatggtggcacggggggacctaggcatcgagatcccagcagagaaggttttcctggctcagaagatgatgattgggcgctgcaacttggcgggcaagcctgttgtctgtgccacacagatgctggagagcatgattaccaagccccggccaacgagggcagagacaagcgatgtcgccaatgctgtgctggatggggctgactgcatcatgctgtcaggggagactgccaagggcaacttccctgtggaagcggtgaagatgcagcatgcgattgcccgggaggcagaggccgcagtgtaccaccggcagctgtttgaggagctacgtcgggcagcgccactaagccgtgatcccactgaggtcaccgccattggtgctgtggaggctgccttcaagtgctgtgctgctgccatcattgtgctgaccacaactggccgctcagcccagcttctgtctcggtaccgacctcgggcagcagtcattgctgtcacccgctctgcccaggctgcccgccaggtccacttatgccgaggagtcttccccttgctttaccgtgaacctccagaagccatctgggcagatgatgtagatcgccgggtgcaatttggcattgaaagtggaaagctccgtggcttcctccgtgttggagacctggtgattgtggtgacaggctggcgacctggctccggctacaccaacatcatgcgggtgctaagcatatcctgagacgcccctccctcctctggcccagcctacccttgtaccccatcccttcctccccagtctacgttctccagcccacacccctccaaagccccacctttaagtcctctcttctctattcctgaccctccctacctga

SEQ ID NO: 25133 - DNA, 2083 bp, Homo sapiens
  source 1..2083: mol_type = unassigned DNA
cattccatggtcccgcagccccaggcccacactgaaagcatgtcgatccaggagaacatatcatccctgcagcttcggtcatgggtctctaagtcccaaagagacttagcaaagtccatcctgattggggctccaggagggccagcggggtatctgcggcgggccagtgtggcccaactgacccaggagctgggcactgccttcttccagcagcagcagctgccagctgctatggcagacaccttcctggaacacctctgcctactggacattgactccgagcccgtggctgctcgcagtaccagcatcattgccaccatcgggccagcatctcgctccgtggagcgcctcaaggagatgatcaaggccgggatgaacattgcgcgactcaacttctcccacggctcccacgagtaccatgctgagtccatcgccaacgtccgggaggcggtggagagctttgcaggttccccactcagctaccggcccgtggccatcgccctggacaccaagggaccggagatccgcactgggatcctgcaggggggtccagagtcggaagtggagctggtgaagggctcccaggtgctggtgactgtggaccccgcgttccggacgcgggggaacgcgaacaccgtgtgggtggactaccccaatattgtccgggtcgtgccggtggggggccgcatctacattgacgacgggctcatctccctagtggtccagaaaatcggcccagagggactggtgacccaagtggagaacggcggcgtcctgggcagccggaagggcgtgaacttgccaggggcccaggtggacttgcccgggctgtccgagcaggacgtccgagacctgcgcttcggggtggagcatggggtggacatcgtctttgcctcctttgtgcggaaagccagcgacgtggctgccgtcagggctgctctgggtccggaaggacacggcatcaagatcatcagcaaaattgagaaccacgaaggcgtgaagaggtttgatgaaatcctggaggtgagcgacggcatcatggtggcacggggggacctaggcatcgagatcccagcagagaaggttttcctggctcagaagatgatgattgggcgctgcaacttggcgggcaagcctgttgtctgtgccacacagatgctggagagcatgattaccaagccccggccaacgagggcagagacaagcgatgtcgccaatgctgtgctggatggggctgactgcatcatgctgtcaggggagactgccaagggcaacttccctgtggaagcggtgaagatgcagcatgcgattgcccgggaggcagaggccgcagtgtaccaccggcagctgtttgaggagctacgtcgggcagcgccactaagccgtgatcccactgaggtcaccgccattggtgctgtggaggctgccttcaagtgctgtgctgctgccatcattgtgctgaccacaactggccgctcagcccagcttctgtctcggtaccgacctcgggcagcagtcattgctgtcacccgctctgcccaggctgcccgccaggtccacttatgccgaggagtcttccccttgctttaccgtgaacctccagaagccatctgggcagatgatgtagatcgccgggtgcaatttggcattgaaagtggaaagctccgtggcttcctccgtgttggagacctggtgattgtggtgacaggctggcgacctggctccggctacaccaacatcatgcgggtgctaagcatatcctgagacgcccctccctcctctggcccagcctacccttgtaccccatcccttcctccccagtctacgttctccagcccacacccctccaaagccccacctttaagtcctctcttctctattcctgaccctccctacctgaggcctatctgagactataactgtcatctagccccttcgaggttgccccttccccatctccatttcacacaggtcctgaaagtctgtgtccaattatgcactggccacccaacagcaccaattgtacattccctgcatccaatctgctcagcaggccctaagatgccttgagtctttaatccca

SEQ ID NO: 25134 - DNA, 2479 bp, Homo sapiens
  source 1..2479: mol_type = unassigned DNA
actttaaccagtctgcagaactgatccccagcccagctgggcctcatgcctctgacaacccaacagtgtggagcagacccacagagagggagacccagagaggtgtgcagtggcatggaagggccagcggggtatctgcggcgggccagtgtggcccaactgacccaggagctgggcactgccttcttccagcagcagcagctgccagctgctatggcagacaccttcctggaacacctctgcctactggacattgactccgagcccgtggctgctcgcagtaccagcatcattgccaccatcgggccagcatctcgctccgtggagcgcctcaaggagatgatcaaggccgggatgaacattgcgcgactcaacttctcccacggctcccacgagtaccatgctgagtccatcgccaacgtccgggaggcggtggagagctttgcaggttccccactcagctaccggcccgtggccatcgccctggacaccaagggaccggagatccgcactgggatcctgcaggggggtccagagtcggaagtggagctggtgaagggctcccaggtgctggtgactgtggaccccgcgttccggacgcgggggaacgcgaacaccgtgtgggtggactaccccaatattgtccgggtcgtgccggtggggggccgcatctacattgacgacgggctcatctccctagtggtccagaaaatcggcccagagggactggtgacccaagtggagaacggcggcgtcctgggcagccggaagggcgtgaacttgccaggggcccaggtggacttgcccgggctgtccgagcaggacgtccgagacctgcgcttcggggtggagcatggggtggacatcgtctttgcctcctttgtgcggaaagccagcgacgtggctgccgtcagggctgctctgggtccggaaggacacggcatcaagatcatcagcaaaattgagaaccacgaaggcgtgaagaggtttgatgaaatcctggaggtgagcgacggcatcatggtggcacggggggacctaggcatcgagatcccagcagagaaggttttcctggctcagaagatgatgattgggcgctgcaacttggcgggcaagcctgttgtctgtgccacacagatgctggagagcatgattaccaagccccggccaacgagggcagagacaagcgatgtcgccaatgctgtgctggatggggctgactgcatcatgctgtcaggggagactgccaagggcaacttccctgtggaagcggtgaagatgcagcatgcgattgcccgggaggcagaggccgcagtgtaccaccggcagctgtttgaggagctacgtcgggcagcgccactaagccgtgatcccactgaggtcaccgccattggtgctgtggaggctgccttcaagtgctgtgctgctgccatcattgtgctgaccacaactggccgctcagcccagcttctgtctcggtaccgacctcgggcagcagtcattgctgtcacccgctctgcccaggctgcccgccaggtccacttatgccgaggagtcttccccttgctttaccgtgaacctccagaagccatctgggcagatgatgtagatcgccgggtgcaatttggcattgaaagtggaaagctccgtggcttcctccgtgttggagacctggtgattgtggtgacaggctggcgacctggctccggctacaccaacatcatgcgggtgctaagcatatcctgagacgcccctccctcctctggcccagcctacccttgtaccccatcccttcctccccagtctacgttctccagcccacacccctccaaagccccacctttaagtcctctcttctctattcctgaccctccctacctgaggcctatctgagactataactgtcatctagccccttcgaggttgccccttccccatctccatttcacacaggtcctgaaagtctgtgtccaattatgcactggccacccaacagcaccaattgtacattccctgcatccaatctgctcagcaggccctaagatgccttgagtctttaatcccagtttggctggttaattccataaccccaggcatcccatcccttggggtgggggagaggggagacagggcaatcttgtccacagtctcccattctcatatgtagccctcatgataatctgggcatctcgtgccagggcaggctaccccttcatggtgactaacagttacatgaaagtccacgcttttgggaaaactgggtgggatggatgctggggagaagtgagggctgggcagctgattttgtcactgtcttcacaacctccgtgctgggcttgtagaccactgtcctggctgctctcatgcctgcctgataccctgcttggtcaaatccccggctgcttccttctgcacccagaaattccttcccactcatgttgttcccacacacaaaccaagagccaaaaatgagtgtgtc

SEQ ID NO: 25135 - DNA, 3116 bp, Homo sapiens
  source 1..3116: mol_type = unassigned DNA
cattccatggtcccgcagccccaggcccacactgaaagcatgtcgatccaggagaacatatcatccctgcagcttcggtcatgggtctctaagtcccaaagagacttagcaaagtccatcctgattggggctccaggagtgcctctgacaacccaacagtgtggagcagacccacagagagggagacccagagaggtgtgcagtggcatggaagggccagcggggtatctgcggcgggccagtgtggcccaactgacccaggagctgggcactgccttcttccagcagcagcagctgccagctgctatggcagacaccttcctggaacacctctgcctactggacattgactccgagcccgtggctgctcgcagtaccagcatcattgccaccatcgggccagcatctcgctccgtggagcgcctcaaggagatgatcaaggccgggatgaacattgcgcgactcaacttctcccacggctcccacgagtaccatgctgagtccatcgccaacgtccgggaggcggtggagagctttgcaggttccccactcagctaccggcccgtggccatcgccctggacaccaagggaccggagatccgcactgggatcctgcaggggggtccagagtcggaagtggagctggtgaagggctcccaggtgctggtgactgtggaccccgcgttccggacgcgggggaacgcgaacaccgtgtgggtggactaccccaatattgtccgggtcgtgccggtggggggccgcatctacattgacgacgggctcatctccctagtggtccagaaaatcggcccagagggactggtgacccaagtggagaacggcggcgtcctgggcagccggaagggcgtgaacttgccaggggcccaggtggacttgcccgggctgtccgagcaggacgtccgagacctgcgcttcggggtggagcatggggtggacatcgtctttgcctcctttgtgcggaaagccagcgacgtggctgccgtcagggctgctctgggtccggaaggacacggcatcaagatcatcagcaaaattgagaaccacgaaggcgtgaagaggtttgatgaaatcctggaggtgagcgacggcatcatggtggcacggggggacctaggcatcgagatcccagcagagaaggttttcctggctcagaagatgatgattgggcgctgcaacttggcgggcaagcctgttgtctgtgccacacagatgctggagagcatgattaccaagccccggccaacgagggcagagacaagcgatgtcgccaatgctgtgctggatggggctgactgcatcatgctgtcaggggagactgccaagggcaacttccctgtggaagcggtgaagatgcagcatgcgattgcccgggaggcagaggccgcagtgtaccaccggcagctgtttgaggagctacgtcgggcagcgccactaagccgtgatcccactgaggtcaccgccattggtgctgtggaggctgccttcaagtgctgtgctgctgccatcattgtgctgaccacaactggccgctcagcccagcttctgtctcggtaccgacctcgggcagcagtcattgctgtcacccgctctgcccaggctgcccgccaggtccacttatgccgaggagtcttccccttgctttaccgtgaacctccagaagccatctgggcagatgatgtagatcgccgggtgcaatttggcattgaaagtggaaagctccgtggcttcctccgtgttggagacctggtgattgtggtgacaggctggcgacctggctccggctacaccaacatcatgcgggtgctaagcatatcctgagacgcccctccctcctctggcccagcctacccttgtaccccatcccttcctccccagtctacgttctccagcccacacccctccaaagccccacctttaagtcctctcttctctattcctgaccctccctacctgaggcctatctgagactataactgtcatctagccccttcgaggttgccccttccccatctccatttcacacaggtcctgaaagtctgtgtccaattatgcactggccacccaacagcaccaattgtacattccctgcatccaatctgctcagcaggccctaagatgccttgagtctttaatcccagtttggctggttaattccataaccccaggcatcccatcccttggggtgggggagaggggagacagggcaatcttgtccacagtctcccattctcatatgtagccctcatgataatctgggcatctcgtgccagggcaggctaccccttcatggtgactaacagttacatgaaagtccacgcttttgggaaaactgggtgggatggatgctggggagaagtgagggctgggcagctgattttgtcactgtcttcacaacctccgtgctgggcttgtagaccactgtcctggctgctctcatgcctgcctgataccctgcttggtcaaatccccggctgcttccttctgcacccagaaattccttcccactcatgttgttcccacacacaaaccaagagccaaaaatgagtgtgtctattttatatttaaacccagctgtttggaagcaattataaaacttctcccacacaccaagaaccccagaactccccacccagaaggaaaggagacttagggtcctggtcccacagtctttaatgctgtagagtaggagaggggacaggcagagtgagggtggtaaaggactactcttgtccctgagaaggcagaggtgctggctggcctgcccttccccaggcttggataccttgggcctttcccttattcctgcaccaacagcaaactcagaaggaaaaaacaaaacaaaactctaaaggtaaacgcggtccttctccctctctcatgtggctcctcctgcccctacctgggagaaggttcaagtattgcgctgatgggtttgggcaaggaccacagaggctggcatggagaggccctgcctcctcctactcctcctgtctccttacctgaaaaggaggggagggatggataaaggaatgggtaaacaaaattaattggtaacacataaagttagtaaatgaataaatacaattaaataaatg

SEQ ID NO: 25136 - DNA, 2674 bp, Homo sapiens
  source 1..2674: mol_type = unassigned DNA
cgccgcgcttcctcctgaaggtgactgcgcccgcggggacgcagggggcggggcccgggtcgcccggagccgggattgggcagagggcggggcggcggagggattgcggcggcccgcagcgggataaccttgaggctgaggcagtggctccttgcacagcagctgcacgcgccgtggctccggatctcttcgtctttgcagcgtagcccgagtcggtcagcgccggaggtgagcggtgcaggaggctacgccatcagtccccaccaagggccagtcgcccggctagtgcggaatcccggcgcgccggccggccccgggcacgcaggcagggcggcgcaggatccagggcgtctgggatgcagtggagctcagagagaggagaacggctcctcacgcctggggcctgctcttcagaagtccccagcgccgttccttccagatcaggacctcagcagccatgtcgaagccccatagtgaagccgggactgccttcattcagacccagcagctgcacgcagccatggctgacacattcctggagcacatgtgccgcctggacattgattcaccacccatcacagcccggaacactggcatcatctgtaccattggcccagcttcccgatcagtggagacgttgaaggagatgattaagtctggaatgaatgtggctcgtctgaacttctctcatggaactcatgagtaccatgcggagaccatcaagaatgtgcgcacagccacggaaagctttgcttctgaccccatcctctaccggcccgttgctgtggctctagacactaaaggacctgagatccgaactgggctcatcaagggcagcggcactgcagaggtggagctgaagaagggagccactctcaaaatcacgctggataacgcctacatggaaaagtgtgacgagaacatcctgtggctggactacaagaacatctgcaaggtggtggaagtgggcagcaagatctacgtggatgatgggcttatttctctccaggtgaagcagaaaggtgccgacttcctggtgacggaggtggaaaatggtggctccttgggcagcaagaagggtgtgaaccttcctggggctgctgtggacttgcctgctgtgtcggagaaggacatccaggatctgaagtttggggtcgagcaggatgttgatatggtgtttgcgtcattcatccgcaaggcatctgatgtccatgaagttaggaaggtcctgggagagaagggaaagaacatcaagattatcagcaaaatcgagaatcatgagggggttcggaggtttgatgaaatcctggaggccagtgatgggatcatggtggctcgtggtgatctaggcattgagattcctgcagagaaggtcttccttgctcagaagatgatgattggacggtgcaaccgagctgggaagcctgtcatctgtgctactcagatgctggagagcatgatcaagaagccccgccccactcgggctgaaggcagtgatgtggccaatgcagtcctggatggagccgactgcatcatgctgtctggagaaacagccaaaggggactatcctctggaggctgtgcgcatgcagcacctgatagctcgtgaggctgaggcagccatgttccaccgcaagctgtttgaagaacttgtgcgagcctcaagtcactccacagacctcatggaagccatggccatgggcagcgtggaggcttcttataagtgtttagcagcagctttgatagttctgacggagtctggcaggtctgctcaccaggtggccagataccgcccacgtgcccccatcattgctgtgacccggaatccccagacagctcgtcaggcccacctgtaccgtggcatcttccctgtgctgtgcaaggacccagtccaggaggcctgggctgaggacgtggacctccgggtgaactttgccatgaatgttggcaaggcccgaggcttcttcaagaagggagatgtggtcattgtgctgaccggatggcgccctggctccggcttcaccaacaccatgcgtgttgttcctgtgccgtgatggaccccagagcccctcctccagcccctgtcccacccccttcccccagcccatccattaggccagcaacgcttgtagaactcactctgggctgtaacgtggcactggtaggttgggacaccagggaagaagatcaacgcctcactgaaacatggctgtgtttgcagcctgctctagtgggacagcccagagcctggctgcccatcatgtggccccacccaatcaagggaagaaggaggaatgctggactggaggcccctggagccagatggcaagagggtgacagcttcctttcctgtgtgtactctgtccagttcctttagaaaaaatggatgcccagaggactcccaaccctggcttggggtcaagaaacagccagcaagagttaggggccttagggcactgggctgttgttccattgaagccgactctggccctggcccttacttgcttctctagctctctaggcctctccagtttgcacctgtccccaccctccactcagctgtcctgcagcaaacactccaccctccaccttccattttcccccactactgcagcacctccaggcctgttgctatagagcctacctgtatgtcaataaacaacagctgaagcacc

SEQ ID NO: 25137 - DNA, 1863 bp, Homo sapiens
  source 1..1863: mol_type = unassigned DNA
gcccacttcgcagtccctagttctccctactgccgctccagtgccagagcccctccgaaggcggccaggacctccaaccacgcacaagtctgcagctctccccaactttccgttcagctcagtctccgagggacctcagcagccatgtcgaagccccatagtgaagccgggactgccttcattcagacccagcagctgcacgcagccatggctgacacattcctggagcacatgtgccgcctggacattgattcaccacccatcaagaagggtgtgaaccttcctggggctgctgtggacttgcctgctgtgtcggagaaggacatccaggatctgaagtttggggtcgagcaggatgttgatatggtgtttgcgtcattcatccgcaaggcatctgatgtccatgaagttaggaaggtcctgggagagaagggaaagaacatcaagattatcagcaaaatcgagaatcatgagggggttcggaggtttgatgaaatcctggaggccagtgatgggatcatggtggctcgtggtgatctaggcattgagattcctgcagagaaggtcttccttgctcagaagatgatgattggacggtgcaaccgagctgggaagcctgtcatctgtgctactcagatgctggagagcatgatcaagaagccccgccccactcgggctgaaggcagtgatgtggccaatgcagtcctggatggagccgactgcatcatgctgtctggagaaacagccaaaggggactatcctctggaggctgtgcgcatgcagcacctgatagctcgtgaggctgaggcagccatgttccaccgcaagctgtttgaagaacttgtgcgagcctcaagtcactccacagacctcatggaagccatggccatgggcagcgtggaggcttcttataagtgtttagcagcagctttgatagttctgacggagtctggcaggtctgctcaccaggtggccagataccgcccacgtgcccccatcattgctgtgacccggaatccccagacagctcgtcaggcccacctgtaccgtggcatcttccctgtgctgtgcaaggacccagtccaggaggcctgggctgaggacgtggacctccgggtgaactttgccatgaatgttggcaaggcccgaggcttcttcaagaagggagatgtggtcattgtgctgaccggatggcgccctggctccggcttcaccaacaccatgcgtgttgttcctgtgccgtgatggaccccagagcccctcctccagcccctgtcccacccccttcccccagcccatccattaggccagcaacgcttgtagaactcactctgggctgtaacgtggcactggtaggttgggacaccagggaagaagatcaacgcctcactgaaacatggctgtgtttgcagcctgctctagtgggacagcccagagcctggctgcccatcatgtggccccacccaatcaagggaagaaggaggaatgctggactggaggcccctggagccagatggcaagagggtgacagcttcctttcctgtgtgtactctgtccagttcctttagaaaaaatggatgcccagaggactcccaaccctggcttggggtcaagaaacagccagcaagagttaggggccttagggcactgggctgttgttccattgaagccgactctggccctggcccttacttgcttctctagctctctaggcctctccagtttgcacctgtccccaccctccactcagctgtcctgcagcaaacactccaccctccaccttccattttcccccactactgcagcacctccaggcctgttgctatagagcctacctgtatgtcaataaacaacagctgaagc

SEQ ID NO: 25138 - DNA, 2458 bp, Homo sapiens
  source 1..2458: mol_type = unassigned DNA
cgccgcgcttcctcctgaaggtgactgcgcccgcggggacgcagggggcggggcccgggtcgcccggagccgggattgggcagagggcggggcggcggagggattgcggcggcccgcagcgggataaccttgaggctgaggcagtggctccttgcacagcagctgcacgcgccgtggctccggatctcttcgtctttgcagcgtagcccgagtcggtcagcgccggaggacctcagcagccatgtcgaagccccatagtgaagccgggactgccttcattcagacccagcagctgcacgcagccatggctgacacattcctggagcacatgtgccgcctggacattgattcaccacccatcacagcccggaacactggcatcatctgtaccattggcccagcttcccgatcagtggagacgttgaaggagatgattaagtctggaatgaatgtggctcgtctgaacttctctcatggaactcatgagtaccatgcggagaccatcaagaatgtgcgcacagccacggaaagctttgcttctgaccccatcctctaccggcccgttgctgtggctctagacactaaaggacctgagatccgaactgggctcatcaagggcagcggcactgcagaggtggagctgaagaagggagccactctcaaaatcacgctggataacgcctacatggaaaagtgtgacgagaacatcctgtggctggactacaagaacatctgcaaggtggtggaagtgggcagcaagatctacgtggatgatgggcttatttctctccaggtgaagcagaaaggtgccgacttcctggtgacggaggtggaaaatggtggctccttgggcagcaagaagggtgtgaaccttcctggggctgctgtggacttgcctgctgtgtcggagaaggacatccaggatctgaagtttggggtcgagcaggatgttgatatggtgtttgcgtcattcatccgcaaggcatctgatgtccatgaagttaggaaggtcctgggagagaagggaaagaacatcaagattatcagcaaaatcgagaatcatgagggggttcggaggtttgatgaaatcctggaggccagtgatgggatcatggtggctcgtggtgatctaggcattgagattcctgcagagaaggtcttccttgctcagaagatgatgattggacggtgcaaccgagctgggaagcctgtcatctgtgctactcagatgctggagagcatgatcaagaagccccgccccactcgggctgaaggcagtgatgtggccaatgcagtcctggatggagccgactgcatcatgctgtctggagaaacagccaaaggggactatcctctggaggctgtgcgcatgcagcacctgattgcccgtgaggcagaggctgccatctaccacttgcaattatttgaggaactccgccgcctggcgcccattaccagcgaccccacagaagccaccgccgtgggtgccgtggaggcctccttcaagtgctgcagtggggccataatcgtcctcaccaagtctggcaggtctgctcaccaggtggccagataccgcccacgtgcccccatcattgctgtgacccggaatccccagacagctcgtcaggcccacctgtaccgtggcatcttccctgtgctgtgcaaggacccagtccaggaggcctgggctgaggacgtggacctccgggtgaactttgccatgaatgttggcaaggcccgaggcttcttcaagaagggagatgtggtcattgtgctgaccggatggcgccctggctccggcttcaccaacaccatgcgtgttgttcctgtgccgtgatggaccccagagcccctcctccagcccctgtcccacccccttcccccagcccatccattaggccagcaacgcttgtagaactcactctgggctgtaacgtggcactggtaggttgggacaccagggaagaagatcaacgcctcactgaaacatggctgtgtttgcagcctgctctagtgggacagcccagagcctggctgcccatcatgtggccccacccaatcaagggaagaaggaggaatgctggactggaggcccctggagccagatggcaagagggtgacagcttcctttcctgtgtgtactctgtccagttcctttagaaaaaatggatgcccagaggactcccaaccctggcttggggtcaagaaacagccagcaagagttaggggccttagggcactgggctgttgttccattgaagccgactctggccctggcccttacttgcttctctagctctctaggcctctccagtttgcacctgtccccaccctccactcagctgtcctgcagcaaacactccaccctccaccttccattttcccccactactgcagcacctccaggcctgttgctatagagcctacctgtatgtcaataaacaacagctgaagcacc

SEQ ID NO: 25139 - DNA, 2302 bp, Homo sapiens
  source 1..2302: mol_type = unassigned DNA
gcacagcagctgcacgcgccgtggctccggatctcttcgtctttgcagcgtagcccgagtcggtcagcgccggaggacctcagcagccatgtcgaagccccatagtgaagccgggactgccttcattcagacccagcagctgcacgcagccatggctgacacattcctggagcacatgtgccgcctggacattgattcaccacccatcacagcccggaacactggcatcatctgtaccattggcccagcttcccgatcagtggagacgttgaaggagatgattaagtctggaatgaatgtggctcgtctgaacttctctcatggaactcatgagtaccatgcggagaccatcaagaatgtgcgcacagccacggaaagctttgcttctgaccccatcctctaccggcccgttgctgtggctctagacactaaaggacctgagatccgaactgggctcatcaagggcagcggcactgcagaggtggagctgaagaagggagccactctcaaaatcacgctggataacgcctacatggaaaagtgtgacgagaacatcctgtggctggactacaagaacatctgcaaggtggtggaagtgggcagcaagatctacgtggatgatgggcttatttctctccaggtgaagcagaaaggtgccgacttcctggtgacggaggtggaaaatggtggctccttgggcagcaagaagggtgtgaaccttcctggggctgctgtggacttgcctgctgtgtcggagaaggacatccaggatctgaagtttggggtcgagcaggatgttgatatggtgtttgcgtcattcatccgcaaggcatctgatgtccatgaagttaggaaggtcctgggagagaagggaaagaacatcaagattatcagcaaaatcgagaatcatgagggggttcggaggtttgatgaaatcctggaggccagtgatgggatcatggtggctcgtggtgatctaggcattgagattcctgcagagaaggtcttccttgctcagaagatgatgattggacggtgcaaccgagctgggaagcctgtcatctgtgctactcagatgctggagagcatgatcaagaagccccgccccactcgggctgaaggcagtgatgtggccaatgcagtcctggatggagccgactgcatcatgctgtctggagaaacagccaaaggggactatcctctggaggctgtgcgcatgcagcacctgatagctcgtgaggctgaggcagccatgttccaccgcaagctgtttgaagaacttgtgcgagcctcaagtcactccacagacctcatggaagccatggccatgggcagcgtggaggcttcttataagtgtttagcagcagctttgatagttctgacggagtctggcaggtctgctcaccaggtggccagataccgcccacgtgcccccatcattgctgtgacccggaatccccagacagctcgtcaggcccacctgtaccgtggcatcttccctgtgctgtgcaaggacccagtccaggaggcctgggctgaggacgtggacctccgggtgaactttgccatgaatgttggcaaggcccgaggcttcttcaagaagggagatgtggtcattgtgctgaccggatggcgccctggctccggcttcaccaacaccatgcgtgttgttcctgtgccgtgatggaccccagagcccctcctccagcccctgtcccacccccttcccccagcccatccattaggccagcaacgcttgtagaactcactctgggctgtaacgtggcactggtaggttgggacaccagggaagaagatcaacgcctcactgaaacatggctgtgtttgcagcctgctctagtgggacagcccagagcctggctgcccatcatgtggccccacccaatcaagggaagaaggaggaatgctggactggaggcccctggagccagatggcaagagggtgacagcttcctttcctgtgtgtactctgtccagttcctttagaaaaaatggatgcccagaggactcccaaccctggcttggggtcaagaaacagccagcaagagttaggggccttagggcactgggctgttgttccattgaagccgactctggccctggcccttacttgcttctctagctctctaggcctctccagtttgcacctgtccccaccctccactcagctgtcctgcagcaaacactccaccctccaccttccattttcccccactactgcagcacctccaggcctgttgctatagagcctacctgtatgtcaataaacaacagctgaagc

SEQ ID NO: 25140 - DNA, 2083 bp, Homo sapiens
  source 1..2083: mol_type = unassigned DNA
gcacagcagctgcacgcgccgtggctccggatctcttcgtctttgcagcgtagcccgagtcggtcagcgccggaggacctcagcagccatgtcgaagccccatagtgaagccgggactgccttcattcagacccagcagctgcacgcagccatggctgacacattcctggagcacatgtgccgcctggacattgattcaccacccatcacagcccggaacactggcatcatctgtaccattggcccagcttcccgatcagaggtggagctgaagaagggagccactctcaaaatcacgctggataacgcctacatggaaaagtgtgacgagaacatcctgtggctggactacaagaacatctgcaaggtggtggaagtgggcagcaagatctacgtggatgatgggcttatttctctccaggtgaagcagaaaggtgccgacttcctggtgacggaggtggaaaatggtggctccttgggcagcaagaagggtgtgaaccttcctggggctgctgtggacttgcctgctgtgtcggagaaggacatccaggatctgaagtttggggtcgagcaggatgttgatatggtgtttgcgtcattcatccgcaaggcatctgatgtccatgaagttaggaaggtcctgggagagaagggaaagaacatcaagattatcagcaaaatcgagaatcatgagggggttcggaggtttgatgaaatcctggaggccagtgatgggatcatggtggctcgtggtgatctaggcattgagattcctgcagagaaggtcttccttgctcagaagatgatgattggacggtgcaaccgagctgggaagcctgtcatctgtgctactcagatgctggagagcatgatcaagaagccccgccccactcgggctgaaggcagtgatgtggccaatgcagtcctggatggagccgactgcatcatgctgtctggagaaacagccaaaggggactatcctctggaggctgtgcgcatgcagcacctgattgcccgtgaggcagaggctgccatctaccacttgcaattatttgaggaactccgccgcctggcgcccattaccagcgaccccacagaagccaccgccgtgggtgccgtggaggcctccttcaagtgctgcagtggggccataatcgtcctcaccaagtctggcaggtctgctcaccaggtggccagataccgcccacgtgcccccatcattgctgtgacccggaatccccagacagctcgtcaggcccacctgtaccgtggcatcttccctgtgctgtgcaaggacccagtccaggaggcctgggctgaggacgtggacctccgggtgaactttgccatgaatgttggcaaggcccgaggcttcttcaagaagggagatgtggtcattgtgctgaccggatggcgccctggctccggcttcaccaacaccatgcgtgttgttcctgtgccgtgatggaccccagagcccctcctccagcccctgtcccacccccttcccccagcccatccattaggccagcaacgcttgtagaactcactctgggctgtaacgtggcactggtaggttgggacaccagggaagaagatcaacgcctcactgaaacatggctgtgtttgcagcctgctctagtgggacagcccagagcctggctgcccatcatgtggccccacccaatcaagggaagaaggaggaatgctggactggaggcccctggagccagatggcaagagggtgacagcttcctttcctgtgtgtactctgtccagttcctttagaaaaaatggatgcccagaggactcccaaccctggcttggggtcaagaaacagccagcaagagttaggggccttagggcactgggctgttgttccattgaagccgactctggccctggcccttacttgcttctctagctctctaggcctctccagtttgcacctgtccccaccctccactcagctgtcctgcagcaaacactccaccctccaccttccattttcccccactactgcagcacctccaggcctgttgctatagagcctacctgtatgtcaataaacaacagctgaagc

SEQ ID NO: 25141 - DNA, 2254 bp, Homo sapiens
  source 1..2254: mol_type = unassigned DNA
gcacagcagctgcacgcgccgtggctccggatctcttcgtctttgcagcgtagcccgagtcggtcagcgccggagctctccagggcacaccgtattcagctctgagcggtctttgctagtgaggccaaggagccaccctgagccaaaaggggagcattatgtcaccggaagcccaaccccagagaaccaaaggacctcagcagccatgtcgaagccccatagtgaagccgggactgccttcattcagacccagcagctgcacgcagccatggctgacacattcctggagcacatgtgccgcctggacattgattcaccacccatcacagcccggaacactggcatcatctgtaccattgtaccatgcggagaccatcaagaatgtgcgcacagccacggaaagctttgcttctgaccccatcctctaccggcccgttgctgtggctctagacactaaaggacctgagatccgaactgggctcatcaagggcagcggcactgcagaggtggagctgaagaagggagccactctcaaaatcacgctggataacgcctacatggaaaagtgtgacgagaacatcctgtggctggactacaagaacatctgcaaggtggtggaagtgggcagcaagatctacgtggatgatgggcttatttctctccaggtgaagcagaaaggtgccgacttcctggtgacggaggtggaaaatggtggctccttgggcagcaagaagggtgtgaaccttcctggggctgctgtggacttgcctgctgtgtcggagaaggacatccaggatctgaagtttggggtcgagcaggatgttgatatggtgtttgcgtcattcatccgcaaggcatctgatgtccatgaagttaggaaggtcctgggagagaagggaaagaacatcaagattatcagcaaaatcgagaatcatgagggggttcggaggtttgatgaaatcctggaggccagtgatgggatcatggtggctcgtggtgatctaggcattgagattcctgcagagaaggtcttccttgctcagaagatgatgattggacggtgcaaccgagctgggaagcctgtcatctgtgctactcagatgctggagagcatgatcaagaagccccgccccactcgggctgaaggcagtgatgtggccaatgcagtcctggatggagccgactgcatcatgctgtctggagaaacagccaaaggggactatcctctggaggctgtgcgcatgcagcacctgattgcccgtgaggcagaggctgccatctaccacttgcaattatttgaggaactccgccgcctggcgcccattaccagcgaccccacagaagccaccgccgtgggtgccgtggaggcctccttcaagtgctgcagtggggccataatcgtcctcaccaagtctggcaggtctgctcaccaggtggccagataccgcccacgtgcccccatcattgctgtgacccggaatccccagacagctcgtcaggcccacctgtaccgtggcatcttccctgtgctgtgcaaggacccagtccaggaggcctgggctgaggacgtggacctccgggtgaactttgccatgaatgttggcaaggcccgaggcttcttcaagaagggagatgtggtcattgtgctgaccggatggcgccctggctccggcttcaccaacaccatgcgtgttgttcctgtgccgtgatggaccccagagcccctcctccagcccctgtcccacccccttcccccagcccatccattaggccagcaacgcttgtagaactcactctgggctgtaacgtggcactggtaggttgggacaccagggaagaagatcaacgcctcactgaaacatggctgtgtttgcagcctgctctagtgggacagcccagagcctggctgcccatcatgtggccccacccaatcaagggaagaaggaggaatgctggactggaggcccctggagccagatggcaagagggtgacagcttcctttcctgtgtgtactctgtccagttcctttagaaaaaatggatgcccagaggactcccaaccctggcttggggtcaagaaacagccagcaagagttaggggccttagggcactgggctgttgttccattgaagccgactctggccctggcccttacttgcttctctagctctctaggcctctccagtttgcacctgtccccaccctccactcagctgtcctgcagcaaacactccaccctccaccttccatttt

SEQ ID NO: 25142 - DNA, 1331 bp, Homo sapiens
  source 1..1331: mol_type = unassigned DNA
ggcccacgtggttccgacagtcaagatggcgggagcagctacccaggcttccctggagtcggccccacggatcatgcggctggtggccgaatgcagccgctccagggcccgggcaggcgagctgtggctgccgcatgggacagtggccactcctgtgttcatgccagtgggcacgcaggccaccatgaagggcatcacgaccgaacagctggacgctctgggttgccgcatctgcctgggcaatacctaccatctgggtctaaggccgggacccgagctgatccagaaagccaacggtctccacggcttcatgaattggcctcataatctgctaacggacagcggcggtttccagatggtgtcgctggtgtctctgtccgaggtgacggaggagggcgtccgcttccgctccccctacgacggcaatgagaccctgctgagcccggagaaatccgtgcagatccagaatgcgctgggctcggacatcatcatgcagctggacgacgtggttagcagtactgtgactgggccacgtgtggaggaggccatgtacaggtcaatccgctggctggaccggtgcattgcagcccatcagcggccggacaagcagaacctcttcgccattatccagggtgggctggacgcagatctccgggccacctgccttgaagagatgaccaagcgagacgtgcctggcttcgccatcgggggcctgagcgggggtgagagcaagtcgcagttctggcggatggtggcgctgagcacctctcggctgccgaaggacaagccccgatatctgatgggggttggctatgccactgatctggtagtctgcgtggctcttggatgtgacatgttcgactgcgtcttccccacacggacagcgcgctttggctctgccctggtgcccactgggaacctgcagttgaggaagaaggtgtttgagaaggacttcggccccatagacccggagtgcacctgccccacgtgccaaaagcacagccgcgccttcctgcacgcactgctgcacagtgacaacacggccgcgctgcaccacctcacggtccacaacatcgcctaccagctgcagctcatgagcgccgtccgcaccagcatcgtggagaagcgcttcccggacttcgtgcgggacttcatgggcgccatgtacggggatcccaccctctgtcccacctgggccactgacgctctggcctctgtgggaatcacactgggctgacctggcattgggagagggagggaggaaggaagggagggaggggctggaagatactgaaggattcctttttgaaaggttttttttattgtaactt

SEQ ID NO: 25143 - DNA, 1502 bp, Homo sapiens
  source 1..1502: mol_type = unassigned DNA
agtcaagatggcgggagcagctacccaggcttccctggagtcggccccacggatcatgcggctggtggccgaatgcagccgctccagggcccgggcaggcgagctgtggctgccgcatgggacagtggccactcctgtgttcatgccagtgggcacgcaggccaccatgaagggcatcacgaccgaacagctggacgctctgggttgccgcatctgcctgggcaatacctaccatctgggtctaaggccgggacccgagctgatccagaaagccaacggtctccacggcttcatgaattggcctcataatctgctaacggacagcggcggtttccagatggtgtcgctggtgtctctgtccgaggtgacggaggagggcgtccgcttccgctccccctacgacggcaatgagaccctgctgagcccggagaaatccgtgcagatccagaatgcgctgggctcggacatcatcatgcagctggacgacgtggttagcagtactgtgactgggccacgtgtggaggaggccatgtacaggcccctggggcttgtgactggggccctgttgcaggtcaatccgctggctggaccggtgcattgcagcccatcagcggccggacaagcagaacctcttcgccattatccagggtgggctggacgcagatctccgggccacctgccttgaagagatgaccaagcgagacgtgcctggcttcgccatcgggggcctgagcgggggtgagagcaagtcgcagttctggcggatggtggcgctgagcacctctcggctgccgaaggacaagccccgatatctgatgggggttgggtatgttgtggatagggaagccagagccctacctgtgggaagtggattcctggggaccccctaccctgcttggggaggtggcatttgggggaaacggacacaggtctgatctgaggagactaggaagacatggctgtcccttgggggccattctgagggaatatggcccagtctggggcagtgtgagggttgggaggggccctgggaagcccctgaggttctctgccccctcccgtcatggctgcaaccccagctatgccactgatctggtagtctgcgtggctcttggatgtgacatgttcgactgcgtcttccccacacggacagcgcgctttggctctgccctggtgcccactgggaacctgcagttgaggaagaaggtgtttgagaaggacttcggccccatagacccggagtgcacctgccccacgtgccaaaagcacagccgcgccttcctgcacgcactgctgcacagtgacaacacggccgcgctgcaccacctcacggtccacaacatcgcctaccagctgcagctcatgagcgccgtccgcaccagcatcgtggagaagcgcttcccggacttcgtgcgggacttcatgggcgccatagtgtgtctgtgtcttcttgaggaagtggcctgtctgggtccccctcccagtctgagcgtcattgcagt

SEQ ID NO: 25144 - DNA, 4530 bp, Homo sapiens
  source 1..4530: mol_type = unassigned DNA
ccagggtgaaagttcagcgcgccggcggcacttccaacatggcggcggccggggcggcggtggcgcgcagcccgggaatcggagcgggacctgcgctgagagcccggcgctcgcccccgccgcgggccgcacggctgccgcggctgctagtgctgctagcggcggcggcggtggggccgggcgcgggcggtgcggcgcggctgtaccgcgcgggcgaggacgccgtgtgggtgctggacagcggcagcgtgcgcggggccaccgccaacagctcggccgcgtggctcgtgcagttctactcgtcgtggtgtggccactgcatcggctacgcgcccacttggcgggccctggctggggatgtgcgagactgggccagtgccattcgcgtcgcagctctggactgcatggaagagaagaaccaggccgtgtgccatgactacgacatccacttctaccccaccttccggtattttaaagcatttacaaaggagtttacaactggagaaaattttaaaggacctgaccgagagctgcgaacagtcagacagacgatgattgacttcctgcagaaccacacggaaggaagccggccccctgcctgcccgcgcctagaccccattcagcccagtgatgttctttcccttcttgacaaccgtggcagccattacgtggctattgtctttgaaagcaacagctcctaccttggacgggaggtgatcttagacctgatcccgtatgaaagcatcgtggtgacccgagcactggacggggacaaagcatttctggagaaacttggtgtttcttcagtcccttcgtgttacctgatctacccaaatgggtcgcatggattgattaacgtcgtgaagcctctgcgggccttcttttcgtcttatttgaagtcattgccggatgtgaggaaaaaatcgcttcccttgcctgaaaagccacacaaagaagaaaattcagaaatcgtggtttggagagaatttgacaagtcgaagctgtacacggtggacctggagtcagggctacactacctcctgcgggtggagctggcagcccacaagtccctggccggagcagagctgaagacgctcaaggactttgtgactgtcttggccaagctgttccctggacggccgccagtcaagaagctgttggagatgctgcaggagtggctggccagccttcccctggacaggatcccctacaacgccgtgcttgacctggtcaacaacaagatgcggatttctggaatattccttactaatcacataaagtgggttggatgtcaaggaagccgatctgagttgaggggttacccgtgttctctctggaaactgttccacactttgactgttgaagcctcgacccacccagatgcactggttggcacaggctttgaagacgacccccaggctgtgctgcagacaatgaggaggtacgttcacaccttctttgggtgtaaggaatgtggtgagcactttgaggaaatggctaaagaatccatggactcggtgaaaaccccagaccaagccatcctctggctgtggaagaagcataatatggtgaacggccgcctggcaggccatctgagtgaggatccccggtttccaaagcttcagtggcccactccggacctctgcccagcctgccatgaggaaattaagggcctggccagctgggatgaaggccacgtgctcacattcttgaagcagcactatggccgcgacaacctcttagacacgtattccgcagaccagggggattccagtgaaggaggaaccctggccaggggtgaggaagaggagaaaagactcactcccccagaggtgtcccatggagaccgagacacccagagcgtccgtccacctggtgcactgggccccaggcctgcccttccagagagcttgcatcacagcttggacgggaaactccagagtctggatgggcccggggcccacaaggaggtgggcggggccgcacccttcctcggggttgacttctccagcctggacatgagtctctgtgtcgtgctgtacgtggcttcatccctgttcctcatggtgatgtacttcttcttccgggtgaggtccaggcggtggaaggtcaagcaccaccacccggccgtgtgagtgcccgggtgctgccagccacggcggaagctcccttggaggcagccctgccccgtgccacctgcagctttaatatttatgatcagggattttataaacatgcgggcctggtttcacatcggatggcaccttttggcttcaaagtcctggttttacaaacgctcttctaacaagggaagaacacggggtaattttgtggggatatttgcattcctggcgtactcaagtctgttcatgctccttttgcaggtcttacagcaaaaagacttctgtatttttactcttctagatgtgaaaagagggtgcagagtccaggccagatagtcttccccacacactttcatctcgtttcctccactccgccccatcctgcagggccttgtttttgtatttggagaacctcgcccatcccccccgcggctcctggctcccccccactcccctcgctccccctccccccgctccccccacgccccctgctccaggctgccaagtgttttcctttagccgggcggggacagacagagccggaagcgcagtcggcctctgcagcccctccaagcaagtgctccagggactatcctgtgtttgtagctgcttccctagggcaggttcctgagggctctccttgttcctccgggtgttcgacaccagacgtggggatttcaacaggggaggagccaaggaattctgtggctgtgctgcgtttcagaaaataacccccagaggccttgggctgtggacctgggggttggaaggatgggggctcatttaaccctcagaggcagcgcctttgtctgtctatctggtgacaagagagagacaagtaaatgggggccgttgggacggcgggtgcctggagggcagctctgggctcagcgggcagtgcttagagcacaggcccctctgttgggggatggggaggagagcagtctgcccttgggagcgtaggccccagggagacttctaaagccccccctgtcgtctgctcttcacccagcaccacagaggcacctgctgcacacacaagcatctcactcggcccacggagggggccaggcttcctttgcctgaagctgttttgggaagggtctccacacaggcactgatctcccaagcttttgtcatgatgtcttttaccatttgataattttaaacattgtttttaaacccaaaacatttagtggtccgttgcctctgaagatgtaaacaaacaaatacactatttctgggaacatttatattgagattctttgtggctattggtgtgtctcacaggcaaaatttgatttggctaaaataggctcagatgtatttgtgtgcccgtgtgtgtgtgtgtgtgtgtgtgtgtgtgtgtgtgtgtatgagagagagagagactttgacggttgtagatattttttccgctttgcctactttatgttgtataatcatgtgtttactaacaagttgatgacatggatgtattcataagaccatgtaatattgatgtgattgttgtcgcttgagaaaaaaaggcaacagctgattctttcaacaactgtcacagaatggctgggctgagaacgctgcccagggccctgcagctggcgggagaggtgtctggtgggagcggtgtctggtgcgtcagcctgctgcttcgtgtctcactcgagagttgcttctggtttcacactttttaacccctctgtgctttagcagccgtgaccttgccttcattgcttcatccagtgcaggcctgggttattgaagacaccaaagtgtttctcttccagtttgaaaaccaggcaggtttacacgtgggtttcagtgtatttgcctttgaacccttcaaactaaactttagccttttggctggtgttgaatgtctttagctggggtgacctggagtgacctgggacggtgttgtggtttaccgtctccagcttcagcctttccagaaacccttgtggagggcagtgttggctgcaggtttcatcatattgcagtttgaggtcaccactatttggggaacaagcttgcgtcctgctgaggggcaggattttcagcagagcgtcggtggggctgggccgtcgtggaggtggccccaggagtcatatggccatactcagacacaccttgtgtggcctgctcagagctggatgccacctttaggcaatgtttagagtctattttctaaagttttaagtattttaagaggtattgagactaatgaatataatagttcagtaatttaaatgcttatttattttcagtggaaggatttttattaaaaagaagctaattgacatggaaatgtcagtgaaatttcttacctgcaaggaaagtgaacattttgtatttaagtaaactataatgtgcacattttaataaagaaatctgacatttgaaaaaa

SEQ ID NO: 25145 - DNA, 4287 bp, Homo sapiens
  source 1..4287: mol_type = unassigned DNA
ccagggtgaaagttcagcgcgccggcggcacttccaacatggcggcggccggggcggcggtggcgcgcagcccgggaatcggagcgggacctgcgctgagagcccggcgctcgcccccgccgcgggccgcacggctgccgcggctgctagtgctgctagcggcggcggcggtggggccgggcgcgggcggtgcggcgcggctgtaccgcgcgggcgaggacgccgtgtgggtgctggacagcggcagcgtgcgcggggccaccgccaacagctcggccgcgtggctcgtgcagttctactcgtcgtggtgtggccactgcatcggctacgcgcccacttggcgggccctggctggggatgtgcgagactgggccagtgccattcgcgtcgcagctctggactgcatggaagagaagaaccaggccgtgtgccatgactacgacatccacttctaccccaccttccggtattttaaagcatttacaaaggagtttacaactggagaaaattttaaaggacctgaccgagagctgcgaacagtcagacagacgatgattgacttcctgcagaaccacacggaaggaagccggccccctgcctgcccgcgcctagaccccattcacgtgaagcctctgcgggccttcttttcgtcttatttgaagtcattgccggatgtgaggaaaaaatcgcttcccttgcctgaaaagccacacaaagaagaaaattcagaaatcgtggtttggagagaatttgacaagtcgaagctgtacacggtggacctggagtcagggctacactacctcctgcgggtggagctggcagcccacaagtccctggccggagcagagctgaagacgctcaaggactttgtgactgtcttggccaagctgttccctggacggccgccagtcaagaagctgttggagatgctgcaggagtggctggccagccttcccctggacaggatcccctacaacgccgtgcttgacctggtcaacaacaagatgcggatttctggaatattccttactaatcacataaagtgggttggatgtcaaggaagccgatctgagttgaggggttacccgtgttctctctggaaactgttccacactttgactgttgaagcctcgacccacccagatgcactggttggcacaggctttgaagacgacccccaggctgtgctgcagacaatgaggaggtacgttcacaccttctttgggtgtaaggaatgtggtgagcactttgaggaaatggctaaagaatccatggactcggtgaaaaccccagaccaagccatcctctggctgtggaagaagcataatatggtgaacggccgcctggcaggccatctgagtgaggatccccggtttccaaagcttcagtggcccactccggacctctgcccagcctgccatgaggaaattaagggcctggccagctgggatgaaggccacgtgctcacattcttgaagcagcactatggccgcgacaacctcttagacacgtattccgcagaccagggggattccagtgaaggaggaaccctggccaggggtgaggaagaggagaaaagactcactcccccagaggtgtcccatggagaccgagacacccagagcgtccgtccacctggtgcactgggccccaggcctgcccttccagagagcttgcatcacagcttggacgggaaactccagagtctggatgggcccggggcccacaaggaggtgggcggggccgcacccttcctcggggttgacttctccagcctggacatgagtctctgtgtcgtgctgtacgtggcttcatccctgttcctcatggtgatgtacttcttcttccgggtgaggtccaggcggtggaaggtcaagcaccaccacccggccgtgtgagtgcccgggtgctgccagccacggcggaagctcccttggaggcagccctgccccgtgccacctgcagctttaatatttatgatcagggattttataaacatgcgggcctggtttcacatcggatggcaccttttggcttcaaagtcctggttttacaaacgctcttctaacaagggaagaacacggggtaattttgtggggatatttgcattcctggcgtactcaagtctgttcatgctccttttgcaggtcttacagcaaaaagacttctgtatttttactcttctagatgtgaaaagagggtgcagagtccaggccagatagtcttccccacacactttcatctcgtttcctccactccgccccatcctgcagggccttgtttttgtatttggagaacctcgcccatcccccccgcggctcctggctcccccccactcccctcgctccccctccccccgctccccccacgccccctgctccaggctgccaagtgttttcctttagccgggcggggacagacagagccggaagcgcagtcggcctctgcagcccctccaagcaagtgctccagggactatcctgtgtttgtagctgcttccctagggcaggttcctgagggctctccttgttcctccgggtgttcgacaccagacgtggggatttcaacaggggaggagccaaggaattctgtggctgtgctgcgtttcagaaaataacccccagaggccttgggctgtggacctgggggttggaaggatgggggctcatttaaccctcagaggcagcgcctttgtctgtctatctggtgacaagagagagacaagtaaatgggggccgttgggacggcgggtgcctggagggcagctctgggctcagcgggcagtgcttagagcacaggcccctctgttgggggatggggaggagagcagtctgcccttgggagcgtaggccccagggagacttctaaagccccccctgtcgtctgctcttcacccagcaccacagaggcacctgctgcacacacaagcatctcactcggcccacggagggggccaggcttcctttgcctgaagctgttttgggaagggtctccacacaggcactgatctcccaagcttttgtcatgatgtcttttaccatttgataattttaaacattgtttttaaacccaaaacatttagtggtccgttgcctctgaagatgtaaacaaacaaatacactatttctgggaacatttatattgagattctttgtggctattggtgtgtctcacaggcaaaatttgatttggctaaaataggctcagatgtatttgtgtgcccgtgtgtgtgtgtgtgtgtgtgtgtgtgtgtgtgtgtgtatgagagagagagagactttgacggttgtagatattttttccgctttgcctactttatgttgtataatcatgtgtttactaacaagttgatgacatggatgtattcataagaccatgtaatattgatgtgattgttgtcgcttgagaaaaaaaggcaacagctgattctttcaacaactgtcacagaatggctgggctgagaacgctgcccagggccctgcagctggcgggagaggtgtctggtgggagcggtgtctggtgcgtcagcctgctgcttcgtgtctcactcgagagttgcttctggtttcacactttttaacccctctgtgctttagcagccgtgaccttgccttcattgcttcatccagtgcaggcctgggttattgaagacaccaaagtgtttctcttccagtttgaaaaccaggcaggtttacacgtgggtttcagtgtatttgcctttgaacccttcaaactaaactttagccttttggctggtgttgaatgtctttagctggggtgacctggagtgacctgggacggtgttgtggtttaccgtctccagcttcagcctttccagaaacccttgtggagggcagtgttggctgcaggtttcatcatattgcagtttgaggtcaccactatttggggaacaagcttgcgtcctgctgaggggcaggattttcagcagagcgtcggtggggctgggccgtcgtggaggtggccccaggagtcatatggccatactcagacacaccttgtgtggcctgctcagagctggatgccacctttaggcaatgtttagagtctattttctaaagttttaagtattttaagaggtattgagactaatgaatataatagttcagtaatttaaatgcttatttattttcagtggaaggatttttattaaaaagaagctaattgacatggaaatgtcagtgaaatttcttacctgcaaggaaagtgaacattttgtatttaagtaaactataatgtgcacattttaataaagaaatctgacatttg

SEQ ID NO: 25146 - DNA, 1648 bp, Homo sapiens
  source 1..1648: mol_type = unassigned DNA
acagtccctccgggtggcggggcgccccgagcgtggcagcgcgctaggcggcagcagcgggcgcggagcggggcgcggccgccgcgcgttccctcttggcggggttggccggccggggcggggcgcggcgctccggctcgaggcattcggagctgcgggagccgggctggcaggagcaggatggcggcggcggcggctgcaggcgaggcgcgccgggtgctggtgtacggcggcaggggcgctctgggttctcgatgcgtgcaggcttttcgggcccgcaactggtgggttgccagcgttgatgtggtggagaatgaagaggccagcgctagcatcattgttaaaatgacagactcgttcactgagcaggctgaccaggtgactgctgaggttggaaagctcttgggtgaagagaaggtggatgcaattctttgcgttgctggaggatgggccgggggcaatgccaaatccaagtctctctttaagaactgtgacctgatgtggaagcagagcatatggacatcgaccatctccagccatctggctaccaagcatctcaaggaaggaggcctcctgaccttggctggcgcaaaggctgccctggatgggactcctggtatgatcgggtacggcatggccaagggtgctgttcaccagctctgccagagcctggctgggaagaacagcggcatgccgcccggggcagccgccatcgctgtgctcccggttaccctggataccccgatgaacaggaaatcaatgcctgaggctgacttcagctcctggacacccttagaattcctagttgaaactttccatgactggatcacagggaaaaaccgaccgagctcaggaagcctaatccaggtggtaaccacagaaggaaggacggaactcaccccagcatatttttaggcctcatctcagtgcctatgaggggcctgccagaaaagtcactaacctgtctcagtgtggccttgtccagccttgtgttttctgtaacccctgtttgtggtacgagataatgagtcctatttttctctcacataatatgcatttgctctcctaggacagtgtaatacatttatgtgaagtaaagacatgcgagactggtggcctgcaaatagcatccgttgatctgtgttaactgcatagggagggctctgcatagcacctgctatagcggtgtcatgttggatcgcttttgtgactgttcatctgtccttgacagtggctgtcatcttgactactttgttgatttgttggtattggggacattttaaaggctgagttatttttgaatgtcatgtttatgtcatagacgtagttttcgcatccttgaattaaactgccttaactccttttgtggtataagcaaaactacatggactctgtcctggtatccttttcctgtgtggttgccccgtgtcctctggcctagggttaagtgtgcaagataactactcgtgagtattcagaatgttgttcctaataaatgcacttgttgtctgtcttctttaatcaaatcacatcttatatacagcagtcagagatgagtatactagaatcatggattgctggaggtcttttaatctgatgttctcagaagggggtggatttaaatcctgaaataaatatttcaacacaa

SEQ ID NO: 25147 - DNA, 913 bp, Homo sapiens
  source 1..913: mol_type = unassigned DNA
gactttcagggcctgctgaggaatctgcaggcctggcagaggacaggagggaggcttggggagcctgggaagggccggctgacagcttgatgggccctccctccctccacagtcccacccccagcctggggcctctgggagccttggtcctgagcagccaacacaccagcccagacagctgcaagtcaccatggacgctgaaggcggtgcgggcggccagacaggcggctgacttcactctgaaggtggaagtggaatgcagcagcctgcaggaggccgtgcaggcagctgaggctggtgccgaccttgtcctgctggacaacttcaagccagaggagctgcaccccacggccaccgtgctgaaggcccagttcccgagtgtggctgtggaagccagtgggggcatcaccctggacaacctcccccagttctgcgggccgcacatagacgtcatctccatggggatgctgacccaggcggccccagcccttgatttctccctcaagctgtttgccaaagaggtggctccagtgcccaaaatccactagtcctaaaccggaagaggatgacaccggccatgggttaacgtggctcctcaggaccctctgggtcacacatctttagggtcagtggccaatggggcacatttggcactagcttgagcccaactctggctctgccacctgctgctcctgtgacctgtcagggctgacttcacctctgctcatctcagtttcctaatctgtaaaatgggtctaataaaggatcaaccacatggggttctgcggtgataatgagcacatagtgaggggtcagcaaatgtcagaagttacctgggacagccgggcacgatggctcacacctgtaatcccagcactttgggaggctgaggcgggaagatcacttgagttca

SEQ ID NO: 25148 - DNA, 1648 bp, Homo sapiens
  source 1..1648: mol_type = unassigned DNA
ggcctggcagaggacaggagggaggcttggggagcctgggaagggccggctgacagcttgatgggccctccctccctccacagtcccacccccagcctggggcctctgggagccttggtcctgagcagccaacacaccagcccagacagctgcaagtcaccatggacgctgaaggcctggcgctgctgctgccgcccgtcaccctggcagccctggtggacagctggctccgagaggactgcccagggctcaactacgcagccttggtcagcggggcaggcccctcgcaggcggcgctgtgggccaaatcccctggggtactggcagggcagcctttcttcgatgccatatttacccaactcaactgccaagtctcctggttcctccccgagggatcgaagctggtgccggtggccagagtggccgaggtccggggccctgcccactgcctgctgctgggggaacgggtggccctcaacacgctggcccgctgcagtggcattgccagtgctgccgccgctgcagtggaggccgccaggggggccggctggactgggcacgtggcaggcacgaggaagaccacgccaggcttccggctggtggagaagtatgggctcctggtgggcggggccgcctcgcaccgctacgacctgggagggctggtgatggtgaaggataaccatgtggtggccgccggtggcgtggagaaggcggtgcgggcggccagacaggcggctgacttcactctgaaggtggaagtggaatgcagcagcctgcaggaggccgtgcaggcagctgaggctggtgccgaccttgtcctgctggacaacttcaagccagaggagctgcaccccacggccaccgtgctgaaggcccagttcccgagtgtggctgtggaagccagtgggggcatcaccctggacaacctcccccagttctgcgggccgcacatagacgtcatctccatggggatgctgacccaggcggccccagcccttgatttctccctcaagctgtttgccaaagaggtggctccagtgcccaaaatccactagtcctaaaccggaagaggatgacaccggccatgggttaacgtggctcctcaggaccctctgggtcacacatctttagggtcagtggccaatggggcacatttggcactagcttgagcccaactctggctctgccacctgctgctcctgtgacctgtcagggctgacttcacctctgctcatctcagtttcctaatctgtaaaatgggtctaataaaggatcaaccacatggggttctgcggtgataatgagcacatagtgaggggtcagcaaatgtcagaagttacctgggacagccgggcacgatggctcacacctgtaatcccagcactttgggaggctgaggcgggaagatcacttgagttcaggagtttgagaccagcctggccaacatggtgaaaccccatctctaccaaaaatagaagaattagctgggtgtggtggcacgcgcctgtaatcccagctacttaggaggctgaggcaggagaatcgcttgaacccaggaagtggaggttgcagtgagctgatggtgccactgcactccagcctgggtgatagagcgagactctgtctccaaagaagaaacaaaggaaag

SEQ ID NO: 25149 - DNA, 610 bp, Homo sapiens
  source 1..610: mol_type = unassigned DNA
gacctggccccagtgctgcgtccttatcagccgagccgtcccacccccagcctggggcctctgggagccttggtcctgagcagccaacacaccagcccagacagctgcaagtcaccatggacgctgaaggcctggcgctgctgctgccgcccgtcaccctggcagccctggtggacagctggctccgagaggactgcccagggctcaactacgcagccttggtcagcggggcaggcccctcgcaggcggcgctgtgggccaaatcccctggggtactggcagggcagcctttcttcgatgccatatttacccaactcaactgccaagtctcctggttcctccccgagggatcgaagctggtgccggtggccagagtggccgaggtccggggccctgcccactgcctgctgctgggggaacgggtggccctcaacacgctggcccgctgcagtggcattgccagtgctgccgccgctgcagtggaggccgccaggggggccggctggactgggcacgtggcaggcacgaggaagaccacgccaggcttccggctggtggagaagtatgggctcctggtgggcggggccgcctcgcaccgctacgacctggg

SEQ ID NO: 25150 - DNA, 2088 bp, Homo sapiens
  source 1..2088: mol_type = unassigned DNA
acacgcacgctacagtcgcccgtgcgcactcgtacacaccaggtggctaacaggtacgaggcgtttccggacagcgagcgcagagcccccgcgcacgcgcctccgagccggcctcttccgccgcaagtccctccccaagcctgcagagtgcgctgcgtttcgatgagccgggacgtggcgccgctctagccagcgcctgggctctgtggcgggcgccgcagctccgcgtcccccgcgcctcctcccagcgcagacttcaagggctaccactggacccttcccctgtcttgaaccctgagccggcaccatgcacggacgcctgaaggtgaagacgtcagaagagcaggcggaggccaaaaggctagagcgagagcagaagctgaagctataccagtcagccacccaggccgtattccagaagcgccaggctggtgagctggatgagtccgtgctggaactgacaagccagattctgggagccaaccctgattttgccaccctctggaactgccgacgagaggtgctccagcagctggagactcagaagtctcctgaagagttggctgctctggtgaaggcagaactgggcttcctggagagctgcctgcgggtgaaccccaagtcttatggtacctggcaccaccgatgctggctgctaggccgcctgcctgagcccaactggacccgagagctggagctctgtgcccgtttcctggaggtggatgagcggaactttcactgctgggactatcggcggtttgtggccacacaggcagccgtgccccctgcagaagagctagccttcactgacagcctcatcacccgaaacttctccaactactcttcctggcattaccgctcctgtctcttgccccagctgcacccccagccggattctggaccacaggggcgcctccctgaggatgtgctgctcaaagagctggagctggtgcagaatgccttcttcactgaccccaatgaccagagtgcctggttttatcaccgttggctcctaggccgagctgacccccaggatgcactgcgctgcctgcatgtgagccgggacgaggcctgtctgactgtctccttctctcggcccctcttagtgggctccaggatggagatcttgctgctcatggttgatgattctcccctgattgtggagtggaggaccccagatggcaggaaccggcccagccatgtctggctctgtgacctgcctgctgcctccctcaacgaccagttgccccaacatacatttcgcgtcatttggacagcaggcgatgtccagaaagaatgcgtgcttttaaaaggccgccaggagggctggtgccgggactccacgacagacgagcagctattcaggtgtgagctgtcagtggagaagtccacagtgctgcagtctgagctggaatcctgtaaggagctgcaggagctggagcctgagaataaatggtgcctgcttaccatcatcctgctgatgcgggcactggaccccctgctgtatgagaaggagaccctgcagtacttccagaccctcaaggccgtggaccccatgcgggcaacgtatctggatgacctgcgcagcaagttcttgctggagaatagcgtgctcaagatggagtatgccgaggtgcgtgtgctgcacctggctcacaaggatctgacagtgctctgccatctggaacagctgctcttggtcacccatcttgacttgtcacacaatcgcctccgaaccctgccacctgcactggctgccctgcgctgccttgaggtgctgcaggccagtgataatgccatagagtccctggacggcgtcaccaacctaccccggctgcaggagctgctactgtgcaacaaccgcctccagcagcctgcagtgctccagcctcttgcctcctgccccaggctggtcctcctcaacctgcagggtaacccgctgtgccaagcggtgggcatcttggagcaactggctgaactgctgccttcagttagcagcgtcctcacctaagaggccctgccccctacccttgccctttaacttattgggactgaataaagaatggagaggccctctcaggctaccaa

SEQ ID NO: 25151 - DNA, 2265 bp, Homo sapiens
  source 1..2265: mol_type = unassigned DNA
ctgcagagtgcgctgcgtttcgatgagccgggacgtggcgccgctctagccagcgcctgggctctgtggcgggcgccgcagctccgcgtcccccgcgcctcctcccagcgcaggtgggtccgcccgcggggggcgggggtgcccgggagccgtgggacgggcgggtagcggcaacctttggggagcagagtggtccccaacgcccaggtgccccggctcgcgctctggcccgggcgaatcgggctataggaagggccacacggatggaagtcctagtccgggtgctcacctcttgtggaacgtgcaaagcctgtcccaggacctctttacactctgggggtctctgcccaggcacgcttgctgcttccggacacagctgtgggcggagctagtaggggcggggctacgtgattgacacttctctcctcagacttcaagggctaccactggacccttcccctgtcttgaaccctgagccggcaccatgcacggacgcctgaaggtgaagacgtcagaagagcaggcggaggccaaaaggctagagcgagagcagaagctgaagctataccagtcagccacccaggccgtattccagaagcgccaggctggtgagctggatgagtccgtgctggaactgacaagccagattctgggagccaaccctgattttgccaccctctggaactgccgacgagaggtgctccagcagctggagactcagaagtctcctgaagagttggctgctctggtgaaggcagaactgggcttcctggagagctgcctgcgggtgaaccccaagtcttatggtacctggcaccaccgatgctggctgctaggccgcctgcctgagcccaactggacccgagagctggagctctgtgcccgtttcctggaggtggatgagcggaactttcactgctgggactatcggcggtttgtggccacacaggcagccgtgccccctgcagaagagctagccttcactgacagcctcatcacccgaaacttctccaactactcttcctggcattaccgctcctgtctcttgccccagctgcacccccagccggattctggaccacaggggcgcctccctgaggatgtgctgctcaaagagctggagctggtgcagaatgccttcttcactgaccccaatgaccagagtgcctggttttatcaccgttggctcctaggccgagctgacccccaggatgcactgcgctgcctgcatgtgagccgggacgaggcctgtctgactgtctccttctctcggcccctcttagtgggctccaggatggagatcttgctgctcatggttgatgattctcccctgattgtggagtggaggaccccagatggcaggaaccggcccagccatgtctggctctgtgacctgcctgctgcctccctcaacgaccagttgccccaacatacatttcgcgtcatttggacagcaggcgatgtccagaaagaatgcgtgcttttaaaaggccgccaggagggctggtgccgggactccacgacagacgagcagctattcaggtgtgagctgtcagtggagaagtccacagtgctgcagtctgagctggaatcctgtaaggagctgcaggagctggagcctgagaataaatggtgcctgcttaccatcatcctgctgatgcgggcactggaccccctgctgtatgagaaggagaccctgcagtacttccagaccctcaaggccgtggaccccatgcgggcaacgtatctggatgacctgcgcagcaagttcttgctggagaatagcgtgctcaagatggagtatgccgaggtgcgtgtgctgcacctggctcacaaggatctgacagtgctctgccatctggaacagctgctcttggtcacccatcttgacttgtcacacaatcgcctccgaaccctgccacctgcactggctgccctgcgctgccttgaggtgctgcaggccagtgataatgccatagagtccctggacggcgtcaccaacctaccccggctgcaggagctgctactgtgcaacaaccgcctccagcagcctgcagtgctccagcctcttgcctcctgccccaggctggtcctcctcaacctgcagggtaacccgctgtgccaagcggtgggcatcttggagcaactggctgaactgctgccttcagttagcagcgtcctcacctaagaggccctgccccctacccttgccctttaacttattgggactgaataaagaatggagaggccctctcaggctaccaa

SEQ ID NO: 25152 - DNA, 1496 bp, Homo sapiens
  source 1..1496: mol_type = unassigned DNA
gcatctgcgcaggcgcccggctcctaagtctacccaggaactgaccctgctctctcctttccctgttagacatgggcactccacagaaggatgttattatcaagtcagatgcaccggacactttgttattggagaaacatgcagattatatcgcatcctatggctcaaagaaagatgattatgaatactgtatgtctgagtatttgagaatgagtggcatctattggggtctgacagtaatggatctcatgggacaacttcatcgcatgaatagagaagagattctggcatttattaagtcttgccaacatgaatgtggtggaataagtgctagtatcggacatgatcctcatcttttatacactcttagtgctgtccagattcttacgctgtatgacagtattaatgttattgacgtaaataaagttgtggaatatgttaaaggtctacagaaagaagatggttcttttgctggagatatttggggagaaattgacacaagattctctttttgtgcggtggcaactttggctttgttggggaagcttgatgctattaatgtggaaaaggcaatcgaatttgttttatcctgtatgaactttgacggtggatttggttgcagaccaggttctgaatcccatgctgggcagatctattgttgcacaggatttctggcaattacaagtcagttgcatcaagtaaattctgatttacttggctggtggctttgtgaacgacaattaccctcaggcgggctcaatggaaggccggagaagttaccagatgtatgctactcatggtgggtcctggcttccctaaagataattggaagacttcattggattgatagagagaaactgcgtaatttcattttagcatgtcaagatgaagaaacggggggatttgcagacaggccaggagatatggtggatccttttcataccttatttggaattgctggattgtcacttttgggagaagaacagattaaacctgttaatcctgtcttttgcatgcctgaagaagtgcttcagagagtgaatgttcagcctgagctagtgagctagattcattgaattgaaagttgcatagtatagttttgccattttaacatttctgtatttgaagtgcttatcgaatctaaaagtgactactgttaatattttgtatattgtgttaaattaattttaataaattatataattatacatattgtaaaataaagaccggtattttattttctgctttttattctgaagtcctgttattctgactacagttctttgtgtatacttctgtgtctgttatgttcaataactgagctaacataaaataactctaggtttctacttgatttttcccccatgtatacctttcatctgttctatagcaagttgatgtaaattggtttgtcaacaagaatgttaactgatgaaagtggatagaacccatacatgaattaaatgatgcacaaaataaatggctgttgaaatttg

SEQ ID NO: 25153 - DNA, 1034 bp, Homo sapiens
  source 1..1034: mol_type = unassigned DNA
gcatctgcgcaggcgcccggctcctaagtctacccaggaactgaccctgctctctcctttccctgttagacatgggcactccacagaaggatgttattatcaagtcagatgcaccggacactttgttattggagaaacatgcagattatatcgcatcctatggctcaaagaaagatgattatgaatactgtatgtctgagtatttgagaatgagtggcatctattggggtctgacagtaatggatctcatgggacaacttcatcgcatgaatagagaagagattctggcatttattaagtcttgccaacatgaatgtggtggaataagtgctagtatcggacatgatcctcatcttttatacactcttagtgctgtccagattcttacgctgtatgacagtattaatgttattgacgtaaataaagttgtggaatatgttaaaggtctacagaaagaagatggttcttttgctggagatatttggggagaaattgacacaagattctctttttgtgcggtggcaactttggctttgttggggaagcttgatgctattaatgtggaaaaggcaatcgaatttgttttatcctgtatgaactttgacggtggatttggttgcagaccaggttctgaatcccatgctgggcagatctattgttgcacaggatttctggcaattacaagtcagttgcatcaagtaaattctgatttacttggctggtggctttgtgaacgacaattaccctcaggcgggctcaatggaaggccggagaagttaccagatgtatgctactcatggtgggtcctggcttccctaaagataattggaagacttcattggattgatagagagaaactgcgtaatttcattttagcatgtcaagatgaagaaacggggggatttgcagacaggccaggagatatgcattttatatatcagaattacccaaagaaggagttgtcttcaaataaggaaacactaacggaatctctgttgcccaggctggagcgcagcagcacgatctcagcttaa

SEQ ID NO: 25154 - DNA, 512 bp, Homo sapiens
  source 1..512: mol_type = unassigned DNA
tacccaggaactgaccctgctctctcctttccctgttagacatgggcactccacagaaggatgttattatcaagtcagatgcaccggacactttgttattggagaaacatgcagattatatcgcatcctatggctcaaagaaagatgattatgaatactgtatgtctgagtatttgagaatgagtggcatctattggggtctgacagtaatggatctcatgggacaacttcatcgcatgaatagagaagagattctggcatttattaagtcttgccaacatgaatgtggtggaataagtgctagtatcggacatgatcctcatcttttatacactcttagtgctgtccagattcttacgctgtatgacagtattaatgttattgacgtaaataaagttgtggaatatgttaaaggtctacagaaagaagatggttcttttgctggagatatttggggtaatgtcagatttagtccattctacccaaaataccaatattaaaatgtactggtt

SEQ ID NO: 25155 - DNA, 1284 bp, Homo sapiens
  source 1..1284: mol_type = unassigned DNA
gagaggcgcatctgcgcaggcgcccggctcctaagtctacccaggaactgaccctgctctctcctttccctgttagacatgggcactccacagaaggatgttattatcaagtcagatgcaccggacactttgttattggagaaacatgcagattatatcgcatcctatggctcaaagaaagatgattatgaatactgtatgtctgagtatttgagaatgagtggcatctattggggtctgacagtaatggatctcatgggacaacttcatcgcatgaatagagaagagattctggcatttattaagtcttgccaacatgaatgtggtggaataagtgctagtatcggacatgatcctcatcttttatacactcttagtgctgtccagattcttacgctgtatgacagtattaatgttattgacgtaaataaagttgtggaatatgttaaaggtctacagaaagaagatggttcttttgctggagatatttggggtcccactaagcagctggtctaactggagttaatggtctgctggaacttccagcatgcactgtggtagttatatcagcatatacaggagcactggaacagagggggccagtctaaaagataagggatgaacacagtgcaggccagagagaccagctgcttcatgggatgtgaaaaatctacttttataaagtagggagaaattgacacaagattctctttttgtgcggtggcaactttggctttgttggggaagcttgatgctattaatgtggaaaaggcaatcgaatttgttttatcctgtatgaactttgacggtggatttggttgcagaccaggttctgaatcccatgctgggcagatctattgttgcacaggatttctggcaattacaagtcagttgcatcaagtaaattctgatttacttggctggtggctttgtgaacgacaattaccctcaggcgggctcaatggaaggccggagaagttaccagatgtatgctactcatggtgggtcctggcttccctaaagataattggaagacttcattggattgatagagagaaactgcgtaatttcattttagcatgtcaagatgaagaaacggggggatttgcagacaggccaggagatatggtggatccttttcataccttatttggaattgctggattgtcacttttgggagaagaacagattaaacctgttaatcctgtcttttgcatgcctgaagaagtgcttcagagagtgaatgttcagcctgagctagtgagctagattcattgaattgaa

SEQ ID NO: 25156 - DNA, 3705 bp, Homo sapiens
  source 1..3705: mol_type = unassigned DNA
agacctacccgggcgaagcgggcgagcggtggtttggacgccggcggagacgcgggcgagtggttagcaggaagaagatgagccttaagtctgaacgccgaggaattcatgtggatcaatcggatctcctgtgcaagaaaggatgtggttactacggcaaccctgcctggcagggtttctgctccaagtgctggagggaagagtaccacaaagccaggcagaagcagattcaggaggactgggagctggcggagcgactccagcgggaggaagaagaggcctttgccagcagtcagagcagccaaggggcccaatccctcacattctccaagtttgaagaaaagaaaaccaacgagaagacccgcaaggttaccacagtgaagaaattcttcagtgcatcttccagggtcggatcaaagaaggaaattcaggaagcaaaagctcccagtccttccataaaccggcaaaccagcattgaaacggatagagtgtctaaggagttcatagaatttctcaagaccttccacaagacaggccaagaaatctataaacagaccaagctgtttttggaaggaatgcattacaaaagggatctaagcattgaagaacagtcagagtgtgctcaggatttctaccacaatgtggccgaaaggatgcaaactcgtgggaaagtgcctccagaaagagtcgagaagataatggatcagattgaaaagtacatcatgactcgtctctataaatatgtattctgtccagaaactactgatgatgagaagaaagatcttgccattcaaaagagaatcagagccctgcgctgggttacgcctcagatgctgtgtgtccctgttaatgaagacatcccagaagtgtctgatatggtggtgaaggcgatcacagatatcattgaaatggattccaagcgtgtgcctcgagacaagctggcctgcatcaccaagtgcagcaagcacatcttcaatgccatcaagatcaccaagaatgagccggcgtcagcggatgacttcctccccaccctcatctacattgttttgaagggcaaccccccacgccttcagtctaatatccagtatatcacgcgcttctgcaatccaagccgactgatgactggagaggatggctactatttcaccaatctgtgctgtgctgtggctttcattgagaagctagacgcccagtctttgaatctaagtcaggaggattttgatcgctacatgtctggccagacctctcccaggaagcaagaagctgagagttggtctcctgatgcttgcttaggcgtcaagcaaatgtataagaacttggatctcttgtctcagttgaatgaacgacaagaaaggatcatgaatgaagccaagaaactggaaaaagacctcatagattggacagatggaattgcaagagaagttcaagacatcgttgagaaatacccactggaaattaagcctccgaatcaaccgttagcagctattgactctgaaaacgttgaaaatgataaacttcctccaccactgcaacctcaagtttatgcaggatgatcacaatttagtggagagtatttatttgagcctaaattgtaggtagcccttactacactcaactgattgggatctagaatgtaactaaattgcttataaatgtcagcattttttaaaggtacagtatatggggattgtttcgtttttcctagcaggggaaccttagttaataataaaatactacttatttgagttactgatacagattcatttaaggcttgtgtgcaaattttgtctcaatcttttttccctccatgattttcctatgtgcttcctctggcattcactgtggttttggtaaataattgccttttaaaggattaaacaaatgaatgctacaaagtgtatgttcaagaaaattaaatggtaccactcttccacagtttggaataattttataattgtaaagatagaaattatattgataagtaaatatgtaaaattgtaaatatgtaaaaaaaagaatggtgtctgctgtgcatggcattttatatgttaattttttagtttaaaatgaagtatattgaatgtttgcctttagcaccattttatttggtttgtcccactaaaatgactcgagaagtgtttagacaaactccccttaagatgtgcactccatctttaagaacgtgttagccttaactttgaggttctatatagtcagagactatgacaccactaaggttcagaataaagtttaggccacataaaattgctgtttaatgtagtcgatggaagactttaaactatgcttctagcttatttttccctcattcattcagcaaatctctattgagttcttcagtgagaaggagcaggcactgggcctggaatggaaggcgggaatgaatgggcctctgatggtgagaggtgacggggtccctcagctgtgagatgcaaggggcgccttgcagcctccataatatacatttgactttgcaaacgtctagacatgttttctgaacctttttcaggacatttcaacctcgggactattcatattagtggcctgagaggtgtttgttgtggggccaccctgtgcatggtagaatgttcagcagcattcctgccatccatatccattaggtgccagtagcacccccgctagagctgtgaaaaattctctccagacatagtcagatgtctcctggggccatatcacccctccgttaagaaccactgatgtcttttacaaaccaggagttatcctcctggtggttaatatggtgtaaccaaagaatcttgcactcaatgcacagtgtgatgttaactaaaacgagttaaatatttaggaggcttgacagctacctgcattgtagaaccttttcttatctcagtggaaccttctataacctaaatataccattgatgattcttcttccattcagtgacatccacagattatgcagctatacttgtgaaatcgtgcatgaggccccagggcaccgttctagaacaacgtcacttcacacaggcagctgagaaaggttctcttgcttttccagtatcttcctaaggatggagcccaaaattgcagagcagtaactttggaataaaaccagggtgggtataaaacttcttattcttaaatttacatataagatctattaagcttgacacatctgtgtcatcacgcactgaagacaggaagcagttcactgagtcagctggttcccaagctcgcacagaaggtgataagttactatcaaatgccagtgagaatcttcttatagaataacctgggcccaagtgattttagtacaaaacttgcccttctttggtttaattttctatgtgcttttaggtgtgaatccagatatgcggtcttaattcctttggaaatacacagttcgtttagttactgtacactctgtttgttcaataaactgcatatcaacttcccacaaaagctgacttttttgggtctcttacatataaagtaggttattgagttgatttttttggaggtatctcatattggtcgaattcttctggtatggactcttgccttatatagaggcttctatttctcttaagtcagcatcaatacaacggccggagtttctgtttttgcaataagaagatgttggtattttatgtagggtaaatgtgactggaatacacctttggaacggaattctttatcaataaa

SEQ ID NO: 25157 - DNA, 1966 bp, Homo sapiens
  source 1..1966: mol_type = unassigned DNA
ccaagctaacgtttggacaaataatgttttgttatatttaacattaaaactctgacattgacattcacattcattttggaagcattatatttaatcatatgaaagttggtgaaccttggattacagattgcaaatgctaataagtcttttattagaatgatggcgtcttcataccatgaagtggttagcaggaagaagatgagccttaagtctgaacgccgaggaattcatgtggatcaatcggatctcctgtgcaagaaaggatgtggttactacggcaaccctgcctggcagggtttctgctccaagtgctggagggaagagtaccacaaagccaggcagaagcagattcaggaggactgggagctggcggagcgactccagcgggaggaagaagaggcctttgccagcagtcagagcagccaaggggcccaatccctcacattctccaagtttgaagaaaagaaaaccaacgagaagacccgcaaggttaccacagtgaagaaattcttcagtgcatcttccagggtcggatcaaagaaggaaattcaggaagcaaaagctcccagtccttccataaaccggcaaaccagcattgaaacggatagagtgtctaaggagttcatagaatttctcaagaccttccacaagacaggccaagaaatctataaacagaccaagctgtttttggaaggaatgcattacaaaagggatctaagcattgaagaacagtcagagtgtgctcaggatttctaccacaatgtggccgaaaggatgcaaactcgtgggaaagtgcctccagaaagagtcgagaagataatggatcagattgaaaagtacatcatgactcgtctctataaatatgtattctgtccagaaactactgatgatgagaagaaagatcttgccattcaaaagagaatcagagccctgcgctgggttacgcctcagatgctgtgtgtccctgttaatgaagacatcccagaagtgtctgatatggtggtgaaggcgatcacagatatcattgaaatggattccaagcgtgtgcctcgagacaagctggcctgcatcaccaagtgcagcaagcacatcttcaatgccatcaagatcaccaagaatgagccggcgtcagcggatgacttcctccccaccctcatctacattgttttgaagggcaaccccccacgccttcagtctaatatccagtatatcacgcgcttctgcaatccaagccgactgatgactggagaggatggctactatttcaccaatctgtgctgtgctgtggctttcattgagaagctagacgcccagtctttgaatctaagtcaggaggattttgatcgctacatgtctggccagacctctcccaggaagcaagaagctgagagttggtctcctgatgcttgcttaggcgtcaagcaaatgtataagaacttggatctcttgtctcagttgaatgaacgacaagaaaggatcatgaatgaagccaagaaactggaaaaagacctcatagattggacagatggaattgcaagagaagttcaagacatcgttgagaaatacccactggaaattaagcctccgaatcaaccgttagcagctattgactctgaaaacgttgaaaatgataaacttcctccaccactgcaacctcaagtttatgcaggatgatcacaatttagtggagagtatttatttgagcctaaattgtaggtagcccttactacactcaactgattgggatctagaatgtaactaaattgcttataaatgtcagcattttttaaaggtacagtatatggggattgtttcgtttttcctagcaggggaaccttagttaataataaaatactacttatttgagttactgatacagattcatttaaggcttgtgtgcaaattttgtctcaatcttttttccctccatgattttcctatgtgcttcctctggcattcactgtgg

SEQ ID NO: 25158 - DNA, 553 bp, Homo sapiens
  source 1..553: mol_type = unassigned DNA
agacctacccgggcgaagcgggcgagcggtggtttggacgccggcggagacgcgggcgagaaaactgtggatttagttactccactctgccatgtctttccaccactgcctgcacatttgagaccaaggatagagattgggaaaaattgatagttctcctgcctcagagtttggctcctgcactctcatttcagccatagctgcagacaaagcacacgattgctgggcactgtggctcaagagaaggaggagatgtttgtttatatggagaagaatgaagaccatgtggtttcagtttgaacggaaattgttgcatagcgatttaccatacagctgtgagactgaacaaatgagtttaaatattatacagtagaaaagaaaactgactttggaacttaagtggttagcaggaagaagatgagccttaagtctgaacgccgaggaattcatgtggatcaatcggatctcctgtgcaagaaaggatgtggttactacggcaaccctgcctggcagggtttctgctccaagtgctggagggaagagtaccacaaag

SEQ ID NO: 25159 - DNA, 1902 bp, Homo sapiens; identical to SEQ ID NO: 23113
  source 1..1902: mol_type = unassigned DNA

SEQ ID NO: 25160 - DNA, 2430 bp, Homo sapiens
  source 1..2430: mol_type = unassigned DNA
cgcagccgtggctgaggagcctgtggcggcagcggcgatggaaccagcggagcagccgagcgagttagtgtcagccgagggccgaaaccggaaggcggtgctgtgccagcgttgcggctcccgggtgctgcagccagggaccgctctcttctctcgccgacagcttttccttccctccatgagaaagaagccagctctgtctgacggcagcaatcctgacggcgatctcctccaggaacactggctggttgaggacatgttcatttttgagaatgtgggcttcaccaaggacgtgggcaacatcaagtttctggtctgcgcagactgtgaaattggaccaattggctggcattgcctagatgacaagaacagtttctatgtggccttggaacgagtttcccatgagtaactgaggggaggggtactcagctccatctccaaagataaacctactccccacaagaactggcctttaatgtggtataactgttccgctgccttcttgtctgtgctaatataaatactgagtaccagcatgtccatttgaacatgcagagggttaatcctgcttcctaaagcctcaagtacatgcctcctgcttagttcactttgtatcacatttcctaagctcccttttcccccagttttgggacactgtgcttacctccaaaaatctcatctcttccctggcattctccctaggctctgttttgcccaggggctcccgctttttcttgctctagaagagcagtattcaaccttttagctatgatgacacataacaaaagatgcttatgtactaatagttgaaatctgcctttttctcattcaagaaggcatacaaatatctgagagtgactttgttgtatggctacccttgtgatctacagtaatttattctttctaaaggtaaagcattttcaaaactcagtatttaaaccactaaccagaaacattactttggatgcatctctaataccatgtttgagcacctctgctctaggttgagaatgacattttattgtgaagatgggtgtggtccctcttcccttgaaatcttgtagtttctttttatattagctcctcactgctacagcctagaaggtgagaagcagattttaaccccatctggcagccattcaaggaaaacccagccctggctgtttactcaggctctcttagaatgagagtggagggtgtaggatatgagggttaggcctttgccacattatacaaaagtttataatttgccacatctggacaagtaactttcttcttttgttcataggcaagacttctttaatggatagtatcatttactgaacctactgggcatggtcctcatggagttttggttcaactggaatctctgtgccaacccaggatacaaacttccatccagatgcatggatacaaatttccatagctccggggctgctctaacagtttgatatcagcagacgtgtttaagccttcaacttgatttccaattattccatcatttctattctgaaatgactcactgtcgtagaaggaagtttattatataaccaaggtttcaggtatcctcctgtcaccacctctactattcaggaggcctaaaattgaaataagtactaaacagaaaccttaccatctgaagtcccttccattgttttctagttgcttcctcattcctttacccccaaactttctaagggctccccgactgcagtgcaaggtggccttgggcacagttttgcaaccaacctactcccctggaaagatggcttccttctccaattagcctgaatgagctttagtaagcaattgagagaactgtgtttttccgacaaacggtcacatgtccatcgttatggcatgtgcagaaaaacagagttatccacacaagtcaggagcaaaacccaagtagatgcctctaggggcacatggcccctcacatcacaagccagaacctaagctaagcattttttaaattgagtttgagactagcctgggcaacatagtgagaccccatctctatttaaaaaatgaacaaaattacctgggcatagtggtgtatacctgtagtccctgctacttgggaggctcaggtgggaggatcacttgagccccaaagatggtggctgcagtaagccaagatcacaccactggcactccagcctgggcaacagagtgagaccctgtctcaaacaaacaacaacagtaacaacaaaaaaatatatagcgacttgaataggaaaccatagtatttcattgttttaatttgcatttattttatttctagtgaaacttttatatacgtatcggtcatttctatttccttttttgagaactgccaaatgttgccctagtagccaaaaatatcaggttgctattctgccttttcagtttgatctgaaagaaataaaggcatttaagcaatggaaa

SEQ ID NO: 25161 - DNA, 1752 bp, Homo sapiens
  source 1..1752: mol_type = unassigned DNA
agctcttggacgcctggctggaagttggctgtcttgtttcctgtgaccttgggggtggaaaggacagagcccaggcgacctagggcactatctccctaccccacgccttctcccttcctcgttcctccctacccttatcgcttctaccccgcccacaccgccctaaacggcttcctggggcggaactgtttcgcttttccccgtcccagtggagggtggggtgggggggtcgcagccctaagcctctgggagacatggagcccaggagggcggcgcccggggtgcctggctgggggtctcgggaggccgcggggtcggcatcggccgcggagcttgtgtaccatctagccggggccctgggcactgagctgcaggatctggcgcgccgtttcgggccggaggcggcggccgggctggtgccgctagtggtgcgggcgctggagctcttggaacaggctgccgtggggcccgccccggactcgctgcaggtgtcggcgcagccggcggagcaggagctgcggcggctgcgggaggagaacgagcgcctccgcagggagctgcgcgcggggccacaggaggagcgcgcgctgctgcggcagctcaaggaggtcacggaccgacagcgggacgaactccgggcgcacaaccgcgacctgcggcagcgcggccaggagaccgaggcgttgcaggagcagctgcagcgcctcctgctggtgaacgctgagctgcggcacaagctggcggccatgcagacccagctgcgcgccgcgcaggaccgcgagagggagcgccagcagcctggcgaagccgcgactccgcaggctaaagagcgagcgcgggggcaggccgggcggcccgggcaccagcacggacaggagcccgaatgggcgaccgccggcgcaggcgccccagggaaccctgaggacccggcggaggccgcgcagcagctcgggcgcccctcggaggcagggcagtgccgcttcagtcgggaggagtttgagcagatccttcaggagcggaatgaactcaaagccaaagtgttcctgctcaaggaggaactggcctacttccagcgggagctgctcacagaccaccgggtccccggccttctgctcgaggccatgaaggtggctgtccggaagcagcggaagaagatcaaggccaagatgttagggacaccagaggaagcagagagcagtgaggatgaggctggcccatggatcctgctctccgatgacaagggagaccatcccccacccccggagtccaaaatacagagtttctttggcctatggtatcggggtaaagctgaatcctctgaggatgagaccagcagccctgcacccagcaagctagggggagaagaggaggcccaaccacagtctccagctcctgatccgccctgttctgccctccacgaacacctttgtctgggggcctcagccgccccagaggcctgacttaggggtctggctgtggaaggatgtgtggcctcaaatgaggacagggctcccgccttcacagccctcgccaggggtctgccccaatcctggcctgcatcagggcaggacggggtctcagcccgcctccctctctacgtctctgtaccgagcctctggggccagatataagagtgcctctctgagtctcagtttccccatccatgaaatgagagctgactgcctagctcccagggctttgtgcagacggcctgagctcatgtaataaagaactgcccgtaatacacagaaa

SEQ ID NO: 25162 - DNA, 2608 bp, Homo sapiens
  source 1..2608: mol_type = unassigned DNA
ctcgggagcagctccgggccgagccgggcgcccagaccccgggcccgcacaccccgcgccgccgcccgtgcccgcgcccgcgcccgccgcccgctgcccgctgcgccctcgccccagcgcccgctgagcgcgcccgcccgcggcccaggctgggcccggccggcccggccctcgacagcggcaagtttgggagttgcacgagtttgcggggcgggggacaggccaggagggtggccatggaggaggagcgggggtcggcgctggcggccgagtcggcgctggagaagaacgtggccgagctgaccgtcatggacgtgtacgacatcgcgtcgcttgtgggccacgagttcgagcgggtcattgaccagcacggctgcgaggccatcgcgcgcctcatgcccaaggtcgtgcgcgtcctggagatcctggaggtgctggtcagccgccaccacgtcgcgcccgagctggacgagctgcgcctggagctggaccgcctgcgcctggagaggatggaccgcatcgagaaggagcgcaagcaccagaaggagctggagctggtggaggatgtgtggcgaggggaggcgcaggacctcctctcccagatcgcccagctgcaggaggagaacaagcagctcatgaccaacctctcccacaaggatgtcaatttctcagaggaggagttccagaagcatgaaggcatgtcagagcgggagcgacaggtgatgaagaagctgaaggaggtggtggacaaacaacgcgacgagatccgcgccaaggacagggagctgggcctgaaaaatgaggacgttgaggctttacagcagcagcagacacggctgatgaagatcaaccatgaccttcggcaccgggtcacggtggtggaggcccaggggaaagccctgatcgaacagaaggtggagctggaggcagacctgcagaccaaggagcaggagatgggcagcctgcgagcagagctggggaagttgcgagagaggctgcagggggagcacagccagaatggggaggaggagcctgagacggagccggtgggagaggagagcatctccgacgcagagaaggtggccatggatctcaaggaccccaaccgcccccggttcaccctgcaggagctgcgggacgtgctgcacgagaggaacgagctcaagtccaaggtgttcttgctgcaggaggagctggcttactataagagtgaagaaatggaagaggaaaaccgaataccccaacccccacccatcgcccacccgaggacgtccccccagccggagtcgggcatcaagcgactgtttagcttcttctcccgagataagaagcgcctggccaacacacagagaaacgtgcacatccaggagtcctttggacagtgggcaaacacccaccgcgatgacggttacacagagcaaggacaggaagccctgcagcatctgtgaccttggcccatctccaccctccaacctggactgcccgccaccagcgcctgcaaccgaactgcagcccaggggtcattgctgcctcaagcctctcggtgcagatgcaccctgaaaactgacccctcaaacagactgtctgatttgaggatggacattgaaaaactgacgccaaactctaaagaaatgtttatttatacccagggctatcactgtttctaatagatgactctgatcccgtaggatatatatttaataatcccacaaacggaggccagacttctgcgttaacttcagtaacacaagcttctttaagccaaatacatcacttgccactatcattgctgtttgacttgctttgtataaaatgctatgtgtagaggttttattatcacaggtgacatagttcagcaggaggcatggaagggctagatcttcattagttacattcatgaaattgtgatggtaacgtattatacagaatgtatccatcaggcagacaaggggtctgaagtcacaggctcagtagcccaactcagacacaaagccacagacaatatggatgatggtcctcttacccagaaactggagacaactttgcaggcaccctggctgcgttcctgataatgcctagagcatgtagcaatgttcaaggcaggtgccttggaatctgctgtgagttatgcagtactaaccaaacaaagttgctaaggatgagatgttgcaacatttcttgtgtgcacttttttttcctgacatctttttttccttttaggattcattaagtcatatacttagtcccctgcaaagaagaagacagatgtcccagagcagactgaaagcggggcgtgggatcctaggcaatgcaggagggcaggtgggggagctgtagcagaacaagggtgctaggtgggaagctggcttggggaccacacgtctggctgactcacagggctatagcagcagacagagagccagatgctctactgcaactggtgagttggaggcttgcccacataacactgtctttctctccacccgccaagcatccagggcacagggctggttgctcacagattgagcgaggtagcacctcctaccagcactcaagtttatcagggccgcgttctaaacattctactgaagtttgctaagaaaccatt

SEQ ID NO: 25163 - DNA, 1435 bp, Homo sapiens
  source 1..1435: mol_type = unassigned DNA
ctgaacttccccgttcctcttctcggctgcctccttttccgttgtcccttcgcgccccaaaccacatcctggagcgcactctccagcgtggctggcagcggggacggtgcgccggggcgcaggcccaagagtcgcgtgcgcggccccttgcaccatccccccgggcccacccccgggccgcgctgattgggcaggtagggactctgcccagcggaaagttttgggtgccgggaggaagtctaacctttgggagactccaagacagcagctccgaggtcggcgggggtctgggtggccatggaggagccccctgtgcgagaagaggaagaggaggagggagaggaggacgaggagagggacgaggttgggcccgagggggcgctgggcaagagccccttccagctgaccgccgaggacgtgtatgacatctcctacctgttgggccgcgagcttatggccctgggcagcgacccccgggtgacgcagctgcagttcaaagtcgtccgcgtcctggagatgctggaggcgctggtgaatgagggcagcctggcgctggaggagctgaagatggagagggaccacctcaggaaggaggtggaggggctgcggagacagagccctccggccagcggggaggtgaacctgggcccaaacaaaatggtggttgacctgacagatcccaaccgaccccgcttcactctgcaggagctaagggatgtgctgcaggaacgcaacaaactcaagtcgcagctcctggtggtgcaggaagagctgcagtgctacaagagtggcctgattccaccaagagaaggcccaggaggaagaagagaaaaagatgctgtggttactagtgccaaaaatgctggcaggaacaaggaggagaagacaatcataaaaaagctgttcttttttcgatcggggaaacagacctagatccaaggccacaagtaaggctatggctctgattctagaagacaaccttccaagatgcctggcaaaaccacctccctgtgccacacagacacactaggcctgtgtatttatttccccttcaaagcagactgaggagggaggagacgaggttctcttggcatcactttctccctggctgcagaactagacacccttgaagatttggcctgggccagtgagactgaaatcaagaaaaacagaagggatgtgcagggtgggggggtccacttcctgctcccatgtcaacccccagggcctccagcgtgcagacgcgtgtcctactcatctgctcccacggatgaccctggtcttcaatggttagcagaagggagaaaagaaagcaggaaaatgtgctattgagattccagtggtgacttcactgatatttagtgaatatttgatttagccaacatgcctttctttatgtgattttgtattaaagtaaaatgatttttatactttc

SEQ ID NO: 25164 - DNA, 2341 bp, Homo sapiens
  source 1..2341: mol_type = unassigned DNA
cgagccggaagtggagtgcgctgcggcgcgagctgggccggcgggcgtggttcgagagcgcgcagagtccagactggcggcagggcccgaggggccgacccgcagcgtccctggtctctccagccctcactcggaaccgcacggtacaggtgaaagggggcagacccctcatcatgctttccaggcatctgccacttcccaggaattgtctccctggataaacaaggcgaagtccctggctgtgcagaagcagtagctgtgtggtggcacagtcaggaaaactcgggggccctgttgacagtgacaataccctcccctcccttgggctggacccctctctacagctaggagccaatggcagaagacaaaaccaaaccgagtgagttggaccaagggaagtatgatgctgatgacaacgtgaagatcatctgcctgggagacagcgcagtgggcaaatccaaactcatggagagatttctcatggatggctttcagccacagcagctgtccacgtacgccctgaccctgtacaagcacacagccacggtagatggaaggaccatccttgtggacttttgggacacggcaggccaggagcggttccagagcatgcatgcctcctactaccacaaggcccacgcctgcatcatggtgtttgatgtacagaggaaagtcacctataggaacctgagcacctggtatacagagcttcgggagttcaggccagagatcccatgcatcgtggtggccaataaaattgatgacataaacgtgacccaaaaaagcttcaattttgccaagaagttctccctgcccctgtatttcgtctcggctgctgatggtaccaatgttgtgaaggtgtggttgactgcagaggtagctagcaagctcttcaatgatgcaattcgattagctgtgtcttacaaacagaactcccaggacttcatggatgagatttttcaggagctcgagaacttcagcttggagcaggaagaggaggacgtgccagaccaggaacagagcagcagcatcgagaccccatcagaggaggcggcctctccccacagctgaggggctggggctaggggtgggtggagcccttttaaaatacccttcccttcaacaactctccagctctgaatggagaaactctctaggccatcccctcttctacctcctgcaacccacccatcctattagcctcccacattctaggcccgtgatacagggatgaggtcagcaccagcaaactctggactggtggaagaattccccaccagatctccttgaagcagaagtagggatcagcatcattaacaccttccccaccccctccccgcaggcagacagtgaagagaatcagaaaacatgattatgtgtcactttaatacaggaaatttaggtgttttttggtgtttttgtttttgtttttgttttctttccaaagctcacctcggggacaattccttgggcttctcctgaggtaatgatttacccccccacccacagctgagtctgtgaggccccatcctttccctacgttttctcccatcttttttcctcttcagtctcccagtcatctggtttgtttgtttctttgttcgttctgagacggagtctcgctctgtcgccaggctggagtgcagtggcgcagtctcggctcgctgcaacctctgactccctggttcaaacgattctcctgcctcagcctcccgagtggctggcatcaccacgcccagctaatttttgtatttttagtagagacggggtttcaccatgttgcccaggatggtctcgatctcctcacctcgtgatccgcccgcctcggcctcccaaagtgctgggattacaggcatgagccaccgcgcccggccccaatcatctgtttttaaacaatcgtttttgagcagatagctattcattccagattttcgtgtacccattctgtttcaggagctcttctaggtaaagctgagatcacaggaacagcaggtgacaggcctagctatagttaggaatacacaagccgtaaaatcgagtccttacagccataccacaaggtacgtccatttggactacaagaagagcttcctttaaagttcctatttcagcataaagaggctgtccttttttttgaggaatagtttggaccttgtgcctcctgtgggaggctgaggactgcaagaggagagctagcagatatgcctgttcacccctctctggtacttgtggcttgctagtatgtttttatgataatctcgggcattgtttgcattgtgtttattaatagggttttgtttttgttgtttccttttttacagtaaaggctgaattacataaa

SEQ ID NO: 25165 - DNA, 623 bp, Homo sapiens
  source 1..623: mol_type = unassigned DNA
actcggaaccgcactgacaataccctcccctcccttgggctggacccctctctacagctaggagccaatggcagaagacaaaaccaaaccgagtgagttggaccaagggaagtatgatgctgatgacaacgtgaagatcatctgcctgggagacagcgcagtgggcaaatccaaactcatggagagatttctcatggatggctttcagccacagcagctgtccacgtacgccctgaccctgtacaagcacacagccacggtagatggcaagaccatccttgtggcagacataaacgtgacccaaaaaagcttcaattttgccaagaagttctccctgcccctgtatttcgtctcggctgctgatggtaccaatgttgtgaagctcttcaatgatgcaattcgattagctgtgtcttacaaacagaactcccaggacttcatggatgagatttttcaggagctcgagaacttcagcttggagcaggaagaggaggacgtgccagaccaggaacagagcagcagcatcgagaccccatcagaggaggtggcctctccccacagctgaggggctggggctaggggaatagtttggaccttgtgcctcctgtgggaggctgaggact

SEQ ID NO: 25166 - DNA, 1118 bp, Homo sapiens
  source 1..1118: mol_type = unassigned DNA
ctgcgaggacgcggggcgagccggaagtggagtgcgctgcggtgcgagctgggccggcggggtggttcgagagcgcgcagagtccagactggcggcagggcccgaggggccgacccgcagcgtccctggtctctccagccctcactcggaaccgcactgacaataccctcccctcccttgggctggacccctctctacagctaggagccaatggcagaagacaaaaccaaaccgagtgagttggaccaagggaagtatgatgctgatgacaacgtgaagatcatctgcctgggagacagcgcagtgggcaaatccaaactcatggagagatttctcatggatggctttcagccacagcagctgtccacgtacgccctgaccctgtacaagcacacagccacggtagatggcaagaccatccttgtggacttttgggacacggcaggccaggagcggttccagagcatgcatgcctcctactaccacaaggcccatgcctgcatcatggtgtttgatatacagaggaaagtcacctataggaacctgagcacctggtatacagagcttcgggagttcaggccagagatcccatgcatcgtggtggccaataaaattgatgcagacataaacgtgacccaaaaaagcttcaattttgccaagaagttctccctgcccctgtatttcgtctcggctgctgatggtaccaatgttgtgaagctcttcaatgatgcaattcgattagctgtgtcttacaaacagaactcccaggacttcatggatgagatttttcaggagctcgagaacttcagcttggagcaggaagaggaggacgtgccagaccaggaacagagcagcagcatcgagaccccatcagaggaggtggcctctccccacagctgaggggctggggctaggggaatagtttggaccttgtgcctcctgtgggaggctgaggactgcaagaggagagctagcagatatgcctgttcacccctctctggtacttgtggcttgctagtatgtttttatgataatctcgggcattgtttgcattgtgtttattaatagggttttgtttttattgtttccttttttacagtaaaggctgaatgacataa

SEQ ID NO: 25167 - DNA, 1052 bp, Homo sapiens
  source 1..1052: mol_type = unassigned DNA
ggttcgagagcgcgcagagtccagactggcggcagggcccgaggggccgacccgcagcgtccctggtctctccagccctcactcggaaccgcactgacaataccctcccctcccttgggctggacccctctctacagctaggagccaatggcagaagacaaaaccaaaccgagtgagttggaccaagggaagtatgatgctgatgacaacgtgaagatcatctgcctgggagacagcgcagtgggcaaatccaaactcatggagagatttctcatggatggctttcagccacagcagctgtccacgtacgccctgaccctgtacaagcacacagccacggtagatggcaagaccatccttgtggacttttgggacacggcaggccaggagcggttccagagcatgcatgcctcctactaccacaaggcccatgcctgcatcatggtgtttgatatacagaggaaagtcacctataggaacctgagcacctggtatacagagcttcgggagttcaggccagagatcccatgcatcgtggtggccaataaaattgatgacataaacgtgacccaaaaaagcttcaattttgccaagaagttctccctgcccctgtatttcgtctcggctgctgatggtaccaatgttgtgaagctcttcaatgatgcaattcgattagctgtgtcttacaaacagaactcccaggacttcatggatgagatttttcaggagctcgagaacttcagcttggagcaggaagaggaggacgtgccagaccaggaacagagcagcagcatcgagaccccatcagaggaggtggcctctccccacagctgaggggctggggctaggggaatagtttggaccttgtgcctcctgtgggaggctgaggactgcaagaggagagctagcagatatgcctgttcacccctctctggtacttgtggcttgctagtatgtttttatgataatctcgggcattgtttgcattgtgtttattaatagggttttgtttttattgtttccttttttacagtaaaggctgaatgacataa

SEQ ID NO: 25168 - DNA, 2179 bp, Homo sapiens
  source 1..2179: mol_type = unassigned DNA
gcggttgcgtagcagctgcgaggacgcggggcgagccggaagtggagtgcgctgcggtgcgagctgggccggcggggtggttcgagagcgcgcagagtccagactggcggcagggcccgaggggccgacccgcagcgtccctggtctctccagccctcactcggaaccgcactgacaataccctcccctcccttgggctggacccctctctacagctaggagccaatggcagaagacaaaaccaaaccgagtgagttggaccaagggaagtatgatgctgatgacaacgtgaagatcatctgcctgggagacagcgcagtgggcaaatccaaactcatggagagatttctcatggatggctttcagccacagcagctgtccacgtacgccctgaccctgtacaagcacacagccacggtagatggcaagaccatccttgtggacttttgggacacggcaggccaggagcggttccagagcatgcatgcctcctactaccacaaggcccatgcctgcatcatggtgtttgatatacagaggaaagtcacctataggaacctgagcacctggtatacagagcttcgggagttcaggccagagatcccatgcatcgtggtggccaataaaattgatgacataaacgtgacccaaaaaagcttcaattttgccaagaagttctccctgcccctgtatttcgtctcggctgctgatggtaccaatgttgtgaagctcttcaatgatgcaattcgattagctgtgtcttacaaacagaactcccaggacttcatggatgagatttttcaggagctcgagaacttcagcttggagcaggaagaggaggacgtgccagaccaggaacagagcagcagcatcgagaccccatcagaggaggtggcctctccccacagctgaggggctggggctaggggtgggtggagcccttttaaaatacccttcccttcaacaactctccagctctgaatggagaaactctctaggccatcccctcttctacctcctgcaacccacccatcctattagcctcccacattcaaggcccgtgatacagggatgaggtcagcaccagcaaactctggactggtggaagaattccccaccagatctccttgaagcagaattagggatcagcatcattaacaccttccccaccccctccccccaggcagacagtgaagagaatcagaaaacatgattatgtgtcactttaatacaggaaatttaggtgttttttggtgtttttgtttttgttttctttccaaagctcacctcggggacaattccttgggcttctcctgaggtaatgattacccccccacccacagctgagtctgtgaggccccatcctttccctacgttttctcccatcttttttcctcttcaatctcccagtcatctggtttgtttgtttctttgttcgtcctgagacggagtctcgctctgtcgccaggctggagtgcagtggcgcagtctcggctcgctgcaacctctgactccctggttcaaacgattctcctgcctcagcctcccgagtggctggcatcaccacgcccagctaatttttgtatttttagtagagacggggtttcaccatgttgcccaggatggtctcgatctcctcacctcgtgatccgcccgcctcggcctcccaaagtgctgggattacaggcatgagccaccgcgcccggccccaatcatctgtttttaaacaatcgtttttgagcagatagctattcattccagatttccgtgtacccactctgtttcaggagctcttctaggtaaagctgagatcacaggaacagcaggtgacaggcctagctatagttaggaatacacaagcggtaaaatcgagtccttacagccataccacaaggtacgtccatttggactacaagaagagcttcctttaaagttcctatttcagcataaagaggctgtcctttttttttaggaatagtttggaccttgtgcctcctgtgggaggctgaggactgcaagaggagagctagcagatatgcctgttcacccctctctggtacttgtggcttgctagtatgtttttatgataatctcgggcattgtttgcattgtgtttattaatagggttttgtttttattgtttccttttttacagtaaaggctgaatgacataaacatt

SEQ ID NO: 25169 - DNA, 2282 bp, Homo sapiens
  source 1..2282: mol_type = unassigned DNA
cgagagcgcgcagagtccagactggcggcagggcccgaggggccgacccgcagcgtccctggtctctccagccctcactcggaaccgcacggtacaggtgaaagggggcagacccctcatcatgctttccaggcatctgccacttcccaggaattgtctccctggataaacaaggcgaagtccctggctgtgcagaagcagtagctgtgtggtggcacagtcaggaaaactcgggggccctgttgacagtgacaataccctcccctcccttgggctggacccctctctacagctaggagccaatggcagaagacaaaaccaaaccgagtgagttggaccaagggaagtatgatgctgatgacaacgtgaagatcatctgcctgggagacagcgcagtgggcaaatccaaactcatggagagatttctcatggatggctttcagccacagcagctgtccacgtacgccctgaccctgtacaagcacacagccacggtagatggcaagaccatccttgtggacttttgggacacggcaggccaggagcggttccagagcatgcatgcctcctactaccacaaggcccatgcctgcatcatggtgtttgatatacagaggaaagtcacctataggaacctgagcacctggtatacagagcttcgggagttcaggccagagatcccatgcatcgtggtggccaataaaattgatgacataaacgtgacccaaaaaagcttcaattttgccaagaagttctccctgcccctgtatttcgtctcggctgctgatggtaccaatgttgtgaaggtgtggttgactgcagaggtagctagcaagctcttcaatgatgcaattcgattagctgtgtcttacaaacagaactcccaggacttcatggatgagatttttcaggagctcgagaacttcagcttggagcaggaagaggaggacgtgccagaccaggaacagagcagcagcatcgagaccccatcagaggaggtggcctctccccacagctgaggggctggggctaggggtgggtggagcccttttaaaatacccttcccttcaacaactctccagctctgaatggagaaactctctaggccatcccctcttctacctcctgcaacccacccatcctattagcctcccacattcaaggcccgtgatacagggatgaggtcagcaccagcaaactctggactggtggaagaattccccaccagatctccttgaagcagaattagggatcagcatcattaacaccttccccaccccctccccccaggcagacagtgaagagaatcagaaaacatgattatgtgtcactttaatacaggaaatttaggtgttttttggtgtttttgtttttgttttctttccaaagctcacctcggggacaattccttgggcttctcctgaggtaatgattacccccccacccacagctgagtctgtgaggccccatcctttccctacgttttctcccatcttttttcctcttcaatctcccagtcatctggtttgtttgtttctttgttcgtcctgagacggagtctcgctctgtcgccaggctggagtgcagtggcgcagtctcggctcgctgcaacctctgactccctggttcaaacgattctcctgcctcagcctcccgagtggctggcatcaccacgcccagctaatttttgtatttttagtagagacggggtttcaccatgttgcccaggatggtctcgatctcctcacctcgtgatccgcccgcctcggcctcccaaagtgctgggattacaggcatgagccaccgcgcccggccccaatcatctgtttttaaacaatcgtttttgagcagatagctattcattccagatttccgtgtacccactctgtttcaggagctcttctaggtaaagctgagatcacaggaacagcaggtgacaggcctagctatagttaggaatacacaagcggtaaaatcgagtccttacagccataccacaaggtacgtccatttggactacaagaagagcttcctttaaagttcctatttcagcataaagaggctgtcctttttttttaggaatagtttggaccttgtgcctcctgtgggaggctgaggactgcaagaggagagctagcagatatgcctgttcacccctctctggtacttgtggcttgctagtatgtttttatgataatctcgggcattgtttgcattgtgtttattaatagggttttgtttttattgtttccttttttacagtaaaggctgaatgacataaa

SEQ ID NO: 25170 - DNA, 556 bp, Homo sapiens
  source 1..556: mol_type = unassigned DNA
ctgcgaggacgcggggcgagccggaagtggagtgcgctgcggtgcgagctgggccggcggggtggttcgagagcgcgcagagtccagactggcggcagggcccgaggggccgacccgcagcgtccctggtctctccagccctcactcggaaccgcacacagtgacaataccctcccctcccttgggctggacccctctctacagctaggagccaatggcagaagacaaaaccaaaccgagtgagttggaccaagggaagtatgatgctgatgacaacgtgaagatcatctgcctgggagacagcgcagtgggcaaatccaaactcatggagagatttctcatggatggctttcagccacagcagctgtccacgtacgccctgaccctgtacaagcacacagccacggtagatggcaagaccatccttgtggacttttgggacacggcaggccaggagcggttccagagcatgcatgcctcctactaccacaaggcccatgcctgcatcatggtgtttgatatacagaggaaagtcacctataggaacctgagcacc

SEQ ID NO: 25171 - DNA, 2041 bp, Homo sapiens
  source 1..2041: mol_type = unassigned DNA
ccggaagtggagtgcgctgcggtgcgagctgggccggcggggtggttcgagagcgcgcagagtccagactggcggcagggcccgaggggccgacccgcagcgtccctggtctctccagccctcactcggaaccgcacacagtgacaataccctcccctcccttgggctggacccctctctacagctaggagccaatggcagaagacaaaaccaaaccgagtgagttggaccaagggaagtatgatgctgatgacaacgtgaagatcatctgcctgggagacagcgcagtgggcaaatccaaactcatggagagatttctcatggatggctttcagccacagcagctgtccacgtacgccctgaccctgtacaagcacacagccacggtagatggcaagaccatccttgtggacttttgggacacggcaggccaggagcggttccagagcatgcatgcctcctactaccacaaggcccatgcctgcatcatgcagacataaacgtgacccaaaaaagcttcaattttgccaagaagttctccctgcccctgtatttcgtctcggctgctgatggtaccaatgttgtgaaggtgtggttgactgcagaggtagctagcaagctcttcaatgatgcaattcgattagctgtgtcttacaaacagaactcccaggacttcatggatgagatttttcaggagctcgagaacttcagcttggagcaggaagaggaggacgtgccagaccaggaacagagcagcagcatcgagaccccatcagaggaggtggcctctccccacagctgaggggctggggctaggggtgggtggagcccttttaaaatacccttcccttcaacaactctccagctctgaatggagaaactctctaggccatcccctcttctacctcctgcaacccacccatcctattagcctcccacattcaaggcccgtgatacagggatgaggtcagcaccagcaaactctggactggtggaagaattccccaccagatctccttgaagcagaattagggatcagcatcattaacaccttccccaccccctccccccaggcagacagtgaagagaatcagaaaacatgattatgtgtcactttaatacaggaaatttaggtgttttttggtgtttttgtttttgttttctttccaaagctcacctcggggacaattccttgggcttctcctgaggtaatgattacccccccacccacagctgagtctgtgaggccccatcctttccctacgttttctcccatcttttttcctcttcaatctcccagtcatctggtttgtttgtttctttgttcgtcctgagacggagtctcgctctgtcgccaggctggagtgcagtggcgcagtctcggctcgctgcaacctctgactccctggttcaaacgattctcctgcctcagcctcccgagtggctggcatcaccacgcccagctaatttttgtatttttagtagagacggggtttcaccatgttgcccaggatggtctcgatctcctcacctcgtgatccgcccgcctcggcctcccaaagtgctgggattacaggcatgagccaccgcgcccggccccaatcatctgtttttaaacaatcgtttttgagcagatagctattcattccagatttccgtgtacccactctgtttcaggagctcttctaggtaaagctgagatcacaggaacagcaggtgacaggcctagctatagttaggaatacacaagcggtaaaatcgagtccttacagccataccacaaggtacgtccatttggactacaagaagagcttcctttaaagttcctatttcagcataaagaggctgtcctttttttttaggaatagtttggaccttgtgcctcctgtgggaggctgaggactgcaagaggagagctagcagatatgcctgttcacccctctctggtacttgtggcttgctagtatgtttttatgataatctcgggcattgtttgcattgtgtttattaatagggttttgtttttattgtttcctttttt

SEQ ID NO: 25172 - DNA, 2140 bp, Homo sapiens
  source 1..2140: mol_type = unassigned DNA
tgcggcgcgagctgggccggcgggcgtggttcgagagcgcgcagagtccagactggcggcagggcccgaggggccgacccgcagcgtccctggtctctccagccctcactcggaaccgcacacagtgacaataccctcccctcccttgggctggacccctctctacagctaggagccaatggcagaagacaaaaccaaaccgagtgagttggaccaagggaagtatgatgctgatgacaacgtgaagatcatctgcctgggagacagcgcagtgggcaaatccaaactcatggagagatttctcatggatggctttcagccacagcagctgtccacgtacgccctgaccctgtacaagcacacagccacggtagatggaaggaccatccttgtggacttttgggacacggcaggccaggagcggttccagagcatgcatgcctcctactaccacaaggcccacgcctgcatcatggtgtttgatgtacagaggaaagtcacctataggaacctgagcacctggtatacagagcttcgggagttcaggccagagatcccatgcatcgtggtggccaataaaattgatgcagacataaacgtgacccaaaaaagcttcaattttgccaagaagttctccctgcccctgtatttcgtctcggctgctgatggtaccaatgttgtgaagctcttcaatgatgcaattcgattagctgtgtcttacaaacagaactcccaggacttcatggatgagatttttcaggagctcgagaacttcagcttggagcaggaagaggaggacgtgccagaccaggaacagagcagcagcatcgagaccccatcagaggaggcggcctctccccacagctgaggggctggggctaggggtgggtggagcccttttaaaatacccttcccttcaacaactctccagctctgaatggagaaactctctaggccatcccctcttctacctcctgcaacccacccatcctattagcctcccacattctaggcccgtgatacagggatgaggtcagcaccagcaaactctggactggtggaagaattccccaccagatctccttgaagcagaagtagggatcagcatcattaacaccttccccaccccctccccgcaggcagacagtgaagagaatcagaaaacatgattatgtgtcactttaatacaggaaatttaggtgttttttggtgtttttgtttttgtttttgttttctttccaaagctcacctcggggacaattccttgggcttctcctgaggtaatgatttacccccccacccacagctgagtctgtgaggccccatcctttccctacgttttctcccatcttttttcctcttcagtctcccagtcatctggtttgtttgtttctttgttcgttctgagacggagtctcgctctgtcgccaggctggagtgcagtggcgcagtctcggctcgctgcaacctctgactccctggttcaaacgattctcctgcctcagcctcccgagtggctggcatcaccacgcccagctaatttttgtatttttagtagagacggggtttcaccatgttgcccaggatggtctcgatctcctcacctcgtgatccgcccgcctcggcctcccaaagtgctgggattacaggcatgagccaccgcgcccggccccaatcatctgtttttaaacaatcgtttttgagcagatagctattcattccagattttcgtgtacccattctgtttcaggagctcttctaggtaaagctgagatcacaggaacagcaggtgacaggcctagctatagttaggaatacacaagccgtaaaatcgagtccttacagccataccacaaggtacgtccatttggactacaagaagagcttcctttaaagttcctatttcagcataaagaggctgtccttttttttgaggaatagtttggaccttgtgcctcctgtgggaggctgaggactgcaagaggagagctagcagatatgcctgttcacccctctctggtacttgtggcttgctagtatgtttttatgataatctcgggcattgtttgcattgtgtttattaatagggttttgtttttgttgtttccttttttacagtaaaggctgaattacataaaca

SEQ ID NO: 25173 - DNA, 2428 bp, Homo sapiens
  source 1..2428: mol_type = unassigned DNA
agcagctgcgaggacgcgggccgagccggaagtggagtgcgctgcggcgcgagctgggccggcgggcgtggttcgagagcgcgcagagtccagactggcggcagggcccgaggggccgacccgcagcgtccctggtctctccagccctcactcggaaccgcacatggcaaggacacggacaagcaagtcttcgcccgtaagcggtggctcacgcctatagtccagggatgccgaggagggaggatcgcttgagtccaggagttggaggctgcagtgagccgtgatcgcgccaccgcactccagcctgggcgacagagtgagaccctatctctaaacaaaagaaagaacgtcttcaagcatggagccatgaagctggatttggctttctgtcgctctctctacagggtacagacagtgacaataccctcccctcccttgggctggacccctctctacagctaggagccaatggcagaagacaaaaccaaaccgagtgagttggaccaagggaagtatgatgctgatgacaacgtgaagatcatctgcctgggagacagcgcagtgggcaaatccaaactcatggagagatttctcatggatggctttcagccacagcagctgtccacgtacgccctgaccctgtacaagcacacagccacggtagatggaaggaccatccttgtggacttttgggacacggcaggccaggagcggttccagagcatgcatgcctcctactaccacaaggcccacgcctgcatcatggtgtttgatgtacagaggaaagtcacctataggaacctgagcacctggtatacagagcttcgggagttcaggccagagatcccatgcatcgtggtggccaataaaattgatgcagacataaacgtgacccaaaaaagcttcaattttgccaagaagttctccctgcccctgtatttcgtctcggctgctgatggtaccaatgttgtgaagctcttcaatgatgcaattcgattagctgtgtcttacaaacagaactcccaggacttcatggatgagatttttcaggagctcgagaacttcagcttggagcaggaagaggaggacgtgccagaccaggaacagagcagcagcatcgagaccccatcagaggaggcggcctctccccacagctgaggggctggggctaggggtgggtggagcccttttaaaatacccttcccttcaacaactctccagctctgaatggagaaactctctaggccatcccctcttctacctcctgcaacccacccatcctattagcctcccacattctaggcccgtgatacagggatgaggtcagcaccagcaaactctggactggtggaagaattccccaccagatctccttgaagcagaagtagggatcagcatcattaacaccttccccaccccctccccgcaggcagacagtgaagagaatcagaaaacatgattatgtgtcactttaatacaggaaatttaggtgttttttggtgtttttgtttttgtttttgttttctttccaaagctcacctcggggacaattccttgggcttctcctgaggtaatgatttacccccccacccacagctgagtctgtgaggccccatcctttccctacgttttctcccatcttttttcctcttcagtctcccagtcatctggtttgtttgtttctttgttcgttctgagacggagtctcgctctgtcgccaggctggagtgcagtggcgcagtctcggctcgctgcaacctctgactccctggttcaaacgattctcctgcctcagcctcccgagtggctggcatcaccacgcccagctaatttttgtatttttagtagagacggggtttcaccatgttgcccaggatggtctcgatctcctcacctcgtgatccgcccgcctcggcctcccaaagtgctgggattacaggcatgagccaccgcgcccggccccaatcatctgtttttaaacaatcgtttttgagcagatagctattcattccagattttcgtgtacccattctgtttcaggagctcttctaggtaaagctgagatcacaggaacagcaggtgacaggcctagctatagttaggaatacacaagccgtaaaatcgagtccttacagccataccacaaggtacgtccatttggactacaagaagagcttcctttaaagttcctatttcagcataaagaggctgtccttttttttgaggaatagtttggaccttgtgcctcctgtgggaggctgaggactgcaagaggagagctagcagatatgcctgttcacccctctctggtacttgtggcttgctagtatgtttttatgataatctcgggcattgtttgcattgtgtttattaatagggttttgtttttgttgtttccttttttacagtaaaggctgaattacataaa

SEQ ID NO: 25174 - DNA, 2169 bp, Homo sapiens
  source 1..2169: mol_type = unassigned DNA
gctgcgaggacgcgggccgagccggaagtggagtgcgctgcggcgcgagctgggccggcgggcgtggttcgagagcgcgcagagtccagactggcggcagggcccgaggggccgacccgcagcgtccctggtctctccagccctcactcggaaccgcactgacaataccctcccctcccttgggctggacccctctctacagctaggagccaatggcagaagacaaaaccaaaccgagtgagttggaccaagggaagtatgatgctgatgacaacgtgaagatcatctgcctgggagacagcgcagtgggcaaatccaaactcatggagagatttctcatggatggctttcagccacagcagctgtccacgtacgccctgaccctgtacaagcacacagccacggtagatggaaggaccatccttgtggacttttgggacacggcaggccaggagcggttccagagcatgcatgcctcctactaccacaaggcccacgcctgcatcatggtgtttgatgtacagaggaaagtcacctataggaacctgagcacctggtatacagagcttcgggagttcaggccagagatcccatgcatcgtggtggccaataaaattgatgacataaacgtgacccaaaaaagcttcaattttgccaagaagttctccctgcccctgtatttcgtctcggctgctgatggtaccaatgttgtgaagctcttcaatgatgcaattcgattagctgtgtcttacaaacagaactcccaggacttcatggatgagatttttcaggagctcgagaacttcagcttggagcaggaagaggaggacgtgccagaccaggaacagagcagcagcatcgagaccccatcagaggaggcggcctctccccacagctgaggggctggggctaggggtgggtggagcccttttaaaatacccttcccttcaacaactctccagctctgaatggagaaactctctaggccatcccctcttctacctcctgcaacccacccatcctattagcctcccacattctaggcccgtgatacagggatgaggtcagcaccagcaaactctggactggtggaagaattccccaccagatctccttgaagcagaagtagggatcagcatcattaacaccttccccaccccctccccgcaggcagacagtgaagagaatcagaaaacatgattatgtgtcactttaatacaggaaatttaggtgttttttggtgtttttgtttttgtttttgttttctttccaaagctcacctcggggacaattccttgggcttctcctgaggtaatgatttacccccccacccacagctgagtctgtgaggccccatcctttccctacgttttctcccatcttttttcctcttcagtctcccagtcatctggtttgtttgtttctttgttcgttctgagacggagtctcgctctgtcgccaggctggagtgcagtggcgcagtctcggctcgctgcaacctctgactccctggttcaaacgattctcctgcctcagcctcccgagtggctggcatcaccacgcccagctaatttttgtatttttagtagagacggggtttcaccatgttgcccaggatggtctcgatctcctcacctcgtgatccgcccgcctcggcctcccaaagtgctgggattacaggcatgagccaccgcgcccggccccaatcatctgtttttaaacaatcgtttttgagcagatagctattcattccagattttcgtgtacccattctgtttcaggagctcttctaggtaaagctgagatcacaggaacagcaggtgacaggcctagctatagttaggaatacacaagccgtaaaatcgagtccttacagccataccacaaggtacgtccatttggactacaagaagagcttcctttaaagttcctatttcagcataaagaggctgtccttttttttgaggaatagtttggaccttgtgcctcctgtgggaggctgaggactgcaagaggagagctagcagatatgcctgttcacccctctctggtacttgtggcttgctagtatgtttttatgataatctcgggcattgtttgcattgtgtttattaatagggttttgtttttgttgtttccttttttacagtaaaggctgaattacataaa

SEQ ID NO: 25175 - DNA, 391 bp, Homo sapiens
  source 1..391: mol_type = unassigned DNA
ggtacaggtgaaagggggcagacccctcatcatgctttccaggcatctgccacttcccaggaattgtctccctggataaacaaggcgaagtccctggctgtgcagaagcagtagctgtgtggtggcacagtcaggaaaactcgggggccctgttggtattttctacccctgacccgtgtgcatacttctgtcgtagctctcaccacagtagactctgctatcattgtgtcttccatcctctgaaccctgtgcaaggtctgctcatggtgaatgcccatgacaataccctcccctcccttgggctggacccctctctacagctaggagccaatggcagaagacaaaaccaaaccgagtgagttggaccaagggaagtatgatgctgatgaca

SEQ ID NO: 25176 - DNA, 1126 bp, Homo sapiens
  source 1..1126: mol_type = unassigned DNA
gcagctgcgaggacgcgggccgagccggaagtggagtgcgctgcggcgcgagctgggccggcgggcgtggttcgagagcgcgcagagtccagactggcggcagggcccgaggggccgacccgcagcgtccctggtctctccagccctcactcggaaccgcactgacaataccctcccctcccttgggctggacccctctctacagctaggagccaatggcagaagacaaaaccaaaccgagtgagttggaccaagggaagtatgatgctgatgacaacgtgaagatcatctgcctgggagacagcgcagtgggcaaatccaaactcatggagagatttctcatggatggctttcagccacagcagctgtccacgtacgccctgaccctgtacaagcacacagccacggtagatggaaggaccatccttgtggacttttgggacacggcaggccaggagcggttccagagcatgcatgcctcctactaccacaaggcccacgcctgcatcatggtgtttgatgtacagaggaaagtcacctataggaacctgagcacctggtatacagagcttcgggagttcaggccagagatcccatgcatcgtggtggccaataaaattgatgacataaacgtgacccaaaaaagcttcaattttgccaagaagttctccctgcccctgtatttcgtctcggctgctgatggtaccaatgttgtgaagctcttcaatgatgcaattcgattagctgtgtcttacaaacagaactcccaggacttcatggatgagatttttcaggagctcgagaacttcagcttggagcaggaagaggaggacgtgccagaccaggaacagagcagcagcatcgagaccccatcagaggaggcggcctctccccacagctgaggggctggggctaggggaatagtttggaccttgtgcctcctgtgggaggctgaggactgcaagaggagagctagcagatatgcctgttcacccctctctggtacttgtggcttgctagtatgtttttatgataatctcgggcattgtttgcattgtgtttattaatagggttttgtttttgttgtttccttttttacagtaaaggctgaattacataaacattg

SEQ ID NO: 25177 - DNA, 3535 bp, Homo sapiens
  source 1..3535: mol_type = unassigned DNA
gagagggcacggggaaaaggtggctctggccggggtggctcggtttcctggggctatgtaactgagctcgtcgacttaggggtccttcttcgctgccctcgccgcgtgctagcagggagtttccgctcgggagagagactgtcctcacgcccgctgcgcctcctcgacggcagagcaggcttgctcgcccgtgggagcgtcccggccgagaagccctgaggggggaggggaggccattttgtcccgaccgactccccggaaccgggcggacgggctgggagaggctgcggagccgcggtcgccgccctcggaggcactggacgccgccactgtcggggcttcctcaaagctgttcgtaggtcgcccgcgccgtctcgagcctttttcccacgcttccccggtcctccggcctgagaacgcccgagtgaggagttggccgtagtgagagggaccgatcccttggggccgccggcggcgagagcccgagccgctcctcccaatggcgaagaagacgtacgacctgcttttcaagctgctcctgatcggggattccggagtggggaagacctgcgtcctttttcgtttttcggatgatgccttcaatactacctttatttccaccataggaatagacttcaagatcaaaacagttgaattacaaggaaagaagatcaagctacagatatgggatacagcaggccaggagcgatttcacaccatcacaacctcctactacagaggcgcaatgggtatcatgctagtatatgacatcaccaatggtaaaagttttgaaaacatcagcaaatggcttagaaacatagatgagcatgccaatgaagatgtggaaagaatgttactaggaaacaagtgtgatatggacgacaaaagagttgtacctaaaggaaaaggagaacagattgcaagggagcatggtattaggttttttgagactagtgcaaaagcaaatataaacatcgaaaaggcgttcctcacgttagctgaagatatccttcgaaagacccctgtaaaagagcccaacagtgaaaatgtagatatcagcagtggaggaggcgtgacaggctggaagagcaaatgctgctgagcattctcctgttccatcagttgccatccactaccccgttttctcttcttgctgcaaaataaaccactctgtccatttttaactctaaacagatatttttgtttctcatcttaactatccaagccacctattttatttgttctttcatctgtgactgcttgctgactttatcataattttcttcaaacaaaaaaatgtatagaaaaatcatgtctgtgagttcatttttaaatgtacttgctcagctcaactgcatttcagttgtattatagtccagttcttatcaacattaaaacctatagcaatcatttcaaatctattctgcaaattgtataagaataaagttagaattaacaattttattttgtacaacagtggaattttctgtcatggataatgtgcttgagtccctataatctatagacatgtgatagcaaaagaaacaaacaaaagccaggaaaacactcattttcgccttgaatatgtaaatgggattaattttgtcctgtgccttatgtggaaaggaacttctttggttttccttttttgttctggtggaagcatgtgcaggagacatatcatccaaacataaaccattaaaatgtttgtggtttgcttggctgtaattttcaaagtagttaattgaggacaaagggtaatgcagaagtgatagctttggtttgctgagtcttgttttaagtggccttgatatttaaaactattcctgccaccatttcttctccttggccacttcttccttgcgtctccctgcatgctgctttatttgcttctccctccccaaccacctcatggtatatttaagagtgaaagggacaaactagtaggtttgtcaagtttaatataaagcactgatgtaacttgctaggtaaacggaaagataagttctaactgcctactatccaatgtcagttaattggtgtcttcccccctcatttgctctcttccctaaaatgtgtcccagatgccttcatttgctgttttacttctatgttctgcttttcctcctctctttgttcccttcctgtctatccattgagtttatgaaatggaagagttaactgcatgcactagtgtttggagggtgttgtggtttgtctttctaattaggtgtatagcctattcactttcctagaataaatctcttaacctaaatttgagtagtctgcattttggcaactcctctagcagcttggtagcctagtacaggttgtttttttaaaaaaggaaaagcaggaaggaggagtgaattttattaacatgtttgccaaatgtattgagatttggcctctgaagaacactttttcagtgttaagtttctttaccttaagattcagaaatactttagaatattattaattttaagtcctgtctttacatccttttggaaaacttgtattaccatgggtttggaaaaaggacaacgaaaggcttttcatgtaaagataagatctttagctatctctaaccctgtccttttttcactgcattttttctagttttgcttcattgcttatcattaggatagggtaagtgaagtttgctatgctgctagcatcctaagatgatacctttgttgaaagaattgtgaatagcatgattcatttctagcagaggctgagtttaggacagcagcttccattgagaagtctttctgtgtcgtgaatagcattttaatgacctcttggctcacataagcaaacaacatagggacgtatctgctatgaaaatccacaaatttttcagatagtgccctaaaaacaattttatatgcctcactggttgttattcttaggttattcccacacttgactttatcattgtttactactagtaaaaagcagcattgccaaataatccctaattttccactaaaaatataatgaaatgatgttaagctttttgaaaagtttaggttaaacctactgttgttagattaatgtatttgttgcttccctttatctggaatgtggcattagcttttttattttaaccctctttaattcttattcaattccatgacttaaggttggagagctaaacactgggatttttggataacagactgacagttttgcataattataatcggcattgtacatagaaaggatatggctaccttttgttaaatctgcactttctaaatatcaaaaaagggaaatgaagtataaatcaatttttgtataatctgtttgaaacatgagttttatttgcttaatattagggctttgccccttttctgtaagtctcttgggatcctgtgtagaagctgttctcattaaacaccaaacagttaagtccattctctggtactagctacaaattcggtttcatattctacttaacaatttaaataaactgaaatatttctagatggtctacttctgttcatataaaaacaaaacttgatttcca

SEQ ID NO: 25178 - DNA, 6253 bp, Homo sapiens
  source 1..6253: mol_type = unassigned DNA
ctcgcttctggagtgttatcgtcaccatgtccctaatggtctcggctggccggggcctgggggccgtgtggtccccaacccacgtgcaggtgacggtgctgcaggcgcggggcctgcgggccaagggccccgggggcacgagcgacgcgtacgcggtgatccaggtgggcaaggagaagtacgccacctccgtgtcggagcgcagcctgggcgcgcccgtgtggcgcgaggaggccaccttcgagctgccatcgctgctgtcctccggacccgcggccgccgccaccctgcagctcaccgtgctgcaccgcgcgctgctcggcctcgacaagttcctgggccgcgccgaggtggacctgcgggatctgcaccgcgaccagggccgcaggaagacgcagtggtataagttgaaatccaaaccaggaaagaaggacaaggagcgaggagaaattgaggttgacatccagtttatgagaaacaacatgactgccagcatgtttgacctttctatgaaagacaagtctcggaatccatttggaaagctgaaggacaagatcaaggggaagaataaggacagtgggtcagacaccgcctccgccatcatccctagcacgacaccttcggtcgacagtgatgatgagtctgtggttaaagacaagaaaaagaaatcaaagatcaagaccttactttccaagtcaaatttgcagaagacgcctctttcccagtccatgtctgtcctgccgacttcaaagccagaaaaagtgctgcttcgtcccggagactttcagtcccagtgggatgaagatgacaatgaggatgagtcctcctcggcctcggatgtcatgtctcacaagagaacagcgagtacggatcttaagcaactgaaccaggtcaactttacccttcccaagaaggaaggactttcctttcttggtggccttcggtctaagaatgatgtcctttcccgctctaatgtctgcatcaatgggaaccatgtttacctggagcagccagaagccaagggtgagatcaaggatagcagcccgtcctcctccccatcccccaagggcttcagaaagaagcatttgttctcttctacagagaacctggcggctgggtcttggaaggagcctgctgaaggaggtgggctgtcttctgacaggcagctctccgaatcttccaccaaggactccttgaagtctatgaccctgccgtcctaccgacctgccccactggtcagtggggacctcagggaaaacatggcccccgcaaactcagaggccacaaaagaagctaaggagagcaagaagccagagagcaggaggtcctctttgctgtctctgatgacggggaagaaggatgtggctaagggcagtgaaggtgaaaaccctctcacggtcccagggagggagaaggaaggcatgctgatgggggttaagccgggggaggacgcatcggggcctgctgaagaccttgtgagaagatctgagaaagatactgcagctgttgtctccagacagggcagctccctgaacctctttgaagatgtgcagatcacagaaccagaagctgagccagagtccaagtctgaaccgagacctccaatttcctctccgagggctccccagaccagagctgtcaagccccgacttcatcctgtgaagccaatgaatgcaatggccaccaaggttgctaactgcagcttgggaactgccaccatcatcagtgagaacttgaacaatgaggtcatgatgaagaaatacagcccctcggaccctgcatttgcatatgcgcagctgacccacgatgagctgattcagctggtcctcaaacagaaggaaacgataagcaagaaggagttccaggtccgcgagctggaagactacattgacaacctgcttgtcagggtcatggaagaaacccccaatatcctccgcatcccgactcaggttggcaaaaaagcaggaaagatgtaaatcagcagaaaaaaaacaccgagacgtttctgtgacttcactttcacctgctccaggggtcaaggacttgccttgcctgataaccagccagcaggctccgaatcaccatctccctcacatgttatccggcaagagtgaattctaccaatggaagccaggttaatgattacaattaatcttttactgtacattcccaaggctttagttttaaatgccactgtgcctttaacaaggttgtaaatattttatgcccaccagagatgtggtcataagatctgatcctgagccagagattcagatggcacaggaagtattcatgtattttaacactggggttttctttctttcatactgagattttttttcagtatgtatcctccagctcttaaagcttacctgagaaagctttaaatgagaaaaggaccatgcgattggtgctgtgttacatacacatactttcttggcttctgagtagctcaggtgtggcttttggctgcagatgttaaattttgataccatgtaaacctacccagcttctcagacttgggtcttgttttttgatgggaacagaggtgtttagagaaagcctctgagtatgcctttcagattttgaacaagcggccttttctaaacatcgacttctactactctctagccttaaaataccttctgcttagatccagggcccttctactggagataggaaaagtagaattcaggaattaaaagaattactctttattcaatttgaggaacttggtgaaagcccctcctcttatgacagccaggttcctgctggctagaccagcctattcagcgctttgctaggggattgggtggtccacgcactcgctaatacagttctccaggtgtggaatgatgtcaatacgattgcttggccttttccccctgtgcctttgctcggtgctctggtttcctcagcaacactccttgtaaggggcagagacagggtccaccaactccccaagatgaagaagccccttcaggccagtcgtggtggctcatgcctgtaatcccagcactttgcaaggccgaggagggtggatcacttgaggtcaggagttcgagaccagcctgaccaacatggcgaaaccccatctctactaaaaatacaaaaattagcttggcatggtggtgcgtgcctgtaatcccagctactcgggaggctggggcaggagaattgcttgaacttgggagatggaggctgcagcgagccaagatcgtgccactgcactccagcctgggcaagagtttttttaagactcttaaaaaaagagcctgggcaatttttttaagactctgtcttaaaaaaaactaaaaagaaaaaaagaagccccttcactctacaggggacaggagaccatggattggaccccaaagggattgaactgcatctgcatgtctgtcctttgaacactttctctccctgcccaaaaggaaacccaaattatttgtgggatactggggaaattgtagtgaagggcttaatgtagttaataaaagttaaaagtcagtagaaaacaggtgcctcagccttcaaatggttgctttttttccattttccctcatgaatagactcaccagcattttacccccttgttataaaactgtgcagagcaagaagatgatacttatttttgaatttgtatttttaaaactagatttatagactttttttttttttaactagggcacttgcttccttcttagctaaaagcaccagctgagatttttcaggtaattttgttgttactcacttaagactggaattagaatgtttctggtatttctcatttttttccctggctatgatagaatctcatctaatcttgacatctctcctaggggaagaatatcacaggctaatagcgtggttgggggtgaagatgatagcagttattaaatcaggaatctcttttatgtgtgtccttgttacattgaggttaagagacaaaatcattggcagtgcaatctctttccaggatttcgtttgctgtggcattggttatatcagagcactttaatctgaaggatgatactgtaacttgatttatctaattagcttttaattatctacagctattttattttatttaattctctcctacagtactgggaccactgtaaacttctcagatgacttgtatttttgtagtgctatgaaatttatttacatacttataaagaaaactgtatgttcacttgaactctgaaaatgtacatgtatggctggacgcggtggctcacgcctgtaatcccagcactttgggaggctgaggcgggtgaatcacttgattgaggtcaggagttcgagaccagcctggccaacatggcaaaaccccgtctctactaaaaaatacagaaattagctgggtgtggtggcagacagctgtaatctcagctgctcgggaggctgaggcacaagaatcgcttgagccagggaggtggaggttgcagtgagctgagatcacatcattgcactccagcctgggcaacgggcgagactctgtctcaaaaaaaagaaagaaagaaaaggtacatgtatatatttgtcctgcattatgttttttacttgatataaatgtatttttactgtgatagtccaagtgccctggggggcaggtgtgctctatgtggttcttcttccattggagagctggcgtagagatctgcagtgttcacaaggatgttggtttggagatgtctgctgctaggacctggggtgtgtgactcagtccatatgagagggacatctgggtggaggagtaaattcctgtgctctgaaatgccacttggtagctctggacaatgaaggacaattgactcaagggtgcctggcttctgctgctgctgggaaaaaattcagtttatagcattcctgcacctcccaaagtagataacctggaggtcattcagttaacaactgtccctgaggactcagttttgggggaggggttatctgggagaagctttagcctgttctgagccattaggagacattagtgaattggagcactggagaatcctacaaatggcctatgtctcagaagagctgggacctccttccagctgctgcagatgctgacaggccctgggaggctgctgtgctctggagaagctggagcagctcatttcttggcctagcctggctgcctcagaaagagcagtcaggacttgagggaagcatcaaattctatacccataaactgcagttggaagtcagctttttgaaatgtccagcctttgcccaattgtttcagatcatctcatgcctcaggctttggcaggtatcctgccctccatcttattccagtgtgttcacctcatcaaggcagcagagtggatgaaggagtaagtctgccctttgccatactgaacagctgtggaccccgattggtgagggctctgcatatgcctgtatgaaggagatacaggtgtgtgtgcacatgccggtatgaagaagacacaggcatgtgcttctcagttttgctaacagtgggagctcaacggggcagagggaggaaggtccatgatgctcagccacatactgtagagagaggcaatttaatgttaaatgacgcaccatcctccctcccacccttctcccagtcaactttttttctttttctagaactactaattatctctcaaggctgaaaaattaattgccttaggtggagaacttaattcctagtatccaccaaacttaactccgtatctccatatggtgtctccatatctactgtgtgagctacttaactgacgccctcttcctccaactgaaggatcgcccaacgtttttggattatagaattattatttcctgctttctttctttgggacttttgaatttctttggtttcgtttttaagaagtaacccaacatttcctacaacactaaataaaatggtacttacctttcaaagatttgtgtctgtagtttggtatgggtgcaataaaaatttattttgtcttcctggaaaacctctcttggtgggggtggggggatgaccagtgtttctcatcccatgagggtctctcactgggatttctgttgctgccatcttgcctggttcccaggagtcccaaggccctttttctcaaagaggacggacatgtctggtcccttcggatgcacccttcatcttggcctgagggaccatggcactggccagagaaactgagttggaacgtgctgcccccttttcctttgcagccggtacccttggctgagcatttggacagggtctttcctc

SEQ ID NO: 25179 - DNA, 7811 bp, Homo sapiens
  source 1..7811: mol_type = unassigned DNA
tgttatcgtcaccatgtccctaatggtctcggctggccggggcctgggggccgtgtggtccccaacccacgtgcaggtgacggtgctgcaggcgcggggcctgcgggccaagggccccgggggcacgagcgacgcgtacgcggtgatccaggtgggcaaggagaagtacgccacctccgtgtcggagcgcagcctgggcgcgcccgtgtggcgcgaggaggccaccttcgagctgccatcgctgctgtcctccggacccgcggccgccgccaccctgcagctcaccgtgctgcaccgcgcgctgctcggcctcgacaagttcctgggccgcgccgaggtggacctgcgggatctgcaccgcgaccagggccgcaggaagacgcagtggtataagttgaaatccaaaccaggaaagaaggacaaggagcgaggagaaattgaggttgacatccagtttatgagaaacaacatgactgccagcatgtttgacctttctatgaaagacaagtctcggaatccatttggaaagctgaaggacaagatcaaggggaagaataaggacagtgggtcagacaccgcctccgccatcatccctagcacgacaccttcggtcgacagtgatgatgagtctgtggttaaagacaagaaaaagaaatcaaagatcaagaccttactttccaagtcaaatttgcagaagacgcctctttcccagtccatgtctgtcctgccgacttcaaagccagaaaaagtgctgcttcgtcccggagactttcagtcccagtgggatgaagatgacaatgaggatgagtcctcctcggcctcggatgtcatgtctcacaagagaacagcgagtacggatcttaagcaactgaaccaggtcaactttacccttcccaagaaggaaggactttcctttcttggtggccttcggtctaagaatgatgtcctttcccgctctaatgtctgcatcaatgggaaccatgtttacctggagcagccagaagccaagggtgagatcaaggatagcagcccgtcctcctccccatcccccaagggcttcagaaagaagcatttgttctcttctacagagaacctggcggctgggtcttggaaggagcctgctgaaggaggtgggctgtcttctgacaggcagctctccgaatcttccaccaaggactccttgaagtctatgaccctgccgtcctaccgacctgccccactggtcagtggggacctcagggaaaacatggcccccgcaaactcagaggccacaaaagaagctaaggagagcaagaagccagagagcaggaggtcctctttgctgtctctgatgacggggaagaaggatgtggctaagggcagtgaaggtgaaaaccctctcacggtcccagggagggagaaggaaggcatgctgatgggggttaagccgggggaggacgcatcggggcctgctgaagaccttgtgagaagatctgagaaagatactgcagctgttgtctccagacagggcagctccctgaacctctttgaagatgtgcagatcacagaaccagaagctgagccagagtccaagtctgaaccgagacctccaatttcctctccgagggctccccagaccagagctgtcaagccccgactggaagtgtctccagaggcgcaacccacagccaggcttccttcccctactgactccccttcctctcttcctcctcttccttctagctctggccaggcatctgtcccctctgaattgggacatggtgcagacacacagtcctctgagagtccttctgtcttctcctctctctcatctcccatagcagctcccatttccacatccactccaattgaaagctggcctctcgtagacaggggccaggccaagtctgaaggaccacccttgctccctaaggcagagttgcaaactgagagtttaacaccggttccaaattctggttcttctgccctgggatcacttttcaaacagccatcctttccagcaaataaagggacagaagattctctgatgggcaggacccgtgagacaggcacagagaagaacaccagcagccttgagttggaggagtctctcccagagcagcctgaaacagggcgacaagaggaagaacttccgagattcccctgcaaaaaacaagactacagcccatcatctggagaagcccaggaagtaccgtttgccctttcactcagcagtgatggagctgtgagccctgttggggagcttgcagcaggaggagacagagacttggagagtcaggctgggtctcttgtggagagcaaagccagggatgcagctgaagaagtggcgccccctcttcccatgggagcatcagtcccttccattgattccatgatgcggaagctggaagagatgggtctgaacctccgcaaggaccagaagaaaaccaagaagcgtgtgtcattttctgagcagctcttcacggaagaggcagtggcgggggctgccttgctggtggaaggacacagcagttgtccccaggagctgaaccctgcatggtctgttgctggaaacgcgtctgacggagagcctcctgagtctccccacgcagaggactcagaaagggaatcggtgaccacacctgggccagcgacgtgtggtgcgccagcctccccagcggatcacctcctcctcccctcccaggaggagagtttctccgaagtccccatgagtgaagcaagctcagcgaaagacactccactctttaggatggagggagaggatgcccttgtgactcagtatcagagcaaagccagtgaccacgaaggtttattgtctgaccccttgagtgaccttcagttggtctcagattttaaatctccaatcatggccgatctgaacttaagccttccttccattcctgaagtcgcatcggatgatgaaagaatagatcaggttgaagatgacggagatcaggttgaagatgatggagagacagcaaagtcgtcaactctggacataggagctttgtccttgggcttggtagtcccctgtcctgagaggggaaaggggcccagtggcgaggcagataggttggtactgggggagggcctgtgtgatttcaggctgcaagcaccccaggcatctgtgacagctccttcagagcagaccacagagttcggaattcacaaaccacatcttggcaagagctcaagcttggataaacagctgccaggccccagtggtggtgaggaagaaaaaccgatgggaaatgggagtccaagcccgcctcctggcacatccctggacaatcctgtacccagcccctccccttctgagatctttcctgtcacacactctttccccagctctgcacattctgacactcaccacaccagcacagcagaatctcaaaaaaaagccacagcagagggctccgctggtagagttgaaaattttggcaagaggaagccactcctccaggcctgggtctcaccctcggagacacatccagtctcagctcagccaggcgctggaactgggtcagccaagcacagacttcatcctgtgaagccaatgaatgcaatggccaccaaggttgctaactgcagcttgggaactgccaccatcatcagtgagaacttgaacaatgaggtcatgatgaagaaatacagcccctcggaccctgcatttgcatatgcgcagctgacccacgatgagctgattcagctggtcctcaaacagaaggaaacgataagcaagaaggagttccaggtccgcgagctggaagactacattgacaacctgcttgtcagggtcatggaagaaacccccaatatcctccgcatcccgactcaggttggcaaaaaagcaggaaagatgtaaatcagcagaaaaaaaacaccgagacgtttctgtgacttcactttcacctgctccaggggtcaaggacttgccttgcctgataaccagccagcaggctccgaatcaccatctccctcacatgttatccggcaagagtgaattctaccaatggaagccaggttaatgattacaattaatcttttactgtacattcccaaggctttagttttaaatgccactgtgcctttaacaaggttgtaaatattttatgcccaccagagatgtggtcataagatctgatcctgagccagagattcagatggcacaggaagtattcatgtattttaacactggggttttctttctttcatactgagattttttttcagtatgtatcctccagctcttaaagcttacctgagaaagctttaaatgagaaaaggaccatgcgattggtgctgtgttacatacacatactttcttggcttctgagtagctcaggtgtggcttttggctgcagatgttaaattttgataccatgtaaacctacccagcttctcagacttgggtcttgttttttgatgggaacagaggtgtttagagaaagcctctgagtatgcctttcagattttgaacaagcggccttttctaaacatcgacttctactactctctagccttaaaataccttctgcttagatccagggcccttctactggagataggaaaagtagaattcaggaattaaaagaattactctttattcaatttgaggaacttggtgaaagcccctcctcttatgacagccaggttcctgctggctagaccagcctattcagcgctttgctaggggattgggtggtccacgcactcgctaatacagttctccaggtgtggaatgatgtcaatacgattgcttggccttttccccctgtgcctttgctcggtgctctggtttcctcagcaacactccttgtaaggggcagagacagggtccaccaactccccaagatgaagaagccccttcaggccagtcgtggtggctcatgcctgtaatcccagcactttgcaaggccgaggagggtggatcacttgaggtcaggagttcgagaccagcctgaccaacatggcgaaaccccatctctactaaaaatacaaaaattagcttggcatggtggtgcgtgcctgtaatcccagctactcgggaggctggggcaggagaattgcttgaacttgggagatggaggctgcagcgagccaagatcgtgccactgcactccagcctgggcaagagtttttttaagactcttaaaaaaagagcctgggcaatttttttaagactctgtcttaaaaaaaactaaaaagaaaaaaagaagccccttcactctacaggggacaggagaccatggattggaccccaaagggattgaactgcatctgcatgtctgtcctttgaacactttctctccctgcccaaaaggaaacccaaattatttgtgggatactggggaaattgtagtgaagggcttaatgtagttaataaaagttaaaagtcagtagaaaacaggtgcctcagccttcaaatggttgctttttttccattttccctcatgaatagactcaccagcattttacccccttgttataaaactgtgcagagcaagaagatgatacttatttttgaatttgtatttttaaaactagatttatagactttttttttttttaactagggcacttgcttccttcttagctaaaagcaccagctgagatttttcaggtaattttgttgttactcacttaagactggaattagaatgtttctggtatttctcatttttttccctggctatgatagaatctcatctaatcttgacatctctcctaggggaagaatatcacaggctaatagcgtggttgggggtgaagatgatagcagttattaaatcaggaatctcttttatgtgtgtccttgttacattgaggttaagagacaaaatcattggcagtgcaatctctttccaggatttcgtttgctgtggcattggttatatcagagcactttaatctgaaggatgatactgtaacttgatttatctaattagcttttaattatctacagctattttattttatttaattctctcctacagtactgggaccactgtaaacttctcagatgacttgtatttttgtagtgctatgaaatttatttacatacttataaagaaaactgtatgttcacttgaactctgaaaatgtacatgtatggctggacgcggtggctcacgcctgtaatcccagcactttgggaggctgaggcgggtgaatcacttgattgaggtcaggagttcgagaccagcctggccaacatggcaaaaccccgtctctactaaaaaatacagaaattagctgggtgtggtggcagacagctgtaatctcagctgctcgggaggctgaggcacaagaatcgcttgagccagggaggtggaggttgcagtgagctgagatcacatcattgcactccagcctgggcaacgggcgagactctgtctcaaaaaaaagaaagaaagaaaaggtacatgtatatatttgtcctgcattatgttttttacttgatataaatgtatttttactgtgatagtccaagtgccctggggggcaggtgtgctctatgtggttcttcttccattggagagctggcgtagagatctgcagtgttcacaaggatgttggtttggagatgtctgctgctaggacctggggtgtgtgactcagtccatatgagagggacatctgggtggaggagtaaattcctgtgctctgaaatgccacttggtagctctggacaatgaaggacaattgactcaagggtgcctggcttctgctgctgctgggaaaaaattcagtttatagcattcctgcacctcccaaagtagataacctggaggtcattcagttaacaactgtccctgaggactcagttttgggggaggggttatctgggagaagctttagcctgttctgagccattaggagacattagtgaattggagcactggagaatcctacaaatggcctatgtctcagaagagctgggacctccttccagctgctgcagatgctgacaggccctgggaggctgctgtgctctggagaagctggagcagctcatttcttggcctagcctggctgcctcagaaagagcagtcaggacttgagggaagcatcaaattctatacccataaactgcagttggaagtcagctttttgaaatgtccagcctttgcccaattgtttcagatcatctcatgcctcaggctttggcaggtatcctgccctccatcttattccagtgtgttcacctcatcaaggcagcagagtggatgaaggagtaagtctgccctttgccatactgaacagctgtggaccccgattggtgagggctctgcatatgcctgtatgaaggagatacaggtgtgtgtgcacatgccggtatgaagaagacacaggcatgtgcttctcagttttgctaacagtgggagctcaacggggcagagggaggaaggtccatgatgctcagccacatactgtagagagaggcaatttaatgttaaatgacgcaccatcctccctcccacccttctcccagtcaactttttttctttttctagaactactaattatctctcaaggctgaaaaattaattgccttaggtggagaacttaattcctagtatccaccaaacttaactccgtatctccatatggtgtctccatatctactgtgtgagctacttaactgacgccctcttcctccaactgaaggatcgcccaacgtttttggattatagaattattatttcctgctttctttctttgggacttttgaatttctttggtttcgtttttaagaagtaacccaacatttcctacaacactaaataaaatggtacttacctttcaaa

SEQ ID NO: 25180 - DNA, 429 bp, Homo sapiens
  source 1..429: mol_type = unassigned DNA
atgtccctaatggtctcggctggccggggcctgggggccgtgtggtccccaacccacgtgcaggtgacggtgctgcaggcgcggggcctgcgggccaagggccccgggggcacgagcgacgcgtacgcggtgatccaggtgggcaaggagaagtacgccacctccgtgtcggagcgcagcctgggcgcgcccgtgtggcgcgaggaggccaccttcgagctgccatcgctgctgtcctccggacccgcggccgccgccaccctgcagctcaccgtgctgcaccgcgcgctgctcggcctcgacaagttcctgggccgcgccgaggtggacctgcgggatctgcaccgcgacctgggcaagagtttttttaagactcttaaaaaaagagcctgggcaatttttttaagactctgtcttaaaaaaaactaa

SEQ ID NO: 25181 - DNA, 1959 bp, Homo sapiens
  source 1..1959: mol_type = unassigned DNA
acactggatcctatctttgtctagcgcgtgtcttctcaaaaataaaagtgcaaaataaaaaacaaaacaaaagaaataaaagtgcaaattctgctctcagccgggtgcagtggctcacgcctgtaatcccaacattttgggaggctgaggcgggcggatcatctgaggtcaggagttcgagtccagcctggctaccatggtgaaaccccatctctactaaaaatacaaaaattagctggacatggtcacgcgctcctgtaatctcagctactcaggaggctgaggcaggagaatcacttgaacccaggaggcagaggctgcagtgagccgagatggtggcattgcactccagcctgggtgacagagcaagactctgtgtcaaaaaaaaaaaaaaaaaaaaaaaaaaaaattctgctctcatctaccacttcccgaagagaaagcatgagaatgcatgcattgaagaggctgctggtagcagagaggagaggccagttcatggggattgtgaacattgttgcagttgcttccattcaaaggtaactcctcagcctttctcctttcaggtggtataagttgaaatccaaaccaggaaagaaggacaaggagcgaggagaaattgaggttgacatccagtttatgagaaacaacatgactgccagcatgtttgacctttctatgaaagacaagtctcggaatccatttggaaagctgaaggacaagatcaaggggaagaataaggacagtgggtcagacaccgcctccgccatcatccctagcacgacaccttcggtcgacagtgatgatgagtctgtggttaaagacaagaaaaagaaatcaaagatcaagaccttactttccaagtcaaatttgcagaagacgcctctttcccagtccatgtctgtcctgccgacttcaaagccagaaaaagtgctgcttcgtcccggagactttcagtcccagtgggatgaagatgacaatgaggatgagtcctcctcggcctcggatgtcatgtctcacaagagaacagcgagtacggatcttaagcaactgaaccaggtcaactttacccttcccaagaaggaaggactttcctttcttggtggccttcggtctaagaatgatgtcctttcccgctctaatgtctgcatcaatgggaaccatgtttacctggagcagccagaagccaagggtgagatcaaggatagcagcccgtcctcctccccatcccccaagggcttcagaaagaagcatttgttctcttctacagagaacctggcggctgggtcttggaaggagcctgctgaaggaggtgggctgtcttctgacaggcagctctccgaatcttccaccaaggactccttgaagtctatgaccctgccgtcctaccgacctgccccactggtcagtggggacctcagggaaaacatggcccccgcaaactcagaggccacaaaagaagctaaggagagcaagaagccagagagcaggaggtcctctttgctgtctctgatgacggggaagaaggatgtggctaagggcagtgaaggtgaaaaccctctcacggtcccagggagggagaaggaaggcatgctgatgggggttaagccgggggaggacgcatcggggcctgctgaagaccttgtgagaagatctgagaaagatactgcagctgttgtctccagacagggcagctccctgaacctctttgaagatgtgcagatcacagaaccagaagctgagccagagtccaagtctgaaccgagacctccaatttcctctccgagggctccccagaccagagctgtcaagccccgacttcatcctgtgaagccaatgaatgcaatggccaccaaggttgctaactgcagcttgggaactgccaccatcatcagtgagaacttgaacaatgaggtcatgatgaaggtatgtcctctgagaagctggtgtgttcgttag

SEQ ID NO: 25182 - DNA, 6061 bp, Homo sapiens
  source 1..6061: mol_type = unassigned DNA
gggcgggcgggaggcgcggaggcagcggaggctgctcggccgcaaggaggcaggcgggaggccaggggtgcagaattggggcgggggctcccttcacccccgcagccctccgcccgggtccgtgtggccaggcctcacgtgccccgcaggcctggggaaggtggagacaggggcgggggtccgcgcagaggcctgcacggcgcggccaggtgatggtgggcctctgtgtttctccagacgaaaggggacccccggagcggccgtgcccctgggctgcccccgcgaggcgttttgacatcagccatagggaagtcggggagccctgagcctgcctgtttccgttaagtgtccttaggatgcagtgattaaggaattaggctctccctccgggaggggcactgcctgtgctagggaactcgggggcagagaaacaggacaggatgatgctgtccgagcaagcccaaaagtggtttccaacccacgtgcaggtcacagtgctccaagccaaagatctgaagccaaaaggcaaaagtggtaccaatgacacatacactataattcagctgggcaaggaaaagtactccacctctgtagctgagaaaacccttgagccagtttggaaggaggaggcctctttcgagctacctggattgctaattcagggaagtccagagaaatacattcttttccttatagttatgcacaggtccctggtgggtctggataaatttttagggcaggtggcaatcaatctcaatgacatctttgaggacaaacaaagaaggaaaacagagtggtttagattagaatccaaacaaggaaaacgaatcaaaaacaggggtgagataaaggtcaatattcagtttatgaggaacaatatgaccgcaagtatgtttgacttatcaatgaaggacaaaaccagatctccttttgcaaagttaaaagataagatgaagggtagaaaaaatgatggaacattttctgatacgtcttctgcaatcattccaagtactcacatgcccgatgccaatagtgaattttcaagtggtgaaatacagatgaaatccaaaccaaaaaagccttttctcttgggtcctcagcgactctcgtcagcgcattcaatgtctgatttatctgggtcccatatgtcttctgagaaactgaaggctggcaccataggtcaaacacatcttctcggacaccagttagattcctttggaacagttccagaaagtggaagtctcaaatctccacacagaagaacattaagctttgatacttctaaaatgaaccaacctgacagcattgtggatgaaggtgaattgtgtttcggaagacaaaatgacccatttacaaatgtgactgcttcattaccccaaaaatttgcaacactgccaaggaagaaaaatccatttgaagaaagcagcgaaacatgggacagcagcatgaatttattttcaaaaccaattgaaataagaaaagaaaataaaagagagaaaagggagaaagttagcctgtttgaaagagtgactggaaaaaaagatagcagaagatctgataaacttaacaatgggggatctgatagcccttgtgacttgaaatcacctaatgcatttagtgaaaatcgccaggactattttgattatgagtcaaccaatccatttacagcaaaattcagggcttcaaatataatgccatcttcaagttttcatatgagtccaacaagcaatgaagacctcaggaaaatcccggacagcaacccctttgatgccactgcagggtatcgtagtctgacctatgaagaggttctacaggagctggtgaaacacaaagaactccttaggaggaaagacacccacatccgggaactcgaggactacatcgacaacctccttgtaagggtaatggaagaaacgcccagtattctcagagtgccgtatgaaccatccaggaaagctggcaaattctctaacagttaataaagccaattgtattgtattgataattggacaaagagagagaaagaaagaaggaaggaaggaaaaacttgttactgaaagagactacactatcaggtttcattacatattctcctttattgtgaagagtagttttacctgtaaatattagcagggactatcaagagtgacctttgaagcaagctaaatcatttaaatgtttaaattgaaaatgggccagattctcaatgaataagtggttccttaggactcactcaggtgctggtactgacccactaatctgccataggcccagaaatatcttcagaagtacgtgagttgttcctcaggaatagatttttcataaagcagaattgatcctgtggctggtttctcagaaatcagtttgtagaaatatttagcttcaggaatactgctcgttataaacactactaaaaaaacagtttatattttatatacacatatgtacatgaatatatatatattcatgtatcttgtatataaaatataggcatatacctcatatatacatgtgtttttagaacatttagaaacaattgattgcctctaaagttaggctaccaatttcttgatttgaaaatgtgtgtgctctattgatgcaagacaagtcatccttcctactgtcatggtttgttatagagaagctgcttcaaatcactcttgactacatggaccttggtttcaaagtgagctgctatatattattctagcatcaaagtttttctctttccccaaaagtgatgatctcaagtccttttttaaagaatgacaaattttaggagacttcattaacttcataacagcatgaatttatttgaattaattaacatttgagtttgtttaaggtataagcagaagataagctaatatagcttgttttgttgaaattctgcatgcctttaaatcactagcaaagcaaatattataaagttatatctgaaaataattgtgggaagtatgtgattgcctggtgtgtctgataacccaaagcagcgggcagattccaggaatgaagaattaggcttggtttcaggttacataaataatagagcagatggttgcctttgggtcttgaaccaaaataagacttactaaaggaagagtgagtttttagaagagaactttacgagcgtgacattatgcattactccacatccaccctttaagaattgatttattacaaaattatgttctattttaaagtccactcccccaaaatactgatttcttccatggattatttttatatgatttgtacaaattttttctgaaatttaaattgacaagcaatgttataaaaatattgctaatcttctgcttatttttcagcctttaaagtctgaaatactataaaacactgagagtatctatgtctttctgaatttaaaatgaaaattcatgtccatatggagacttacatattccccaatctttccatgaattgcatttttttctaatacttatctctgttaagactccattgaaagttaaacaaaaagccgatataatagtttgggttttttttttttgcttattttagtattttgaatcagagaatacttggccaagctcgtatttgtaaactaaaaccccttgttatttgtatcttctgcatttcagttttactgtaagaacatacattttgaaattatgaacatttttttcataaaaattaaatgctttaagaaatggagaaggaaaaatagcttttatcaatttttttctcctcaagattctgtaataaacctcaaagtctggtgtagaatggtattttcccgtttgaggtcttggtagttttttttttttttttaaacatggtgccacttttaattaactaaatgttacaaaattctcagcatttgtttttgtctggtagtattattgagtcttttcatacacttcttaaaatgtgaaaatctatgttttcagtattatgacagtatctgcagatactataataatatgctttggccaaatttgctgtttatagagtgaaccaagatgtcagttttgtattggggatatgttttacataaatagaactcatttaaaagtatggttcaagtactgctcttctttttatggggaaattgatttttaaggagcgattcttttcctatataaaagctattgaggcttagctttattcatacatgagtgatttggttataactcaatcaaaatttttatctttaaatctgagacaagtattatatttaaaactagatctattaatacattcatcactgcctgaaaatttgctgttctaatgtttgtgaattttcactcattacctagagtaaacttattgcatattttcataatcagtcaaaataataaaactaaaaacaaaaagtaaaaattagttcccaagtaaatatatcagtgtttcctgtgtttgggcagaagtgcaaagtagttttaatttctcacgttgtagaaaaagaggccaaaaaggtcaccttagtttatttttccaaaacataactttaggtattctaatgtattttgttagttgcttagaaatggaaataaaatatatgtgcttattaaataatgcacagtacactagattatagagtttatttttgcttttatgctttaaagaatgcatgcccaaaacactactaccaacaagaggattttttaaaatcacagaattgatatttatctcaagactatcttaagctaatgtacttctgttacataattaaactatttctgctattatttttaaagcagtattattttataaccaattctaaaattcagctttaaaaatattgaacataccttcctaccacttacgcttcaagtttcatttattgaataccagggtcatatcttagaattgtatataaaacaacatgtaacccattcatgaaaaacgtttttaagtattgctttttgctgctatgttctgcattgagcctagttttgccattgtcccctgaatgtagtattatctatagattatacataactacatctattgcttttggtggtaaatcaagatttagttgtaattttccagctgtgaaaatgttgccttgtatttaaaagggtttcatgaatggaaacctaagtaaaactaagctcattagtgacagacttgttttcttcttgttattcctccagcaactccctcaccaccacgcctccctgcctaccatccccggaagggtgcttattctttaacaaagagaatctaaaaaaaaaaacaaaaaactgttgtctaatatatctacagtaaatgttacactagagcttttattttcctctgtagcttttcagaagaagcaatttaccttggatttgtaaatcaagctgaaacttttttgatgttcatgtactcatatgtcttgtaggtggtaggtgtcacttgtgtgtatgtgtaagtgaagtatgatgcatgctcattcacttggtccctttgaaataagggaaaggatcacagtgctgctgggccatgatggtatgtagaagggtctgtcagcacacatggaaagcccccatttgcacagatgtagaactttaataatccagatgcaatcattggaagtatttaatatgcaattggtagcaccttagctaattaatctgcatatgaagcattttctgatatatttaataagaggtatagaagctcttcaagcattaaaatagagttgatgtttcattccatttgttttatccatcaaaaaatgcactctcacagtggagttgaagtctaatacatgatacatgtgggcctgttagtcttcgaagcttccagatggtttgtgttttgaggtacaaaaaaatgctgcagatctagaaatgcatatatttagcgggtatttgaaagatagaagcattatttataactgaagagtataacacttatcttcttaagtaaatgctctcataacttgtatacatttttgcaggtacaaattcaaaagtatgtaagcattgtataatgtgacaattgtataatttatgtaatctgatgcatgaatcagaatttttatataatatatgattattgacttatagttgattaaagtgtttaaacttaa

SEQ ID NO: 25183 - DNA, 1599 bp, Homo sapiens
  source 1..1599: mol_type = unassigned DNA
atgatgctgtccgagcaagcccaaaagtggtttccaacccacgtgcaggtcacagtgctccaagccaaagatctgaagccaaaaggcaaaagtggtaccaatgacacatacactataattcagctgggcaaggaaaagtactccacctctgtagctgagaaaacccttgagccagtttggaaggaggaggcctctttcgagctacctggattgctaattcagggaagtccagagaaatacattcttttccttatagttatgcacaggtccctggtgggtctggataaatttttagggcaggtggcaatcaatctcaatgacatctttgaggacaaacaaagaaggaaaacagagtggtttagattagaatccaaacaaggaaaacgaatcaaaaacaggggtgagataaaggtcaatattcagtttatgaggaacaatatgaccgcaagtatgtttgacttatcaatgaaggacaaaaccagatctccttttgcaaagttaaaagataagatgaagggtagaaaaaatgatggaacattttctgatacgtcttctgcaatcattccaagtactcacatgcccgatgccaatagtgaattttcaagtggtgaaatacagatgaaatccaaaccaaaaaagccttttctcttgggtcctcagcgactctcgtcagcgcattcaatgtctgatttatctgggtcccatatgtcttctgagaaactgaaggctggcaccataggtcaaacacatcttctcggacaccagttagattcctttggaacagttccagaaagtggaagtctcaaatctccacacagaagaacattaagctttgatacttctaaaatgaaccaacctgacagcattgtggatgaaggtgaattgtgtttcggaagacaaaatgacccatttacaaatgtgactgcttcattaccccaaaaatttgcaacactgccaaggaagaaaaatccatttgaagaaagcagcgaaacatgggacagcagcatgaatttattttcaaaaccaattgaaataagaaaagaaaataaaagagagaaaagggagaaagttagcctgtttgaaagagtgactggaaaaaaagatagcagaagatctgataaacttaacaatgggggatctgatagcccttgtgacttgaaatcacctaatgcatttagtgaaaatcgccaggactattttgattatgagtcaaccaatccatttacagcaaaattcagggcttcaaatataatgccatcttcaagaaatactttgctgacccctgcagtagctgaatggagaggatctttgagatgggcagagctttttcatatgagtccaacaagcaatgaagacctcaggaaaatcccggacagcaacccctttgatgccactgcagggtatcgtagtctgacctatgaagaggttctacaggagctggtgaaacacaaagaactccttaggaggaaagacacccacatccgggaactcgaggactacatcgacaacctccttgtaagggtaatggaagaaacgcccagtattctcagagtgccgtatgaaccatccaggaaagctggcaaattctctaacagttaa

SEQ ID NO: 25184 - DNA, 4831 bp, Homo sapiens
  source 1..4831: mol_type = unassigned DNA
cgttagttctccgggtacctcaggcgcctcagcctccttagtctcctcatcctgcttcacaggctccgcggcctccggcctcctcggcccccgtcccccggcctcctcggcccccgtcccccgccatccgccgcccggatcctcgccgccctccctaggccgccccgccgccatgggcctgcgcccgccgcgccgccgggccgagggcagctgaggcgcggtgcgaagatgggcgaggacagagcagggcccgagcgccagccccagcagcccgggcgccccgcgcgcgcccgcccgcgccgccgaggggatgcccgcgcccgccgccgcgccctgagcgcctttgtctgccgcccgcgcccttccgcaccactagcctctcgggagcatggcgtcggccccgccggcctcgcccccgggctcggagccgccggggcccgacccggagccgggcgggccggacgggccgggggcggcacaactggctccgggccctgcggagctacgcctcggagcgcccgtcggcggccccgacccgcagtccccgggcctggatgagcctgcgcccggggccgctgcagatggcggggcgcgttggagcgccgggccggccccggggctggagggaggcccgcgagaccccgggccgtccgccccgccgccgcgctccggcccgcgggggcagcttgcgagccccgacgccccgggcccagggccgcgctccgaagcgccgcttccagaactcgacccgttgttctcctggactgaggagcccgaggagtgtggccccgcgagctgcccggagagcgcgcctttccgcttgcaggggtccagcagcagccaccgagcgcggggcgaggtcgacgtcttctctcccttccccgcgcccacggcgggcgagctggcgctggagcaaggtcccgggtccccgccgcagccctcggacctcagccagacccacccccttccgagcgagcccgtggggagtcaggaggacggcccccgcctccgagccgtgttcgatgccctggacggggatggggacggtttcgtccgcatcgaggacttcatccagtttgctacggtctacggggcagagcaggtgaaggacttaactaagtacttggatcccagtgggctcggcgtgatcagctttgaagacttctaccaagggatcacagccatcagaaacggagatcctgatggccagtgctacggtggtgtcgcttctgcccaagatgaggagcccctggcctgcccggacgagttcgatgacttcgtcacctatgaggccaacgaggtgacggacagcgcgtacatgggctccgagagcacctacagtgagtgtgagaccttcacggacgaggacaccagcaccctggtgcaccctgagctgcaacctgaaggggacgcagacagtgccggcggctcggccgtgccctctgagtgcctggacgccatggaggagcccgaccatggtgccctgctgctgctcccaggcaggcctcacccccatggccagtctgtcatcacggtgatcgggggcgaggagcactttgaggactacggtgaaggcagtgaggcggagctgtccccagagaccctatgcaacgggcagctgggctgcagtgaccccgctttcctcacgcccagtccgacaaagcggctctccagcaagaaggtggcaaggtacctgcaccagtcaggggccctgaccatggaggccctggaggacccttcccccgagctcatggagggcccagaggaggacattgctgacaaggttgtcttcctggaaaggcgtgtgctggagctggaaaaggacacggcagccaccggtgagcaacacagccgcctgaggcaggagaacctgcagctggtgcacagagcaaacgccctggaggagcagctgaaggagcaggagctgagagcctgcgagatggtcctggaagagacccggcgtcagaaggagctcctgtgcaagatggagagggagaagagcattgagatcgagaacctgcagaccaggctacagcaactggacgaggagaacagtgaactccggtcctgcacgccctgtctgaaggccaacattgagcgtctggaggaggagaagcagaagctgttggatgagatagagtcgctgacgctgcggctcagtgaagagcaggagaacaagaggagaatgggggacaggctgagtcacgagaggcaccagttccagagggacaaggaggccacccaggagctgatcgaggacctccgaaagcagctggagcacctgcagctcctcaagctggaggccgagcagcggcggggccgcagcagcagcatgggcctgcaggagtaccacagccgcgcccgggagagcgagctggagcaggaggtccgcaggctgaagcaggacaaccgcaacctgaaggagcagaacgaggagctgaacgggcagatcattaccctcagcatccagggcgccaagagcctcttctccacagccttctctgagtccctggctgcagagatcagctccgtctcccgagatgagctcatggaggcgattcagaagcaggaggagatcaacttccgcctgcaggactacatcgacaggatcatcgtggccatcatggagaccaacccgtccatcctggaggtcaagtagaggcaggaaggtccagcctgagctggattcgggactccaacaccctggagtggttccgtcagaccatgaggagccaagaccagcaggtcccacagccgacagtgcccagagcatgcagggaaccctcgtgcagctgagctggggccgccaaagaccggggctgccaaaggggcagagggtggtggagaggagagggagaaagggaagtcccagggcccggggtccacagaggatgagggttgtggcagggccgtccatcagcgctgaccttccgggggcccagagcttcccagccctgagtcaagctggccatgaacgcgtacacttcagttcagcaggatgggctggagagcctctctgtgcagcggtgtggggtgagccctgctgtggcctccttgtggtggtccctcttcccacgtgcagccctgttgggaagaaaggaagaaaacaggtccctccaggggtgctgctgcctaagccacccacataagtacgctggtgccgtgtcacccatgttgagccgctcctgatggctgacgggctcccagaccctcacctcggacatggtggtgggggaaggacgggtgggcaaggctggtgcgttccccagctctccctacgctgctcgggccattgcccagccagatgtggtcacctcagtccagctctggggcctccaggccatgtggctgttcccacggcccagtcctcgctgcagtaacccctgggggctctgaccacctatgggggccgggcaggagcctctggggcctccactccgacatcaggacctgagatgaccgctgtgtggcgctctctccctgggcagggtggatgccacaggcccctctggctcccaggtgctgcttctccacaggtgcggcctggcccggcctcctaaaggccacaccctccccacgcacttcccaggccagaatccaaacatcgggaaccctgttttcttctgggtgtgtctcacttagaaatcgtggttcttccccgagggtgcatgttgcaggagggagagggcagggaagactcacagcagagcaggagggggcctgtgcttctcggggtctgcaccccaggcacagcggtgtcaccccgcaggaccgcgggcctgccccaacccccagcattcccgggtgggcccagaccccatcaccaagactggccacccgctgcgtgtgtgtgcgcgcgcgtgtacgtgtggccccacatccgccgccttccacgctaggatgtaagaggtcgcctcctattgtacatttggggaaagccttgggtgtaaatcagtgtaaacttggaggagagatttttctatcatgtagagtaggtattttttatagattgaaggttgatcaattttttaatactttcaagagaaaactgtgtatacacatgaaatatatatatatatatatatatatatatgtataatatataaagactggcaccctgcctctctgtgcccaggcccagccctggtgacatggcaccactcagcagtgctgtcactgtaagcatggactcccaggagacagtgtgggaaacgctcctgctttaattccccgagaaacggctcttcctgcctggatgcaggagggcaggggccaccacagattaaagctgttactgcacacgcagaggccggcttcttcctccaggggggccacagggtggggtgggagtcttctgggcctggcccagcttccctcaaggcgtccgaggccatcagttgtctgagctcagaacccagcagacctgcctggctctgcagcttggtcagactaagacccttccaaggccgtaggattgcacctccaggcccagtggagcctggcagctttccagccaggttctggatcctgacgagctgctgagacagcatcaaggtggggcaggtggggcggggcaaattgggcagcacagggctgtgtgggcatcagggctctgggtcacacgcctctggggacgtacgtcccatgtcgggagagccgtcaaaacgtccccgggattaagagaagagtggggggcagggcgcagaggctcacgccataatctcagcactttgggaggccaaggcaggaggatcgcttgaacccgggagttcaagaccagcctgggcaacatagcaaggccccatctctaaaaaataaaaaattaaccagg

SEQ ID NO: 25185 - DNA, 3022 bp, Homo sapiens
  source 1..3022: mol_type = unassigned DNA
atgtctctgcttagagccaacgaggtgacggacagcgcgtacatgggctccgagagcacctacagtgagtgtgagaccttcacggacgaggacaccagcaccctggtgcaccctgagctgcaacctgaaggggacgcagacagtgccggcggctcggccgtgccctctgagtgcctggacgccatggaggagcccgaccatggtgccctgctgctgctcccaggcaggcctcacccccatggccagtctgtcatcacggtgatcgggggcgaggagcactttgaggactacggtgaaggcagtgaggcggagctgtccccagagaccctatgcaacgggcagctgggctgcagtgaccccgctttcctcacgcccagtccgacaaagcggctctccagcaagaaggtggcaaggtacctgcaccagtcaggggccctgaccatggaggccctggaggacccttcccccgagctcatggagggcccagaggaggacattgctgacaaggttgtcttcctggaaaggcgtgtgctggagctggaaaaggacacggcagccaccggtgagcaacacagccgcctgaggcaggagaacctgcagctggtgcacagagcaaacgccctggaggagcagctgaaggagcaggagctgagagcctgcgagatggtcctggaagagacccggcgtcagaaggagctcctgtgcaagatggagagggagaagagcattgagatcgagaacctgcagaccaggctacagcaactggacgaggagaacagtgaactccggtcctgcacgccctgtctgaaggccaacattgagcgtctggaggaggagaagcagaagctgttggatgagatagagtcgctgacgctgcggctcagtgaagagcaggagaacaagaggagaatgggggacaggctgagtcacgagaggcaccagttccagagggacaaggaggccacccaggagctgatcgaggacctccgaaagcagctggagcacctgcagctcctcaagctggaggccgagcagcggcggggccgcagcagcagcatgggcctgcaggagtaccacagccgcgcccgggagagcgagctggagcaggaggtccgcaggctgaagcaggacaaccgcaacctgaaggagcagaacgaggagctgaacgggcagatcattaccctcagcatccagggcgccaagagcctcttctccacagccttctctgagtccctggctgcagagatcagctccgtctcccgagatgagctcatggaggcgattcagaagcaggaggagatcaacttccgcctgcaggactacatcgacaggatcatcgtggccatcatggagaccaacccgtccatcctggaggtcaagtagaggcaggaaggtccagcctgagctggattcgggactccaacaccctggagtggttccgtcagaccatgaggagccaagaccagcaggtcccacagccgacagtgcccagagcatgcagggaaccctcgtgcagctgagctggggccgccaaagaccggggctgccaaaggggcagagggtggtggagaggagagggagaaagggaagtcccagggcccggggtccacagaggatgagggttgtggcagggccgtccatcagcgctgaccttccgggggcccagagcttcccagccctgagtcaagctggccatgaacgcgtacacttcagttcagcaggatgggctggagagcctctctgtgcagcggtgtggggtgagccctgctgtggcctccttgtggtggtccctcttcccacgtgcagccctgttgggaagaaaggaagaaaacaggtccctccaggggtgctgctgcctaagccacccacataagtacgctggtgccgtgtcacccatgttgagccgctcctgatggctgacgggctcccagaccctcacctcggacatggtggtgggggaaggacgggtgggcaaggctggtgcgttccccagctctccctacgctgctcgggccattgcccagccagatgtggtcacctcagtccagctctggggcctccaggccatgtggctgttcccacggcccagtcctcgctgcagtaacccctgggggctctgaccacctatgggggccgggcaggagcctctggggcctccactccgacatcaggacctgagatgaccgctgtgtggcgctctctccctgggcagggtggatgccacaggcccctctggctcccaggtgctgcttctccacaggtgcggcctggcccggcctcctaaaggccacaccctccccacgcacttcccaggccagaatccaaacatcgggaaccctgttttcttctgggtgtgtctcacttagaaatcgtggttcttccccgagggtgcatgttgcaggagggagagggcagggaagactcacagcagagcaggagggggcctgtgcttctcggggtctgcaccccaggcacagcggtgtcaccccgcaggaccgcgggcctgccccaacccccagcattcccgggtgggcccagaccccatcaccaagactggccacccgctgcgtgtgtgtgcgcgcgcgtgtacgtgtggccccacatccgccgccttccacgctaggatgtaagaggtcgcctcctattgtacatttggggaaagccttgggtgtaaatcagtgtaaacttggaggagagatttttctatcatgtagagtaggtattttttatagattgaaggttgatcaattttttaatactttcaagagaaaactgtgtatacacatgaaatatatatatatatatatatatatatatgtataatatataaagactggcaccctgcctctctgtgcccaggcccagccctggtgacatggcaccactcagcagtgctgtcactgtaagcatggactcccaggagacagtgtgggaaacgctcctgctttaattccccgagaaacggctcttcctgcctggatgcaggagggcaggggccaccacagattaaagctgttactgc

SEQ ID NO: 25186 - DNA, 3203 bp, Homo sapiens
  source 1..3203: mol_type = unassigned DNA
attagagcgtgtctgggagcaggttaaactttctcctaggtggtgatgtgcctccaggtgagcgcacaggctttgcagaaaccccagcatgacaagcaagtaggaaggtgacattgttgtttgagaaaagccagtgacccggttgggacggagacacgatggggagccggtctccaacagcatgcccttcctgaaggccaacgaggtgacggacagcgcgtacatgggctccgagagcacctacagtgagtgtgagaccttcacggacgaggacaccagcaccctggtgcaccctgagctgcaacctgaaggggacgcagacagtgccggcggctcggccgtgccctctgagtgcctggacgccatggaggagcccgaccatggtgccctgctgctgctcccaggcaggcctcacccccatggccagtctgtcatcacggtgatcgggggcgaggagcactttgaggactacggtgaaggcagtgaggcggagctgtccccagagaccctatgcaacgggcagctgggctgcagtgaccccgctttcctcacgcccagtccgacaaagcggctctccagcaagaaggtggcaaggtacctgcaccagtcaggggccctgaccatggaggccctggaggacccttcccccgagctcatggagggcccagaggaggacattgctgacaaggttgtcttcctggaaaggcgtgtgctggagctggaaaaggacacggcagccaccggtgagcaacacagccgcctgaggcaggagaacctgcagctggtgcacagagcaaacgccctggaggagcagctgaaggagcaggagctgagagcctgcgagatggtcctggaagagacccggcgtcagaaggagctcctgtgcaagatggagagggagaagagcattgagatcgagaacctgcagaccaggctacagcaactggacgaggagaacagtgaactccggtcctgcacgccctgtctgaaggccaacattgagcgtctggaggaggagaagcagaagctgttggatgagatagagtcgctgacgctgcggctcagtgaagagcaggagaacaagaggagaatgggggacaggctgagtcacgagaggcaccagttccagagggacaaggaggccacccaggagctgatcgaggacctccgaaagcagctggagcacctgcagctcctcaagctggaggccgagcagcggcggggccgcagcagcagcatgggcctgcaggagtaccacagccgcgcccgggagagcgagctggagcaggaggtccgcaggctgaagcaggacaaccgcaacctgaaggagcagaacgaggagctgaacgggcagatcattaccctcagcatccagggcgccaagagcctcttctccacagccttctctgagtccctggctgcagagatcagctccgtctcccgagatgagctcatggaggcgattcagaagcaggaggagatcaacttccgcctgcaggactacatcgacaggatcatcgtggccatcatggagaccaacccgtccatcctggaggtcaagtagaggcaggaaggtccagcctgagctggattcgggactccaacaccctggagtggttccgtcagaccatgaggagccaagaccagcaggtcccacagccgacagtgcccagagcatgcagggaaccctcgtgcagctgagctggggccgccaaagaccggggctgccaaaggggcagagggtggtggagaggagagggagaaagggaagtcccagggcccggggtccacagaggatgagggttgtggcagggccgtccatcagcgctgaccttccgggggcccagagcttcccagccctgagtcaagctggccatgaacgcgtacacttcagttcagcaggatgggctggagagcctctctgtgcagcggtgtggggtgagccctgctgtggcctccttgtggtggtccctcttcccacgtgcagccctgttgggaagaaaggaagaaaacaggtccctccaggggtgctgctgcctaagccacccacataagtacgctggtgccgtgtcacccatgttgagccgctcctgatggctgacgggctcccagaccctcacctcggacatggtggtgggggaaggacgggtgggcaaggctggtgcgttccccagctctccctacgctgctcgggccattgcccagccagatgtggtcacctcagtccagctctggggcctccaggccatgtggctgttcccacggcccagtcctcgctgcagtaacccctgggggctctgaccacctatgggggccgggcaggagcctctggggcctccactccgacatcaggacctgagatgaccgctgtgtggcgctctctccctgggcagggtggatgccacaggcccctctggctcccaggtgctgcttctccacaggtgcggcctggcccggcctcctaaaggccacaccctccccacgcacttcccaggccagaatccaaacatcgggaaccctgttttcttctgggtgtgtctcacttagaaatcgtggttcttccccgagggtgcatgttgcaggagggagagggcagggaagactcacagcagagcaggagggggcctgtgcttctcggggtctgcaccccaggcacagcggtgtcaccccgcaggaccgcgggcctgccccaacccccagcattcccgggtgggcccagaccccatcaccaagactggccacccgctgcgtgtgtgtgcgcgcgcgtgtacgtgtggccccacatccgccgccttccacgctaggatgtaagaggtcgcctcctattgtacatttggggaaagccttgggtgtaaatcagtgtaaacttggaggagagatttttctatcatgtagagtaggtattttttatagattgaaggttgatcaattttttaatactttcaagagaaaactgtgtatacacatgaaatatatatatatatatatatatatatatgtataatatataaagactggcaccctgcctctctgtgcccaggcccagccctggtgacatggcaccactcagcagtgctgtcactgtaagcatggactcccaggagacagtgtgggaaacgctcctgctttaattccccgagaaacggctcttcctgcctggatgcaggagggcaggggccaccacagattaaagctgttactgc

SEQ ID NO: 25187 - DNA, 804 bp, Homo sapiens
  source 1..804: mol_type = unassigned DNA
caggttaaactttctcctaggtggtgatgtgcctccaggtgagcgcacaggctttgcagaaaccccagcatgacaagcaagtaggaaggtgacattgttgtttgagaaaagccagtgacccggttgggacggagacacgatggggagccggtctccaacagcatgcccttcctgaaggtgtgtacagagccaggcccagcctgtgaggccacccgggccagcatctgagggccaacgaggtgacggacagcgcgtacatgggctccgagagcacctacagtgagtgtgagaccttcacggacgaggacaccagcaccctggtgcaccctgagctgcaacctgaaggggacgcagacagtgccggcggctcggccgtgccctctgagtgcctggacgccatggaggagcccgaccatggtgccctgctgctgctcccaggcaggcctcacccccatggccagtctgtcatcacggtgatcgggggcgaggagcactttgaggactacggtgaaggcagtgaggcggagctgtccccagagaccctatgcaacgggcagctgggctgcagtgaccccgctttcctcacgcccagtccgacaaagcggctctccagcaagaaggtggcaaggtacctgcaccagtcaggggccctgaccatggaggccctggaggacccttcccccgagctcatggagggcccagaggaggacattgctgacaaggttgtcttcctggaaaggcgtgtgctggagctggaaaaggacacggcagccaccggtgagcaacacagccgcctgaggcagg

SEQ ID NO: 25188 - DNA, 4384 bp, Homo sapiens
  source 1..4384: mol_type = unassigned DNA
tcctgcttcacaggctccgcggcctccggcctcctcggcccccgtcccccggcctcctcggcccccgtcccccgccatccgccgcccggatcctcgccgccctccctaggccgccccgccgccatgggcctgcgcccgccgcgccgccgggccgagggcagctgaggcgcggtgcgaagatgggcgaggacagagcagggcccgagcgccagccccagcagcccgggcgccccgcgcgcgcccgcccgcgccgccgaggggatgcccgcgcccgccgccgcgccctgagcgcctttgtctgccgcccgcgcccttccgcaccactagcctctcgggagcatggcgtcggccccgccggcctcgcccccgggctcggagccgccggggcccgacccggagccgggcgggccggacgggccgggggcggcacaactggctccgggccctgcggagctacgcctcggagcgcccgtcggcggccccgacccgcagtccccgggcctggatgagcctgcgcccggggccgctgcagatggcggggcgcgttggagcgccgggccggccccggggctggagggaggcccgcgagaccccgggccgtccgccccgccgccgcgctccggcccgcgggggcagcttgcgagccccgacgccccgggcccagggccgcgctccgaagcgccgcttccagaactcgacccgttgttctcctggactgaggagcccgaggagtgtggccccgcgagctgcccggagagcgcgcctttccgcttgcaggggtccagcagcagccaccgagcgcggggcgaggtcgacgtcttctctcccttccccgcgcccacggcgggcgagctggcgctggagcaaggtcccgggtccccgccgcagccctcggacctcagccagacccacccccttccgagcgagcccgtggggagtcaggaggacggcccccgcctccgagccgtgttcgatgccctggacggggatggggacggtttcgtccgcatcgaggacttcatccagtttgctacggtctacggggcagagcaggtgaaggacttaactaagtacttggatcccagtgggctcggcgtgatcagctttgaagacttctaccaagggatcacagccatcagaaacggagatcctgatggccagtgctacggtggtgtcgcttctgcccaagatgaggagcccctggcctgcccggacgagttcgatgacttcgtcacctatgaggccaacgaggtgacggacagcgcgtacatgggctccgagagcacctacagtgagtgtgagaccttcacggacgaggacaccagcaccctggtgcaccctgagctgcaacctgaaggggacgcagacagtgccggcggctcggccgtgccctctgagtgcctggacgccatggaggagcccgaccatggtgccctgctgctgctcccaggcaggcctcacccccatggccagtctgtcatcacggtgatcgggggcgaggagcactttgaggactacggtgaaggcagtgaggcggagctgtccccagagaccctatgcaacgggcagctgggctgcagtgaccccgctttcctcacgcccagcactgaccctcttgccgcaaagctgcacagcatcctcactgatgaggcgtttgagttttactgtagccagtgccacaaacaaatcaaccgccttgaggatctttctgcccgcctgagtgatcttgaaatgaatagtccgacaaagcggctctccagcaagaaggtggcaaggtacctgcaccagtcaggggccctgaccatggaggccctggaggacccttcccccgagctcatggagggcccagaggaggacattgctgacaaggttgtcttcctggaaaggcgtgtgctggagctggaaaaggacacggcagccaccggtgagcaacacagccgcctgaggcaggagaacctgcagctggtgcacagagcaaacgccctggaggagcagctgaaggagcaggagctgagagcctgcgagatggtcctggaagagacccggcgtcagaaggagctcctgtgcaagatggagagggagaagagcattgagatcgagaacctgcagaccaggctacagcaactggacgaggagaacagtgaactccggtcctgcacgccctgtctgaaggccaacattgagcgtctggaggaggagaagcagaagctgttggatgagatagagtcgctgacgctgcggctcagtgaagagcaggagaacaagaggagaatgggggacaggctgagtcacgagaggcaccagttccagagggacaaggaggccacccaggagctgatcgaggacctccgaaagcagctggagcacctgcagctcctcaagctggaggccgagcagcggcggggccgcagcagcagcatgggcctgcaggagtaccacagccgcgcccgggagagcgagctggagcaggaggtccgcaggctgaagcaggacaaccgcaacctgaaggagcagaacgaggagctgaacgggcagatcattaccctcagcatccagggcgccaagagcctcttctccacagccttctctgagtccctggctgcagagatcagctccgtctcccgagatgagctcatggaggcgattcagaagcaggaggagatcaacttccgcctgcaggactacatcgacaggatcatcgtggccatcatggagaccaacccgtccatcctggaggtcaagtagaggcaggaaggtccagcctgagctggattcgggactccaacaccctggagtggttccgtcagaccatgaggagccaagaccagcaggtcccacagccgacagtgcccagagcatgcagggaaccctcgtgcagctgagctggggccgccaaagaccggggctgccaaaggggcagagggtggtggagaggagagggagaaagggaagtcccagggcccggggtccacagaggatgagggttgtggcagggccgtccatcagcgctgaccttccgggggcccagagcttcccagccctgagtcaagctggccatgaacgcgtacacttcagttcagcaggatgggctggagagcctctctgtgcagcggtgtggggtgagccctgctgtggcctccttgtggtggtccctcttcccacgtgcagccctgttgggaagaaaggaagaaaacaggtccctccaggggtgctgctgcctaagccacccacataagtacgctggtgccgtgtcacccatgttgagccgctcctgatggctgacgggctcccagaccctcacctcggacatggtggtgggggaaggacgggtgggcaaggctggtgcgttccccagctctccctacgctgctcgggccattgcccagccagatgtggtcacctcagtccagctctggggcctccaggccatgtggctgttcccacggcccagtcctcgctgcagtaacccctgggggctctgaccacctatgggggccgggcaggagcctctggggcctccactccgacatcaggacctgagatgaccgctgtgtggcgctctctccctgggcagggtggatgccacaggcccctctggctcccaggtgctgcttctccacaggtgcggcctggcccggcctcctaaaggccacaccctccccacgcacttcccaggccagaatccaaacatcgggaaccctgttttcttctgggtgtgtctcacttagaaatcgtggttcttccccgagggtgcatgttgcaggagggagagggcagggaagactcacagcagagcaggagggggcctgtgcttctcggggtctgcaccccaggcacagcggtgtcaccccgcaggaccgcgggcctgccccaacccccagcattcccgggtgggcccagaccccatcaccaagactggccacccgctgcgtgtgtgtgcgcgcgcgtgtacgtgtggccccacatccgccgccttccacgctaggatgtaagaggtcgcctcctattgtacatttggggaaagccttgggtgtaaatcagtgtaaacttggaggagagatttttctatcatgtagagtaggtattttttatagattgaaggttgatcaattttttaatactttcaagagaaaactgtgtatacacatgaaatatatatatatatatatatatatatatgtataatatataaagactggcaccctgcctctctgtgcccaggcccagccctggtgacatggcaccactcagcagtgctgtcactgtaagcatggactcccaggagacagtgtgggaaacgctcctgctttaattccccgagaaacggctcttcctgcctggatgcaggagggcaggggccaccacagattaaagctgttactgc

SEQ ID NO: 25189 - DNA, 8625 bp, Homo sapiens
  source 1..8625: mol_type = unassigned DNA
ccttcccctccccactcttctccttccctcccctcccctcccttcccctccggagcggctggggctgcggcgccgctgctgacacggatcggccgcggccgccaccgggcggaggctgcgcggcgcagacccagacgggcggccccggagggcgcgcggcgatggcggcggcgggcaggcggcgggcgcggcgggcgaggggtccgggctgagctgcgggccggcccggatggcgggcggcgcgggctggtcgggcgcccccgcggctctgctgcgctccgtgcgccgcctgcgcgaggtgttcgaggtgtgcggccgcgaccccgacggcttcctgcgcgtggagcgcgtcgcggcgctcggactgcgcttcggccagggcgaggaggtggaaaaacttgtgaaatatttggatcccaacgacctggggagaatcaacttcaaggacttttgccggggggtgttcgccatgaaagggtgcgaggagctgctgaaggatgtgctgtcggtggagagcgcggggacgctgccgtgcgcgccagagatcccagactgcgtggagcagggcagcgaggtcacaggccccacctttgctgatggcgagctcatccccagggaacccggcttttttcccgaggacgaggaggaggctatgacgctggcgccacctgagggcccccaggagttgtacacagacagccccatggagagcactcagagcctggaggggtctgtcgggagtcctgccgagaaggacgggggacttgggggcctgtttctgccagaagacaagtccctggtccacactccatccatgacgacctcagacctttctacacactccaccacctcgctcatcagcaatgaggagcagtttgaagactatggggagggtgacgatgtggactgtgcccccagcagcccttgccccgatgatgagaccaggaccaacgtctactcggacctggggtcttcggtgtcttccagtgcggggcagacgcctaggaaaatgcggcacgtgtacaacagcgaattgctagatgtttactgctctcaatgctgcaagaaaatcaacctgctcaatgacttggaagcccgactgaaaaacctgaaggccaacagccccaaccgaaagatctccagcacggcctttggacggcagctcatgcacagcagcaacttcagcagcagcaatggcagcaccgaagacctgttccgggacagcattgactcttgcgacaatgacatcacagagaaggtaagcttcctggaaaagaaggtgacagagctggagaatgacagcctgaccaatggggacctgaagagcaagctgaagcaagagaacacacagctggtgcacagggtgcatgagctggaggagatggtgaaggatcaggagaccacggccgagcaggctctggaggaggaggcgcggcgccaccgcgaggcctacggcaagctggagagggagaaggctaccgaggtggagctgctcaatgccagggtgcagcagttggaggaagaaaatacagagcttagaacaacagtgactcggctcaagtctcaaacagagaaactggatgaggagcggcagcgcatgtctgaccgtctggaggacaccagcctgcggctcaaagatgagatggacctgtacaagcgcatgatggacaagctgcgacagaaccgccttgagttccagaaggagcgggaggcgacgcaggagctcatcgaggacttgcggaaggagctggagcacctgcagatgtacaagctggactgcgagcggccaggcaggggccgcagtgcctcctctggcctaggcgagttcaatgccagggcccgcgaggtggagctcgagcacgaggtcaagcggctcaagcaggagaattataagctgcgggatcagaacgacgacttgaatgggcagattttgagcctcagcctctacgaagcaaaaaacctctttgctgcccagactaaagcccagtctctggctgcggagatagacaccgcctcgcgcgatgagctaatggaagccctgaaggagcaggaggagatcaacttccggctgaggcagtacatggacaagattatcctcgccatcctggaccacaatccctccatcctcgagatcaaacactaaggcacggggctggctgcagagcagccttaggaccctgggaccaagggcagaccctgcccaaggatgcaggcctaagccgggcctcacactcacactgtaaatgtctctctggccaccatgcgttacgtgtacccgtgtatatgtggggaggctgtgcacacgagcgaggggtgagtggccgtggctgtgggcagcatccacacggttagccgtgcatgcactttgtggcccctttgcaaggggcagagggtactggaagtgggaggaggcaaggtctgctatcaggagttactgtaaaaacaagaactggaagctcgtgtttccggtactgggtaaaatgattctacctctggggataaggattcacattcgctctagtacgatgggctctttcaccccactcctagtccccttgggagtgggagcaaaattgtgatctttcctaggagtttgaatgccccatatttgtgtcctcgccagctctttggccacctttcaagccccagtgttcaagctcagagaggatgaaggggcatctggagggtccatgagatggggccctcaccaaatgccttggccaccggccagcagccctctgtgatgtgtgtgcagagtgaacagaggactcaggtttcatagcagctagtgcggggcatcctcatcctgtacctatagagttcgtgcactcccccatccatgctacctacctccccgtttctgtttcagttttaagacaatgaagcagcattcactgcgtcattgtaacatgaagggataaaaatgaaggagaaggagggtttgggatgggtgtctaaggcaggagttgacatcgggcaaccaaagaaatgagttttggggaggaacacaactcccatcccagtcagtttccttcccatggctgcatcttaagatggatgcacggagaaaccgtctgcctggctccctgtcttcattctccacgcagcctggtgatggcaggcctgggtttggatttcagaatcctagctccgggctccactcgtgtggcagcaagactgcttcgttccagcgtttagaaacacacctgtatttgattctcagccaggggagcactcgctgcactggtgggaggcggttgggaaagttgcaggaaaaccttagtcttccatccttctgacccatggtggaaattcacaccatggatttttaatggatctttgttctaggcagctgggaatagacatggtacttaccttagagttttccaatttatctcaattttatatggcttgtgattcattttcttaatccaaatatatataaacgtgtgtggtcttattcttccccctgcagtttcttgctttcttcagcacatcttatagtatgagaaggaaggtttgggcatgttgggaagggcggtggagggggagttgcagaaagagagggcagtgagggtgaggagaggggatctggggacttgggtgtgacacctgcttgacagaggcagggctgtggccaggaccaaccttcaattccattccaatcagcctttgcatttgttggatctcgtggcttctttttaatcttttgttggggattagtttcatgctgcacataatggggttgcactggtctgacccaggactttggagccacccacactgggaagactaggctaggcagtcggtcttctaggagtttctcagccccttaggacgcgggtctccttgggctcccccaagggttctgcgaagaggcagtggaagaaggcatgaggagagggtctcttgagaatttgccaataggaaggagtggccacggctgaaaggaacaagacagatcctgacatagctttggcctgggtgttaggtcagaaggagtactggtgcgtgggggccttaccccagggttgagtattttatctgtaaaatgttatctgccctttggctgcattggaatttcagagaaggctgcagaggcctgggttacacagcctgagtcacaacgtgggaaggaatctctgccacgggaaaggtgggcggaagcagctggcagcctggggcgtgcttcaggctcctccctctaaggggcgccatgggaacaggctccggagggagccggcgtctgaaaggcccccgggacctgctgcagtgccagaggggcctctggagcaggcctggcttttaaatggggggctgaattccagctcacacacacctcaagtccaaccttactttcttcagccagaatacatttcttgtaaaacctggcttgttgcttggcttttaaagatggtgtatgtttgtaaaaatattcttctgggctcaaaagctagcttgagggggcagatgccccaggtgtcccagctccacagcccctggcagatcccagaccccttggtggcaggtcccagagcctaggtggtaggagcttgatctttgtttctgcccttacccctcagtagtggggctgcgaggtagtagacaggatgcccagttaagtttgaatttcagatagaaaataattttagaataaatatgttctatctaatacatgggacagatgttatttttagagataggatcttgctctgttgcccaggctggagtgtagtggtatgatcatagctcaccacaaccttgaactcccaggctcaagcgatcctcccgccttaactgcctgagtagctgggactacaggcatgcaccaccacgcccagctaatttttcttattttttgtagagacagggtctcactgtgttgcctcactcgagctgctgacctcaagtgatcctcccacctcagcctgccaaagcactgggattacaggcatgagccaccatgcctggccaggacatatttgaaatggggagattttaaaaattctgatgattagactgaatcctcagacgttctggtttgattgttgtgggtgtagcccaggcatgggattttttaaagagctgctcaggtaattccaatttaattgcgtgtcctacttgggttttttgtttgtttttattgtttttgctaaacctggcaaccctaccgagtagggattagcagtaacttatctgaaatttagaggtgttttgggggtggggcgagggtttctgtagtagactcagattttacatggccctgagctgcccttgcgttcagttggaagccacgcaaaatgaactgaaccaggagtgagcttcgtgtacattatctattagaaaatgaagtaccttctggttcagctagtccctgtgcgttgagaggctttaagaaacttctagtaaaaatgtttttttcttttagctttgaattggccagagtttatcctagattattttattttaaattggtagaattctttgcgaactgtcacagagaaattccttttcatgactttatttctgacctattaaaacatgaacaggccaggcatggtggctcacgcctgtaatcctagcacttgggaggcagtggcaggcggatcacttgagctcaggagtcctaaaccagcctgggcaacatagtgataccttgtctctaccaaaagttaaaaaaaaaaaaaaaaaagctcaagaacctgcacgagggcctaaaacagtgggctcagctttggctgtgcattggaatcacctggggagatttgtaagcttctgctgtctgggctgaacccccagaggttcggattgaattggtgtggggtgtggtccaggcatcgagatgtgtaaagacctccccaggtgatgatatgcagtccgaggttgagactgccctgtcctgcaaggtcgttggccagaggtagaggaaactggtcaaagtggctgttgggcttgtcaagcccgtggctgaatgacagtgagctctcttgctgggagggttccttttcctgttgttgaatggtcctggcctgcaggatgggaggccagatgccttcaggagctggtggatccagctgttctcaccagcctggaggttagcagaccagagtgggtgggcaggaccttggcctggtgcccctggaatcagtgggtggcatgtgttgggatatactggctacaggctcatctcaaagagcaggtagaacagagtcagcagggaactgacaggtggggctgtccccctgaaagcagccgcagaaacagctgccacctatttgcatagctgagcaggaggacatactgtctttgtgggttttgcttctggtctgtttcctgactgggttgataaagggagtcccagctcgttccctgttagccaaaccagcatcctactcacacaccggacactccaggtgctagtccactggtgctggtgttcaggggagttggggggggggggcgcggggacagaagcgcgggttcttggttccaatgagggacttagcagaagcctccaggggccagcagggccaggtgaaactgggagaaatgaagccctctgtgtcctgtgtgtgtggtggggtttaatgcattagcaaatttaaacttaaaaactaactctaggccgggcacggtggctcacacctgtaatcccagcactttgggaggccaaggcaggtggattgcctgagctcaggagttcgagaccagcctggacaacatggtgaaactcttgtctttatttttttaaaaaaacaaaaagtaactttcgatgtgatcataccaggaaagttttgcgtggtcaccatgccaagaaaatgactttggttgcccagcagatccacagcgactctttctcaagggctactgtggattctagattgaggaaaggggccacttaggactcagtgctggtatcctccacagtcctttctcccagactctggccctccctttgggacccaggaaatcccctctagggtgacgctgctggctaggaagactgaggtctgctgcgccaaggggcctcaagttagaagggccatgccgttcagtggatgactttgagcgctgatcctagggacctgccaggtcctcacttcctgccctgggtgcacacatgaatggggcagccagcaggaagcgggagaggctggaaccaggagcctgccctacctgcatggcaggacaactctgaggcccttctgccatattctctgctacccaccagagaaaataggctgccttctagaaagatttgtttctaaaagcgtagaccctggggaagtataatgtcaccatgctcaccaggcgaggtttcccatatgacctccctgccccgacctcgtaggttgctcctttccccatctgtaaggtagagatgtctgccccggagctaccagctggggatggcatccaggccatgtctcctgcaggatccaagtgctgttgtccccagggtgaccctgcctcctgctggggcccatccgctttgctgtgctgcacaggctgttttcatctgcatggtttggggtctttgtccttgtgccttttcttccccatcgccactgtacaggattttccacattgcccactgcctccttttctacatcgtctcatctccctggcctttcccgagccctgtaaatgtgtactttttcaacgtgcctcccccaggtgaggccagctctcccgggcacattcgtccacaaggatcaggccccacttacccttggctcgctcagcctgtagacttggtaactttgtacagaatctttcattattgtcttaagcatggggggctaggacccacttagtccctcctccagcctgcagctaatttaggagccttgcattccagaaaagggcaactttgtgtaaagcagcttctcccacagagctttccctgcattgttagtgatgtcgggcaaagcatcactctttaacctggggcattggccccagcagggatatcatgggaccgcagccgctccgtgcactgtctctgcccccagaggaagccctgtccatggttcctggtgcacggccacaggcctgccttgaggccaccacatctggtgtctagaacagctgcgggccccacttgggcagaaggaagaggtgctagctgctgcccctgcctgctgtgaacacctgcccagcccttccttgtctgctgaggtgctcagaccagagtgccattaaataccaactgatgtcacggagcggacggtgcattgccaaggactcacagctgtgggctcccttccagctcctcccactttcttggctgggtcttctgaggcctacgtggaatgaactacacatgtggcctcatgcccaagggtttgttagatggcctctgactctgtgggattcaacttgacttttttgccccaggaggctctgtctggaaacaggcttagctttagtgctggggtgggacctgccctgtgggccccagggaggggacagtgggggtgaggccctgaggctgtccagggtctgagctctttgcctccaacctgcttctgccccaaaaggaacaggctgttggtggcaggctcctcccggggagctgtactgtacagaccaaggtgtaaataaacagtttgctcttctcgc

SEQ ID NO: 25190 - DNA, 8629 bp, Homo sapiens
  source 1..8629: mol_type = unassigned DNA
ccttcccctccccactcttctccttccctcccctcccctcccttcccctccggagcggctggggctgcggcgccgctgctgacacggatcggccgcggccgccaccgggcggaggctgcgcggcgcagacccagacgggcggccccggagggcgcgcggcgatggcggcggcgggcaggcggcgggcgcggcgggcgaggggtccgggctgagctgcgggccggcccggatggcgggcggcgcgggctggtcgggcgcccccgcggctctgctgcgctccgtgcgccgcctgcgcgaggtgttcgaggtgtgcggccgcgaccccgacggcttcctgcgcgtggagcgcgtcgcggcgctcggactgcgcttcggccagggcgaggaggtagaaaaacttgtgaaatatttggatcccaacgacctggggagaatcaacttcaaggacttttgccggggggtgttcgccatgaaagggtgcgaggagctgctgaaggatgtgctgtcggtggagagcgcggggacgctgccgtgcgcgccagagatcccagactgcgtggagcagggcagcgaggtcacaggccccacctttgctgatggcgagctcatccccagggaacccggcttttttcccgaggacgaggaggaggctatgacgctggcgccacctgagggcccccaggagttgtacacagacagccccatggagagcactcagagcctggaggggtctgtcgggagtcctgccgagaaggacgggggacttgggggcctgtttctgccagaagacaagtccctggtccacactccatccatgacgacctcagacctttctacacactccaccacctcgctcatcagcaatgaggagcagtttgaagactatggggagggtgacgatgtggactgtgcccccagcagcccttgccccgatgatgagaccaggaccaacgtctactcggacctggggtcttcggtgtcttccagtgcggggcagacgcctaggaaaatgcggcacgtgtacaacagcgaattgctagatgtttactgctctcaatgctgcaagaaaatcaacctgctcaatgacttggaagcccgactgaaaaacctgaaggccaacagccccaaccgaaagatctccagcacggcctttggacggcagctcatgcacagcagcaacttcagcagcagcaatggcagcaccgaagacctgttccgggacagcattgactcttgcgacaatgacatcacagagaaggtaagcttcctggaaaagaaggtgacagagctggagaatgacagcctgaccaatggggacctgaagagcaagctgaagcaagagaacacacagctggtgcacagggtgcatgagctggaggagatggtgaaggatcaggagaccacggccgagcaggctctggaggaggaggcgcggcgccaccgcgaggcctacggcaagctggagagggagaaggctaccgaggtggagctgctcaatgccagggtgcagcagttggaggaagaaaatacagagcttagaacaacagtgactcggctcaagtctcaaacagagaaactggatgaggagcggcagcgcatgtctgaccgtctggaggacaccagcctgcggctcaaagatgagatggacctgtacaagcgcatgatggacaagctgcgacagaaccgccttgagttccagaaggagcgggaggcgacgcaggagctcatcgaggacttgcggaaggagctggagcacctgcagatgtacaagctggactgcgagcggccaggcaggggccgcagtgcctcctctggcctaggcgagttcaatgccagggcccgcgaggtggagctcgagcacgaggtcaagcggctcaagcaggagaattataagctgcgggatcagaacgacgacttgaatgggcagattttgagcctcagcctctacgaagcaaaaaacctctttgctgcccagactaaagcccagtctctggctgcggagatagacaccgcctcgcgcgatgagctaatggaagccctgaaggagcaggaggagatcaacttccggctgaggcagtacatggacaagattatcctcgccatcctggaccacaatccctccatcctcgagatcaaacactaaggcacggggctggctgcagagcagccttaggaccctgggaccaagggcagaccctgcccaaggatgcaggcctaagccgggcctcacactcacactgtaaatgtctctctggccaccatgcgttacgtgtacccgtgtatatgtggggaggctgtgcacacgagcgaggggtgagtggccgtggctgtgggcagcatccacacggttagccgtgcatgcactttgtggcccctttgcaaggggcagagggtactggaagtgggaggaggcaaggtctgctatcaggagttactgtaaaaacaagaactggaagctcgtgtttccggtactgggtaaaatgattctacctctggggataaggattcacattcgctctagtacgatgggctctttcaccccactcctagtccccttgggagtgggagcaaaattgtgatctttcctaggagtttgaatgccccatatttgtgtcctcgccagctctttggccacctttcaagccccagtgttcaagctcagagaggatgaaggggcatctggagggtccatgagatggggccctcaccaaatgccttggccaccggccagcagccctctgtgatgtgtgtgcagagtgaacagaggactcaggtttcatagcagctagtgcggggcatcctcatcctgtacctatagagttcgtgcactcccccatccatgctacctacctccccgtttctgtttcagttttaagacaatgaagcagcattcactgcgtcattgtaacatgaagggataaaaatgaaggagaaggagggtttgggatgggtgtctaaggcaggagttgacatcgggcaaccaaagaaatgagttttggggaggaacacaactcccatcccagtcagtttccttcccatggctgcatcttaagatggatgcacggagaaaccgtctgcctggctccctgtcttcattctccacgcagcctggtgatggcaggcctgggtttggatttcagaatcctagctccgggctccactcgtgtggcagcaagactgcttcgttccagcgtttagaaacacacctgtatttgattctcagccaggggagcactcgctgcactggtgggaggcggttgggaaagttgcaggaaaaccttagtcttccatccttctgacccatggtggaaattcacaccatggatttttaatggatctttgttctaggcagctgggaatagacatggtacttaccttagagttttccaatttatctcaattttatatggcttgtgattcattttcttaatccaaatatatataaacgtgtgtggtcttattcttccccctgcagtttcttgctttcttcagcacatcttatagtatgagaaggaaggtttgggcatgttgggaagggcggtggagggggagttgcagaaagagagggcagtgagggtgaggagaggggatctggggacttgggtgtgacacctgcttgacagaggcagggctgtggccaggaccaaccttcaattccattccaatcagcctttgcatttgttggatctcgtggcttctttttaatcttttgttggggattagtttcatgctgcacataatggggttgcactggtctgacccaggactttggagccacccacactgggaagactaggctaggcagtcggtcttctaggagtttctcagccccttaggacgcgggtctccttgggctcccccaagggttctgcgaagaggcagtggaagaaggcatgaggagagggtctcttgagaatttgccaataggaaggagtggccacggctgaaaggaacaagacagatcctgacatagctttggcctgggtgttaggtcagaaggagtactggtgcgtgggggccttaccccagggttgagtattttatctgtaaaatgttatctgccctttggctgcattggaatttcagagaaggctgcagaggcctgggttacacagcctgagtcacaacgtgggaaggaatctctgccacgggaaaggtgggcggaagcagctggcagcctggggcgtgcttcaggctcctccctctaaggggcgccatgggaacaggctccggagggagccggcgtctgaaaggcccccgggacctgctgcagtgccagaggggcctctggagcaggcctggcttttaaatggggggctgaattccagctcacacacacctcaagtccaaccttactttcttcagccagaatacatttcttgtaaaacctggcttgttgcttggcttttaaagatggtgtatgtttgtaaaaatattcttctgggctcaaaagctagcttgagggggcagatgccccaggtgtcccagctccacagcccctggcagatcccagaccccttggtggcaggtcccagagcctaggtggtaggagcttgatctttgtttctgcccttacccctcagtagtggggctgcgaggtagtagacaggatgcccagttaagtttgaatttcagatagaaaataattttagaataaatatgttctatctaatacatgggacagatgttatttttagagataggatcttgctctgttgcccaggctggagtgtagtggtatgatcatagctcaccacaaccttgaactcccaggctcaagcgatcctcccgccttaactgcctgagtagctgggactacaggcatgcaccaccacgcccagctaatttttcttattttttgtagagacagggtctcactgtgttgcctcactcgagctgctgacctcaagtgatcctcccacctcagcctgccaaagcactgggattacaggcatgagccaccatgcctggccaggacatatttgaaatggggagattttaaaaattctgatgattagactgaatcctcagacgttctggtttgattgttgtgggtgtagcccaggcatgggattttttaaagagctgctcaggtaattccaatttaattgcgtgtcctacttgggttttttgtttgtttttattgtttttgctaaacctggcaaccctaccgagtagggattagcagtaacttatctgaaatttagaggtgttttgggggtggggcgagggtttctgtagtagactcagattttacatggccctgagctgcccttgcgttcagttggaagccacgcaaaatgaactgaaccaggagtgagcttcgtgtacattatctattagaaaatgaagtaccttctggttcagctagtccctgtgcgttgagaggctttaagaaacttctagtaaaaatgtttttttcttttagctttgaattggccagagtttatcctagattattttattttaaattggtagaattctttgcgaactgtcacagagaaattccttttcatgactttatttctgacctattaaaacatgaacaggccaggcatggtggctcacgcctgtaatcctagcacttgggaggcagtggcaggcggatcacttgagctcaggagtcctaaaccagcctgggcaacatagtgataccttgtctctaccaaaagttaaaaaaaaaaaaaaaaaagctcaagaacctgcacgagggcctaaaacagtgggctcagctttggctgtgcattggaatcacctggggagatttgtaagcttctgctgtctgggctgaacccccagaggttcggattgaattggtgtggggtgtggtccaggcatcgagatgtgtaaagacctccccaggtgatgatatgcagtccgaggttgagactgccctgtcctgcaaggtcgttggccagaggtagaggaaactggtcaaagtggctgttgggcttgtcaagcccgtggctgaatgacagtgagctctcttgctgggagggttccttttcctgttgttgaatggtcctggcctgcaggatgggaggccagatgccttcaggagctggtggatccagctgttctcaccagcctggaggttagcagaccagagtgggtgggcaggaccttggcctggtgcccctggaatcagtgggtggcatgtgttgggatatactggctacaggctcatctcaaagagcaggtagaacagagtcagcagggaactgacaggtggggctgtccccctgaaagcagccgcagaaacagctgccacctatttgcatagctgagcaggaggacatactgtctttgtgggttttgcttctggtctgtttcctgactgggttgataaagggagtcccagctcgttccctgttagccaaaccagcatcctactcacacaccggacactccaggtgctagtccactggtgctggtgttcaggggagttggggggggggggcgcggggacagaagcgcgggttcttggttccaatgagggacttagcagaagcctccaggggccagcagggccaggtgaaactgggagaaatgaagccctctgtgtcctgtgtgtgtggtggggtttaatgcattagcaaatttaaacttaaaaactaactctaggccgggcacggtggctcacacctgtaatcccagcactttgggaggccaaggcaggtggattgcctgagctcaggagttcgagaccagcctggacaacatggtgaaactcttgtctttatttttttaaaaaaacaaaaagtaactttcgatgtgatcataccaggaaagttttgcgtggtcaccatgccaagaaaatgactttggttgcccagcagatccacagcgactctttctcaagggctactgtggattctagattgaggaaaggggccacttaggactcagtgctggtatcctccacagtcctttctcccagactctggccctccctttgggacccaggaaatcccctctagggtgacgctgctggctaggaagactgaggtctgctgcgccaaggggcctcaagttagaagggccatgccgttcagtggatgactttgagcgctgatcctagggacctgccaggtcctcacttcctgccctgggtgcacacatgaatggggcagccagcaggaagcgggagaggctggaaccaggagcctgccctacctgcatggcaggacaactctgaggcccttctgccatattctctgctacccaccagagaaaataggctgccttctagaaagatttgtttctaaaagcgtagaccctggggaagtataatgtcaccatgctcaccaggcgaggtttcccatatgacctccctgccccgacctcgtaggttgctcctttccccatctgtaaggtagagatgtctgccccggagctaccagctggggatggcatccaggccatgtctcctgcaggatccaagtgctgttgtccccagggtgaccctgcctcctgctggggcccatccgctttgctgtgctgcacaggctgttttcatctgcatggtttggggtctttgtccttgtgccttttcttccccatcgccactgtacaggattttccacattgcccactgcctccttttctacatcgtctcatctccctggcctttcccgagccctgtaaatgtgtactttttcaacgtgcctcccccaggtgaggccagctctcccgggcacattcgtccacaaggatcaggccccacttacccttggctcgctcagcctgtagacttggtaactttgtacagaatctttcattattgtcttaagcatggggggctaggacccacttagtccctcctccagcctgcagctaatttaggagccttgcattccagaaaagggcaactttgtgtaaagcagcttctcccacagagctttccctgcattgttagtgatgtcgggcaaagcatcactctttaacctggggcattggccccagcagggatatcatgggaccgcagccgctccgtgcactgtctctgcccccagaggaagccctgtccatggttcctggtgcacggccacaggcctgccttgaggccaccacatctggtgtctagaacagctgcgggccccacttgggcagaaggaagaggtgctagctgctgcccctgcctgctgtgaacacctgcccagcccttccttgtctgctgaggtgctcagaccagagtgccattaaataccaactgatgtcacggagcggacggtgcattgccaaggactcacagctgtgggctcccttccagctcctcccactttcttggctgggtcttctgaggcctacgtggaatgaactacacatgtggcctcatgcccaagggtttgttagatggcctctgactctgtgggattcaacttgacttttttgccccaggaggctctgtctggaaacaggcttagctttagtgctggggtgggacctgccctgtgggccccagggaggggacagtgggggtgaggccctgaggctgtccagggtctgagctctttgcctccaacctgcttctgccccaaaaggaacaggctgttggtggcaggctcctcccggggagctgtactgtacagaccaaggtgtaaataaacagtttgctcttctcgcctga

SEQ ID NO: 25191 - DNA, 4930 bp, Homo sapiens
  source 1..4930: mol_type = unassigned DNA
agcggcagggaggggctcttcacccagtccggcagttgaagctcggcgctcgggttacccctgcagcgacgccccctggtcccacagataccactgctgctcccgccctttcgctcctcggccgcgcaatgggcacccgcgacgacgagtacgactacctctttaaagttgtccttattggagattctggtgttggaaagagtaatctcctgtctcgatttactcgaaatgagtttaatctggaaagcaagagcaccattggagtagagtttgcaacaagaagcatccaggttgatggaaaaacaataaaggcacagatatgggacacagcagggcaagagcgatatcgagctataacatcagcatattatcgtggagctgtaggtgccttattggtttatgacattgctaaacatctcacatatgaaaatgtagagcgatggctgaaagaactgagagatcatgctgatagtaacattgttatcatgcttgtgggcaataagagtgatctacgtcatctcagggcagttcctacagatgaagcaagagcttttgcagaaaagaatggtttgtcattcattgaaacttcggccctagactctacaaatgtagaagctgcttttcagacaattttaacagagatttaccgcattgtttctcagaagcaaatgtcagacagacgcgaaaatgacatgtctccaagcaacaatgtggttcctattcatgttccaccaaccactgaaaacaagccaaaggtgcagtgctgtcagaacatctaaggcatttctcttctcccctagaaggctgtgtatagtccatttcccaggtctgagatttaaatatatttgtaattcttgtgtcacttttgtgttttattacttcatacttatgaatttttccatgtcctaagtcttttgattttagctttataaaatcatccacttgtcccgaatgactgcagctttttttcatgctatggcttcactagccttagtttaataaactgaatgtttggattcctcagttattgtttacttttcatcatggaagcctgtcactgtatgtaggacataatagaacttgatcacttgaagctcagacctattggtcttgatcaaatcaaactaagaagaccttagaaataagctaccattttgccacagagcagcttataggtaatacactcttctctcagtgcagtgtacatttccacaaatctaagaattgccctataaacatagcaggattttgagagcttgaaaattttccattattctggacatgaatttctaaaatgccttaataggtttatgtagttgagtaaattttgttttttaatttttgtaagcatcaaagttgattagagaggggggcactttttctggagaattctcttagtaaacacaaaagattgttacggtttcattagtagtatggttgtggggccataagttaaacagtgctgcctggtaggctgggaactgaagagacttgtggtattccatctcgggtgcctctgttggcaatgatcaggcagcccaaaagatttaaatgatctataataatttccaagcggtagattatgtggcattttattgctcaggcaataattggtttaatgctggtagtgtcaaattttgaagtgttaattttgtcttagaaccttccagtaagtgaaatacaacctagttttatcaccatatccaccagcaggcatggataattattttaacaatgctaatatttgagttttgcagtatattatagaatatagtccagttaaatctttggtttcagtatgtctgaagagtacagtgagaggttaatttctgctcaagtggtaccacttaaaggcatgtattcttttagtatgtaaaatgaaatagtaccttgagtttaaatagaatgcatttaggcattgtagagatctgaaatagttttcttccactacattgttgaaatcaatgaagcaattagtttctcattcagaaatgtgcacactaatatttagttttgctttctcgtggataatattaagcacttactctgcagtttcctggaagttgtgtcaactgcagtgatactattcaggatggtgggaaatccccaaaaatatgtatgtgtgggcttgcttagattactatatttcatagttaatcttttgtctcttgcggtgctcatgatgtgtggggcacacggaaggcattgctgtagtcagtcattttggttttcttctatagccattttattattttagtgtattagttatgaagataatattatctatttgtaaattgctactttgtattttatgcatgctctgtaatttgatttttttttagttattgatttggattatattcacattctaataaacagttatagggggattatttcttatgctgtcagattacatttttcctttgagtgctttgggtgcagccgtggaatcctgatgtaaaagcataggttcttgcattactgagtaaacattgaattgggagcatcagtgtgtgaattcagctttgattttagaactgcagttcaattatgctttccttggaaaaagtatgtccaaaaacattaggaaagtagtgtgtattttcatatataacagtgtcaccagacccaggaaaagaaaccatctctattttattgaaagttggtggtagattttttacaaagtaaggagaaaagagaaaaactaaatagtgaattgaaaatgaataaagtaaacttagaatttttacccaagtgtagacttaaatgttgctttgagtatggctggatcttgggagaattccaggaaatattaggtattagaaaatgactttgattgcatttcagcaggtgtctttattctgagtagtatcttaggagacaaactgtctcaagcaagaaacaataaatttttaaatattatgacagttcagggcttaaggcagtttagaagtattttgctacttgaccttgattttcagttattttaactttgaatttttttttttttttttgagacggagtcttgctctgttgcccaggctggagtacaatggcaccatctcagctcactgcaagctccacctccagggttcatgccattctcctgcctcagcctcccgagtagctgggattataggcgccagccaccacgactggctaattttttgtatttttagtagagacggggtttcaccatgttagccagggtggtctcgatctcctgacctggtgatacacccacctcggcctcccaaagtgctgggattaaaggcgtgagccaccgtgcctggccttgaatttttttttaacctgttatatagtctcctgaatagttagccatggtgccttgatttaatcttatgtcattgttctcaaatgccatgatttctctttaatagtagttgtcattatgtaagggtaagttattgcccatttaattgtaattataagaagaggtgccagctagtgaccttacatcagtgatcttttaagttctgaagggttctgcagaaaagttacacttcttgagtttgggttgcccatcagagctggtcacatttctttgatcattgaaaaaatgaatatcttaatttttgtctttgctgactggtatttataaaatacaaatgcttttagtgggttgagctgttgtgataatctcttccatctaccttagagaagaagctgtactatttagacagttttggccaacactagaagcaaaagaattcaaaggctgggtggatatttaagaacttattctaacctgtcaggtttcaatttgtggggcttggtttaacagaggaaaaaaatataaattgattttctgatgtctcacaaatatcacatacctggaaaaaaattaaaacaaaaaatgaattttgtaaaaggttatgtatgacttccatttgctctgtaaaaaaatgaacaaagattgtgaaaggatcctcttccaccacatcatttaatgggttagcggaacagatagggagctatgacactagcaccaaagagagatttttcttctggttgggtggtgctggtgccacgcccctttctgggatttgacaagtctttcccactcacctatacaatatgccaaatcaactggagttgtcattctaatgttttaaagaatgattgggttcccccaaactgtaggaggtcgatggtaacaataaagtgatacaaaatgcttatgtcattataatttatgtaagggagaccattaggctgagaatcaatatgattgaggttatctattctcctgaaaagtgaattggagaataaagaaagaatatttgaaaggatgttgtgtactaggcaatatactagcatgtattagaaaatacggtaaactgtgggttagaagagtgaaagtagctggtatgatagagcactggactgagtaacgaagagattctagtcatggctcttgtggtcatttcatttttgagcctcacattcttccaattaatgagggtaccagattaaataaactctggggattcatcccaattcgaactctgtaattctctgaatgaactctctcttcaattaaagccaaattattaacattttaactcaagtttaaatttaatagagaagtcaaaatgaggtatgcactttgtggaatgtttttggtcttatcacaataacctgattaaaatggtgcctttatttccatgtttactcctttaaataagatgaaagctttcagaacatttatttgcaaaatgactgtcaatatcaacaatatgcatcaaagtaccatatatgctaagggagaggagcacttgatgggctgctatgttaactgtaaattgagaactgcttgttttatggcttttgctgttaaaaaaaaactgctggcttttaatatgtactttaaaatatactcatgtctgggagagaacttttaaaaaca

SEQ ID NO: 25192 - DNA, 562 bp, Homo sapiens
  source 1..562: mol_type = unassigned DNA
gttgaagctcggcgctcgggttacccctgcagcgacgccccctggtcccacagataccactgctgctcccgccctttcgctcctcggccgcgcaatgggcacccgcgacgacgagtacgactacctctttaaagttgtccttattggagattctggtgttggaaagagtaatctcctgtctcgatttactcgaaatgagtttaatctggaaagcaagagcaccattggagtagagtttgcaacaagaagcatccaggttgatggaaaaacaataaaggcacagatatgggacacagcagggcaagagcgatatcgagctataacatcagcatattatcgtggagctgtaggtgccttattggtttatgacattgctaaacatctcacatatgaaaatgtagagcgatggctgaaagaactgagagatcatgctgatagtaacattgttatcatgcttgtgggcaataagagtgatctacgtcatctcagggcagttcctacagatgaagcaagagcttttgcaggttataataaagcaaatgtcagacagacgcgaaaatga

SEQ ID NO: 25193 - DNA, 1176 bp, Homo sapiens
  source 1..1176: mol_type = unassigned DNA
gggaggaaaacttcttcctggcctgggctccgtgccgctctgtttgccaaccgtccagtcccgcctaccagtgccgggcgctccccacccctcccccggctcccccggtgtccgccatggccaaagcctacgaccacctcttcaagttgctgctgatcggggactcgggggtgggcaagacttgtctgatcattcgctttgcagaggacaacttcaacaacacttacatctccaccatcggaattgatttcaagatccgcactgtggatatagaggggaagaagatcaaactacaagtctgggacacggctggccaagagcggttcaagacaataactactgcctactaccgtggagccatgggcattatcctagtatacgacatcacggatgagaaatctttcgagaatattcagaactggatgaaaagcatcaaggagaatgcctcggctggggtggagcgcctcttgctggggaacaaatgtgacatggaggccaagaggaaggtgcagaaggagcaggccgataagttggctcgagagcatggaatccgatttttcgaaactagtgctaaatccagtatgaatgtggatgaggcttttagttccctggcccgggacatcttgctcaagtcaggaggccggagatcaggaaacggcaacaagcctcccagtactgacctgaaaacttgtgacaagaagaacaccaacaagtgctccctgggctgaggaccctttcttgcctccccaccccggaagctgaacctgagggagacaacggcagagggagtgagcaggggagaaatagcagaggggcttggagggtcacataggtagatggtaaagagaatgaggagaaaaaggagaaaagggaaaagcagaaaggaaaaaaaggaagagagaggaagggagaagggagaggaatgaattgaggaagtgaaagaaggcaaggaggtaggaagagagggaggaggaaaggaaggagagatgcctcaggcttcagaccttacctgggttttcagggcaaacataaatgtaaatacactgatttattctgttactagatcaggttttagggtcctgcaaaaggctagctcggcactacactagggaatttgctcctgttctgtcacttgtcatggtctttcttggtattaaaggccaccatttgcacaaa

SEQ ID NO: 25194 - DNA, 4145 bp, Homo sapiens
  source 1..4145: mol_type = unassigned DNA
atcttggaccagcccgaggaagatactgagggagcacaggagcagtcaccgctgccactgctactgccgctactgctgccggcgcgtctgcacctctcggcctgccagtgtacctgccggcgcctcggtcgaccgcccccgccccctctcccgctgcgtccgcactcctgttcctggtcctgacgcccccctcccgcccggaaagctgcccagccaccagcaaccccccagtgccaccatggcaactgcaccatacaactactcttacatctttaaatatattattattggggacatgggagtaggaaaatcttgcttgcttcatcaatttacagaaaaaaaatttatggctgattgtcctcacacaattggtgttgaatttggtacaagaataatcgaagttagtggccaaaaaataaaactgcagatttgggatacggcaggacaggagcgatttagggctgttacacggagctactacagaggagctgcgggagctcttatggtctatgatatcactagaagaagtacatataaccacttaagcagctggttgacagatgcaaggaatctcaccaatccaaatactgtaataattctcataggaaataaagcagatttggaggcacagagagatgttacatatgaagaagccaaacagtttgctgaagaaaatggcttattgttcctcgaagcgagtgcaaaaacgggagagaatgtagaagatgccttccttgaggctgccaagaaaatctatcagaacattcaggatggaagcttggatctgaatgctgctgagtctggtgtacaacacaaaccttcagccccgcagggaggccggctaaccagtgaaccccaaccccagagagaaggctgtggctgctagtgacctctttgctgtggcccctcatttgacctttcacctctgtctgttggaagcagtactttttactgcctcattgtcttctgtacatcttactgggtttaattaaaaaaaaagaaaaaactctgttgtaaaaacagtttaacacaatactaaactgctaaacaactagatgtaatcaggttatcaaaggcaagtagagtaataaatctctcctgcatggtaaatctagactttttttcccccttgtcctcgtgataagtatgtcaccaatatatgatttaaaccgagcactgatgctggacttcatgatttttaccctccctttggcaaggctttgtctcactgtacggtttaatttggtgatatcttaagcctttcttcccatccttaactgttcaagtatgtctgttgtaaccaataagtttattgctgtgaaattacttctgatggtagagaaggggttctataactgcttttgttttgttttggataaatttcctgttgtgtgggtggcatttttcttaacgagatttgcttctgtcttagcctcacacagggaaaatatccatttatcttctctctcgtgcttaattaatagctttatctttttttataccattttatccttttctctttaacagaaagtaaatatgtataaaatttgaaggaatcgaactaacaatacattctgtgtatattattttaatgaagaaaataaattgattactggcattggaacagtataaaataccagtttgtacagtatgacctatatgtgaccatgttactcccttccatttcacacaaagaaatagacacaactgcagttcacaagtagtactggctccaccccttggtgctggcagtgtttggggacattatgctggaaagagctcctagcatcagaggattaacactagcagattctgttccatctttgcactgttgcttacctgctgattttcttaactgttcttgtgcaatcgacaatgtgctaacctgcttttctctttttgtaaacgtttttgcattacaggctgcattcttgccttactgtatagaaaaagaaaaaaggctgggtttactattgcacattttaagcttttatacctttatcttcttggaatggtcagattctgaactggacagtcagaaccacaggtctgctgttaagggattttaaattgtgcatttttaaccctacagtgaaataacttaagatatccctgtgttcacagtgtgaggggctgttttatgtcatgttggcataaattgttttgtaaaagggaaagtgtttctaaaggtgtttcagcgcttgtgctgatacaaagtaagttattactttgcaccaggtggtttggccactgaattaatactgtatagcaagagaaacaatcttatttttttggacaacatgttttattaagttcttcatttctgttgattttttttattgcatttatgattcagtggctgggaattgagaatttatttgaaatagaataggtaacacctcagcgtactatagaaaatgcactcagctcaactgctgtgtttaaaatacacattttaaatccctctttacagacactaacataaaagtacatctttctgggttgtaaacatgtggtagtaccagagtattgtatagtcaatgttaaataaaagccaaaactggaatgtgcagaaagtaggctttggttaatttgtggattcatttttatttttgtctttgtttaactttttaaaaaataagatttctggagtagattggtatattctgttaaagacttacagtgatccattttgcttacactgttgcatcacaagggactcacccagggaccatgacctgctggtgtgtgtgtatatttacaaaaacaaaacaaacaaaccacccattgggatataaggtagcaatcacaaactaaagactgcggcttgttgaggtgcaataccctgactcccaaagttagttacagtgggttttattgtttttgtgactgaaggatttattcagactgctgtactcttcatttgatgtaacaaaatgctattaatctaaatatttgtaaataaagtacctgtatctagattaaattaaaattggttgcattattttctgaactataatagggtttttcttcaggtgaacaatttgacgtgtcatcagtttttattgcagcactgtccatattcattgtataaagagaggtctacgtatgtagcatataaaaccacatcactaagtaatagacccacagctttattcttgtgtttacattacccttgaaatgttttcagtcaacccttttcagtgtaagatcagcacatttggtggctgatgctgttctcctttgactgtaccgggagccagattctatcatatgcatgtgtaatcccctgtaatacactcaggtgctcacaaatagagcagattgtcatattgtaacatgcgtgtgccagacaccgggcagtacactttggaaagaatgtgaaatccttttaatttttaatccatagcttactgcttgtgcagtcacctgcctcttgaggttgctcattgcccttggacctgtgaggaggccttcagattagtaattggtgcttagtactatttatgcttaaatagatcttccagtacaatgttgaagtcttttttatggataataacgtgtttgatggagtaacttattatttttttttggttggtggtttacacgttaatagaggtagtacaatttctttggaaaggtgtcttttgaagccagctgttaagcttcatacattacctcccttctcaaattcggtaagacagtagttttggggaacttttttgcccatgtgtcttttaagtgtgattttaaaaaaatgagtggttcagttcattcccctaaacagaagaaaagaccaaataattaccttccattcctcttcatgtgggaatatagagagggttcatgtggcattttagagaaaagataatttatcctcattcaacacaggcccagaaaattgtgtcccagaaggatgtcagtaattgtgactaggccaggccttttagcattttgctaagacttgaaacaaaaaatgtaaatacaaaagaaatcaagttttgttttgaaagatgccttctagaacttactgtgtattaataaattgtcactttcattgtctttattgtaactccattgatcccgtatcttaacggttcacgtctagccaaataactgttttggaataaaaaccttggtggtga

SEQ ID NO: 25195 - DNA, 711 bp, Homo sapiens
  source 1..711: mol_type = unassigned DNA
acatgcgcccctctcaagtgctggcagaccactgtgcatgcagacaacgcacccaaagggaagaatcaggggaacagtaacgcaaccctgccagcatgccaatgtagaaaacttgaaagaatgaacacaaaaatgtttacaaaggatatcatggcagagtgccaccatggcaactgcaccatacaactactcttacatctttaaatatattattattggggacatgggagtaggaaaatcttgcttgcttcatcaatttacagaaaaaaaatttatggctgattgtcctcacacaattggtgttgaatttggtacaagaataatcgaagttagtggccaaaaaataaaactgcagatttgggatacggcaggacaggagcgatttagggctgttacacggagctactacagaggagctgcgggagctcttatggtctatgatatcactagaagaagtacatataaccacttaagcagctggttgacagatgcaaggaatctcaccaatccaaatactgtaataattctcataggaaataaagcagatttggaggcacagagagatgttacatatgaagaagccaaacagtttgctgaagaaaatggcttattgttcctcgaagcgagtgcaaaaacgggagagaatgtagaagatgccttccttgaggctgccaagaaaatctatcagaacattcaggatggaagcttgga

SEQ ID NO: 25196 - DNA, 1139 bp, Homo sapiens
  source 1..1139: mol_type = unassigned DNA
aacttttactttgaaaaagaagtacgtctgaaccagattcacatgtttgatatttggatgcagagaaaatggggcagaaagcatcgcaacagttggctctgaaggacagcaaagaggtgcccgtcgtctgtgaggtggtcagtgaagctatagtccatgcagctcagaaactgaaggagtaccttggatttgaatatcctccaagtaaactctgcccagctgcaaatactctgaatgagatcttcttaatccatttcatcactttctgccaagaaaagggagttgatgagtggctgaccaccaccaagatgaccaagcaccaagccttcctgtttggtgcagactggatttggaccttttggggatccaacaagcaaataaagcttcagctcgcagtacagactctgcagatgtcttcacctcctcctgtggaatctaagccttgtgacctttccaatccagaatcaagggtagaggagtcttcctggaagaaaagtagatttgataagctggaagaattctgtaacttaataggagaggattgcctgggtctgtttatcatctttggtatgccaggaaagcctaaagacatcaggggagttgtcctggacagtgtcaaaagtcagatggtgaggagccatctgccaggagggaaggctgtggctcagtttgtcctggaaactgaagattgtgtgttcatcaaagagctgctcagaaattgtctgagtaagaaagacgggctgagagaggtgggcaaggtttatatcagcattctctgacttggatatgtattatgtgagtggcctgtaagaggaaaagaaaaaaagattctaataagcaagctcacctatttgcatcattccagcatgggattttttttcatttgttttcccattgattgaaaatgattactgggatcaaagtacattcatgtcgcaattacagagagagagagaaaaaaagaaaaccctggctctgcctatgatttaaaaacagttcaggaaaagttataatttagtttaatatttcattcacttattcaataataaaaatggaagagagataataaagtcacatttaaagtttgatttgcaaaaaaaaagtgtctgtttgaaataataagtctagcactcaaaagt

SEQ ID NO: 25197 - DNA, 1966 bp, Homo sapiens
  source 1..1966: mol_type = unassigned DNA
actcagttgcctctggccagtgcagggctcagccagggatggcttctagctgacagtgggaggaattaattcatctgaccggaatattcttttctcttctgggctgttggtttttcaagtgcaacaaagattccatacagctccaaggaaggagccaagaaaaacattctgtgccaaagtgagatcctggaagtgaaaccccggaataaagctgaaaaacgggctccagttgggtgccaggaaatgcaggactggaatgtgacttgacttccggcagcgcgcaggtgctcccgggtcacctgctttgaggtccagcctcctgccctgcctcaggtgaccacatgaccactgtggactttgccctgaaaccttctgggaggagaagaggcctgaccttggcgctggggtccagtgggcattgctctggtccgaggctgctgctcttgacctctgctctgcggctgttttccattggagtagaggctcctcctgtcctgtcctgcctgtggagggaagcaaaccttcccctggaccagagagaggagaaagcggagacaggtagcaacgctgtggactggtgatgacaggctcttcagctccctgcaagtgaccgggcctggggaacagggcatggcacaggcacacaggaccccccagcccagggctgcccccagccagccccgtgtgttcaagctggttctcctgggaagtggctccgtgggtaagtccagcttggctcttcggtacgtgaagaacgacttcaagagtatcctgcctacggtgggctgtgcgttcttcacaaaggtggtggatgtgggtgccacctctctgaagcttgagatctgggacacagctggccaggagaagtaccacagcgtctgccacctctacttcaggggtgccaacgctgcgcttctggtgtacgacatcaccaggaaggattccttcctcaaggctcagcagtggctgaaggacctggaggaggagctgcacccaggagaagtcctggtgatgctggtgggcaacaagacggacctcagccaggagcgggaggtgaccttccaggaagggaaggagtttgccgacagccagaagttgctgttcatggaaacttcggccaaactgaaccaccaggtgtcggaggtgttcaatacagtggcccaagagctactgcagagaagcgacgaggagggccaggctctacggggggatgcagctgtggctctgaacaaggggcccgcgaggcaggccaaatgctgcgcccactaggtgcagccactcctgggggctgtggggaagacaccccctgcctgggccatggccagctctaggtggattctgattcactgtcaatgctgggttgctcccgagccctagatgttcctggaagttggccccctttatgaaaaccacttcccacagccagtgggaactgccagaggaagatctggcgtcacatggctcccaggaaagtgctgtgccctatccccactgataccatctgattccccgatgcctgtgcctgttccacctggacggtggccccctcagcctggcagcctctggacagagaggaaggaaggattggaaaagtccccgcagcacagcgacggtgggaagatgccttacgtctgatcttgatgggggcactggcctggagcctgggcccacctgcttctggggggttggggagcaggccagatggaggtggtggtgccaggaagaaatggagcgatgactgactgtggggtgggcccaggatttccacatcttggtgaagttgcccctgggaagggcagctgggggcagtggcgccagttcccttccatggtctcccggctggcaatgtggtgaagctgagtttctgtccaatgagcaggaagattctgagacatttcgcctgagatataagttgtactgcgtatgcagtttttcctccaaaaattaaattgcttttgacaatctg

SEQ ID NO: 25198 - DNA, 1209 bp, Homo sapiens
  source 1..1209: mol_type = unassigned DNA
agtgaccgggcctggggaacagggcatggcacaggcacacaggaccccccagcccagggctgcccccagccagccccgtgtgttcaagctggttctcctgggaagtggctccgtgggtaagtccagcttggctcttcggtacgtgaagaacgacttcaagagtatcctgcctacggtgggctgattccttcctcaaggctcagcagtggctgaaggacctggaggaggagctgcacccaggagaagtcctggtgatgctggtgggcaacaagacggacctcagccaggagcgggaggtgaccttccaggaagggaaggagtttgccgacagccagaagttgctgttcatggaaacttcggccaaactgaaccaccaggtgtcggaggtgttcaatacagtggcccaagagctactgcagagaagcgacgaggagggccaggctctacggggggatgcagctgtggctctgaacaaggggcccgcgaggcaggccaaatgctgcgcccactaggtgcagccactcctgggggctgtggggaagacaccccctgcctgggccatggccagctctaggtggattctgattcactgtcaatgctgggttgctcccgagccctagatgttcctggaagttggccccctttatgaaaaccacttcccacagccagtgggaactgccagaggaagatctggcgtcacatggctcccaggaaagtgctgtgccctatccccactgataccatctgattccccgatgcctgtgcctgttccacctggacggtggccccctcagcctggcagcctctggacagagaggaaggaaggattggaaaagtccccgcagcacagcgacggtgggaagatgccttacgtctgatcttgatgggggcactggcctggagcctgggcccacctgcttctggggggttggggagcaggccagatggaggtggtggtgccaggaagaaatggagcgatgactgactgtggggtgggcccaggatttccacatcttggtgaagttgcccctgggaagggcagctgggggcagtggcgccagttcccttccatggtctcccggctggcaatgtggtgaagctgagtttctgtccaatgagcaggaagattctgagacatttcgcctgagatataagttgtactgcgtatgcagtttttcctccaaaaattaaattgcttttgacaatctg

SEQ ID NO: 25199 - DNA, 2835 bp, Homo sapiens
  source 1..2835: mol_type = unassigned DNA
tggcagacgtggagcggcgcgcatgcgcagcagctcactctgctgaagggctgagaggcgcacccgggcggccagctgggctcggagcggaacggggtcaggatggacgaggacgtgctaaccaccctgaagatcctcatcatcggcgagagtggggtgggcaagtccagcctgctcttgaggttcacagatgatacgtttgatccagaacttgcagcaacaataggtgttgactttaaggtgaaaacaatttcagtggatggaaataaggctaaacttgcaatatgggatactgctggtcaagagaggtttagaacattaactcccagctattatagaggtgcacagggtgttatattagtttatgatgtcacaagaagagatacatttgttaaactggataattggttaaatgaattggaaacatactgtacaagaaatgacatagtaaacatgctagttggaaataaaatcgataaggaaaatcgtgaagtcgatagaaatgaaggcctgaaatttgcacgaaagcattccatgttatttatagaggcaagtgcaaaaacctgtgatggtgtacaatgtgcctttgaagaacttgttgaaaagatcattcagacccctggactgtgggaaagtgagaaccagaataaaggagtcaaactgtcacacagggaagaaggccaaggaggaggagcctgtggtggttattgctctgtgttataaactctgggaaattccatctcttgcatatttgatcagatagtgacatctttctgtatataaactctttaactgctattttagggaccttgcagtttgcacataattgttttatatcatagcagtaaatatttgcaagaaatcccactcatcgaccccgggtaaaatgttatggtaagcatgcacagtttgcagtctacagtttttttatgtagcacaaaataggtgtacctttataagtacattcaattttatgatttacatttatcatgtaatttttaaaaaaatccatctatctaggatatgttgatacaaagtctgcttttgctattctttttgcttaaatactcctatcattttctgaattacttggtatttagaactcctagcaccacggggaagaatagaggtatcatcaaacgtggcaaattttctttcaggaataataaagagcatgattccacagcttttctgggatgtttgagattcttttttagtactaagcaaaattctcatcacagaatgtagcccaggccaatttataactaaatctctatttgttcagatgatgcttctaaaacagcattgataggttaaagaagcttggtatttttaatttacttcaatgattagctcagttgcttaactggagttttaatcctgtgatatgtacattggattcatgactgtgcagcatttttagttatgtggtgtttggcagaatgacaataaggttttcccccattttggtttcaggaggacatgaatagtgtgtttattgtaactcctcatacacttttaaaaccaacatcttttttcataaatgttggtagtgtttgtccaggtaccttaactgtagcttgtgtaatgttgatgaatatctgtatcttacggcttccataatggctagttgatattcaaaaacctatttctgtgttttgaggggtggggaaaaaaaacactaagtgataatttgaaaaaggcatattgcttccagattctgatgtgtgagggaaaatactgtcacaatgaaaatcttgacaatttacttaacaagtaaccagtagttcatcaaaaccaacttgtacagactaataaatctttttcacagtattcagttttctcacctcttgctattgtatattgtagatttttttcattcatgtgttatttaatttacactgatctctgctattttaaccccccaaataagttatttgtcctttaaggttggttactataatacccctcagtaagattccagtattaatttctgggcagtttgttctctgtatacaattgcaaatgataagcatttttgtgagtgaccacctttgcaatatgtttgttaatttacttcatgttgggttctttctgaaatgtacatctttacatataaaaacctcacattctacttgatttacacttcctagtctacattacatgtggttgaaggttttatacattctatatgcttttactaaatatacaagatttactactagaaatttggagaaagaacactaacacatgtacttgtgatttgttcatgttatattaaaacttgagatttgtgtatttatgtagagtctgtattgacaagactgttgttttttgctccttgagctatataataatctgtgtattggattgttgtcttgatttggtctaaatttgaatatatatgagttacttgaatataacaaaaatgaattttgtttgatagatttatattgtaacctttttctagttcttgaataaatatagcctgctttccctagatgcatttgtgtaggaagtatatacatttccctattactctcatcagctgaagaatatgtactattgtgttactcaaattatgtggctttcattttgttgttttgttgcaagcttagtgttttgtagtggaggttttgtaaatgaaacagttgtaatatctaaggtcaggcacctagtaacagggttttgttaattcttttcagaatcattgaagcagtcttaaagggtcttttgcagatggtacaaattagaacaattagaatatagtattttgagttctagtagtactgagattgacccaaacaaataaaaaactattcaatttctgagtaa

SEQ ID NO: 25200 - DNA, 617 bp, Homo sapiens
  source 1..617: mol_type = unassigned DNA
cacccgggcggccagctgggctcggagcggaacggggtcaggatggacgaggacgtgctaaccaccctgaagatcctcatcatcggcgagagtggggtgggcaagtccagcctgctcttgaggttcacagatgatacgtttgatccagaacttgcagcaacaatagtttatgatgtcacaagaagagatacatttgttaaactggataattggttaaatgaattggaaacatactgtacaagaaatgacatagtaaacatgctagttggaaataaaatcgataaggaaaatcgtgaagtcgatagaaatgaaggcctgaaatttgcacgaaagcattccatgttatttatagaggcaagtgcaaaaacctgtgatggtgtacaatgtgcctttgaagaacttgttgaaaagatcattcagacccctggactgtgggaaagtgagaaccagaataaaggagtcaaactgtcacacagggaagaaggccaaggaggaggagcctgtggtggttattgctctgtgttataaactctgggaaattccatctcttgcatatttgatcagatagtgacatctttctgtatataaactctttaactgctattttagggaccttg

SEQ ID NO: 25201 - DNA, 873 bp, Homo sapiens
  source 1..873: mol_type = unassigned DNA
gcgcctgcctggttcccggcctttgccaggcccaagttctctgggtcgctctccctcctgtagcgccgagaaaacaccattccgagggccgccgctcggccggcagtcggctgtgaaagaactggatcttgtgactgctggaaaatttcgctttagtgtaaggtccgagtgcttcagccgtgggccacctttgaaaataaaatgtaattgttatttctcattttgccacatcctgtggagacagaagattagtgttgtgctttcattttttactttttccttggggaaaataatattgacagtggagttgagtataagcctgctcttgaggttcacagatgatacgtttgatccagaacttgcagcaacaataggtgttgactttaaggtgaaaacaatttcagtggatggaaataaggctaaacttgcaatatgggttactttgcatcagcagactgcaaactttttcttaaagagccagataggaaatagtccaatcctgaagtgggccatgtggcaatacgatactgctggtcaagagaggtttagaacattaactcccagctattatagaggtgcacagggtgttatattagtttatgatgtcacaagaagagatacatttgttaaactggataattggttaaatgaattggaaacatactgtacaagaaatgacatagtaaacatgctagttggaaataaaatcgataaggaaaatcgtgaagtcgatagaaatgaaggcctgaaatttgcacgaaagcattccatgttatttatagaggcaagtgcaaaaacctgtgatggtgtacaatgtgcctttgaagaacttgttgaaaagatcattcagacccctggactgtgggaaagtga

SEQ ID NO: 25202 - DNA, 1718 bp, Homo sapiens
  source 1..1718: mol_type = unassigned DNA
actctgctgaagggctgagaggcgcacccgggcggccagctgggctcggagcggaacggggtcaggatggacgaggacgtgctaaccaccctgaagatcctcatcatcggcgagagtggggtgggcaagtccagcctgctcttgaggttcacagatgatacgtttgatccagaacttgcagcaacaataggtgttgactttaaggtgaaaacaatttcagtggatggaaataaggctaaacttgcaatatgggaaaatcgtgaagtcgatagaaatgaaggcctgaaatttgcacgaaagcattccatgttatttatagaggcaagtgcaaaaacctgtgatggtgtacaatgtgcctttgaagaacttgttgaaaagatcattcagacccctggactgtgggaaagtgagaaccagaataaaggagtcaaactgtcacacagggaagaaggccaaggaggaggagcctgtggtggttattgctctgtgttataaactctgggaaattccatctcttgcatatttgatcagatagtgacatctttctgtatataaactctttaactgctattttagggaccttgcagtttgcacataattgttttatatcatagcagtaaatatttgcaagaaatcccactcatcgaccccgggtaaaatgttatggtaagcatgcacagtttgcagtctacagtttttttatgtagcacaaaataggtgtacctttataagtacattcaattttatgatttacatttatcatgtaatttttaaaaaaatccatctatctaggatatgttgatacaaagtctgcttttgctattctttttgcttaaatactcctatcattttctgaattacttggtatttagaactcctagcaccacggggaagaatagaggtatcatcaaacgtggcaaattttctttcaggaataataaagagcatgattccacagcttttctgggatgtttgagattcttttttagtactaagcaaaattctcatcacagaatgtagcccaggccaatttataactaaatctctatttgttcagatgatgcttctaaaacagcattgataggttaaagaagcttggtatttttaatttacttcaatgattagctcagttgcttaactggagttttaatcctgtgatatgtacattggattcatgactgtgcagcatttttagttatgtggtgtttggcagaatgacaataaggttttcccccattttggtttcaggaggacatgaatagtgtgtttattgtaactcctcatacacttttaaaaccaacatcttttttcataaatgttggtagtgtttgtccaggtaccttaactgtagcttgtgtaatgttgatgaatatctgtatcttacggcttccataatggctagttgatattcaaaaacctatttctgtgttttgaggggtggggaaaaaaaacactaagtgataatttgaaaaaggcatattgcttccagattctgatgtgtgagggaaaatactgtcacaatgaaaatcttgacaatttacttaacaagtaaccagtagttcatcaaaaccaacttgtacagactaataaatctttttcacagtattcagttttctcacctcttgctattgtatattgtagatttttttcattcatgtgttatttaatttacactgatctctgctattttaaccccccaaataagttatttgtccttt

SEQ ID NO: 25203 - DNA, 2379 bp, Homo sapiens
  source 1..2379: mol_type = unassigned DNA
gaggcgcacccgggcggccagctgggctcggagcggaacggggtcaggatggacgaggacgtgctaaccaccctgaagatcctcatcatcggcgagagtggggtgggcaagtccagcctgctcttgaggttcacagatgatacgtttgatccagaacttgcagcaacagatactgctggtcaagagaggtttagaacattaactcccagctattatagaggtgcacagggtgttatattagtttatgatgtcacaagaagagatacatttgttaaactggataattggttaaatgaattggaaacatactgtacaagaaatgacatagtaaacatgctagttggaaataaaatcgataaggaaaatcgtgaagtcgatagaaatgaaggcctgaaatttgcacgaaagcattccatgttatttatagaggcaagtgcaaaaacctgtgatggtgtacaatgtgcctttgaagaacttgttgaaaagatcattcagacccctggactgtgggaaagtgagaaccagaataaaggagtcaaactgtcacacagggaagaaggccaaggaggaggagcctgtggtggttattgctctgtgttataaactctgggaaattccatctcttgcatatttgatcagatagtgacatctttctgtatataaactctttaactgctattttagggaccttgcagtttgcacataattgttttatatcatagcagtaaatatttgcaagaaatcccactcatcgaccccgggtaaaatgttatggtaagcatgcacagtttgcagtctacagtttttttatgtagcacaaaataggtgtacctttataagtacattcaattttatgatttacatttatcatgtaatttttaaaaaaatccatctatctaggatatgttgatacaaagtctgcttttgctattctttttgcttaaatactcctatcattttctgaattacttggtatttagaactcctagcaccacggggaagaatagaggtatcatcaaacgtggcaaattttctttcaggaataataaagagcatgattccacagcttttctgggatgtttgagattcttttttagtactaagcaaaattctcatcacagaatgtagcccaggccaatttataactaaatctctatttgttcagatgatgcttctaaaacagcattgataggttaaagaagcttggtatttttaatttacttcaatgattagctcagttgcttaactggagttttaatcctgtgatatgtacattggattcatgactgtgcagcatttttagttatgtggtgtttggcagaatgacaataaggttttcccccattttggtttcaggaggacatgaatagtgtgtttattgtaactcctcatacacttttaaaaccaacatcttttttcataaatgttggtagtgtttgtccaggtaccttaactgtagcttgtgtaatgttgatgaatatctgtatcttacggcttccataatggctagttgatattcaaaaacctatttctgtgttttgaggggtggggaaaaaaaacactaagtgataatttgaaaaaggcatattgcttccagattctgatgtgtgagggaaaatactgtcacaatgaaaatcttgacaatttacttaacaagtaaccagtagttcatcaaaaccaacttgtacagactaataaatctttttcacagtattcagttttctcacctcttgctattgtatattgtagatttttttcattcatgtgttatttaatttacactgatctctgctattttaaccccccaaataagttatttgtcctttaaggttggttactataatacccctcagtaagattccagtattaatttctgggcagtttgttctctgtatacaattgcaaatgataagcatttttgtgagtgaccacctttgcaatatgtttgttaatttacttcatgttgggttctttctgaaatgtacatctttacatataaaaacctcacattctacttgatttacacttcctagtctacattacatgtggttgaaggttttatacattctatatgcttttactaaatatacaagatttactactagaaatttggagaaagaacactaacacatgtacttgtgatttgttcatgttatattaaaacttgagatttgtgtatttatgtagagtctgtattgacaagactgttgttttttgctccttgagctatataataatctgtgtattggattgttgtcttgatttggtctaaatttgaatatatatgagttacttgaatataacaaaaatgaattttgtttgatagatttatattgtaacctttttctagttcttgaataaatatagcctgctttccct

SEQ ID NO: 25204 - DNA, 1198 bp, Homo sapiens
  source 1..1198: mol_type = unassigned DNA
gggtggaagcgatagctgagtggcggcggctgctgattgtgttctaggggacggagtaggggaagacgtttgctctcccggaacagcctatctcattcctttctttcgattacccgtggcgcggagagtcagggcggcggctgcggcagcaagggcggcggtggcggcggcggcagctgcagtgacatgtccagcatgaatcccgaatatgattatttattcaagttacttctgattggcgactcaggggttggaaagtcttgccttcttcttaggtttgcagatgatacatatacagaaagctacatcagcacaattggtgtggatttcaaaataagaactatagagttagacgggaaaacaatcaagcttcaaatagaatttgctgattcccttggaattccgtttttggaaaccagtgctaagaatgcaacgaatgtagaacagtctttcatgacgatggcagctgagattaaaaagcgaatgggtcccggagcaacagctggtggtgctgagaagtccaatgttaaaattcagagcactccagtcaagcagtcaggtggaggttgctgctaaaatttgcctccatccttttctcacagcaatgaatttgcaatctgaacccaagtgaaaaaacaaaattgcctgaattgtactgtatgtagctgcactacaacagattcttaccgtctccacaaaggtcagagattgtaaatggtcaatactgactttttttttattcccttgactcaagacagctaacttcattttcagaactgttttaaacctttgtgtgctggtttataaaataatgtgtgtaatccttgttgctttcctgataccagactgtttcccgtggttggttagaatatattttgttttgatgtttatattggcatgtttagatgtcaggtttagtcttctgaagatgaagttcagccattttgtatcaaacagcacaagcagtgtctgtcactttccatgcataaagtttagtgagatgttatatgtaagatctgatttgctagttcttccttgtagagttataaatggaaagattacactatctgattaatagtttcttcatactctgcatataatttgtggctgcagaatattgtaatttgttgcacactatgtaacaaaacaactgaagatatgtttaataaatattgtacttattggaagtaatatcaaa

SEQ ID NO: 25205 - DNA, 1003 bp, Homo sapiens
  source 1..1003: mol_type = unassigned DNA
atgtcttgtttacatcctaccagtgattatttattcaagttacttctgattggcgactcaggggttggaaagtcttgccttcttcttaggtttgcagatgatacatatacagaaagctacatcagcacaattggtgtggatttcaaaataagaactatagagttagacgggaaaacaatcaagcttcaaatagaatttgctgattcccttggaattccgtttttggaaaccagtgctaagaatgcaacgaatgtagaacagtctttcatgacgatggcagctgagattaaaaagcgaatgggtcccggagcaacagctggtggtgctgagaagtccaatgttaaaattcagagcactccagtcaagcagtcaggtggaggttgctgctaaaatttgcctccatccttttctcacagcaatgaatttgcaatctgaacccaagtgaaaaaacaaaattgcctgaattgtactgtatgtagctgcactacaacagattcttaccgtctccacaaaggtcagagattgtaaatggtcaatactgactttttttttattcccttgactcaagacagctaacttcattttcagaactgttttaaacctttgtgtgctggtttataaaataatgtgtgtaatccttgttgctttcctgataccagactgtttcccgtggttggttagaatatattttgttttgatgtttatattggcatgtttagatgtcaggtttagtcttctgaagatgaagttcagccattttgtatcaaacagcacaagcagtgtctgtcactttccatgcataaagtttagtgagatgttatatgtaagatctgatttgctagttcttccttgtagagttataaatggaaagattacactatctgattaatagtttcttcatactctgcatataatttgtggctgcagaatattgtaatttgttgcacactatgtaacaaaacaactgaagatatgtttaataaatattgtacttattggaagt

SEQ ID NO: 25206 - DNA, 907 bp, Homo sapiens
  source 1..907: mol_type = unassigned DNA
tttgggtggaagcgatagctgagtggcggcggctgctgattgtgttctaggggacggagtaggggaagacgtttgctctcccggaacagcctatctcattcctttctttcgattacccgtggcgcggagagtcagggcggcggctgcggcagcaagggcggcggtggcggcggcggcagctgcagtgacatgtccagcatgaatcccgaatatgattatttattcaagttacttctgattggcgactcaggggttggaaagtcttgccttcttcttaggtttgcagatgatacatatacagaaagctacatcagcacaattggtgtggatttcaaaataagaactatagagttagacgggaaaacaatcaagcttcaaatagagtccttcaataatgttaaacagtggctgcaggaaatagatcgttatgccagtgaaaatgtcaacaaattgttggtagggaacaaatgtgatctgaccacaaagaaagtagtagactacacaacagcgaaggaatttgctgattcccttggaattccgtttttggaaaccagtgctaagaatgcaacgaatgtagaacagtctttcatgacgatggcagctgagattaaaaagcgaatgggtcccggagcaacagctggtggtgctgagaagtccaatgttaaaattcagagcactccagtcaagcagtcaggtggaggttgctgctaaaatttgcctccatccttttctcacagcaatgaatttgcaatctgaacccaagtgaaaaaacaaaattgcctgaattgtactgtatgtagctgcactacaacagattcttaccgtctccacaaaggtcagagattgtaaatggtcaatactgactttttttttattcccttgactcaagacagctaacttcattttc

SEQ ID NO: 25207 - DNA, 1333 bp, Homo sapiens
  source 1..1333: mol_type = unassigned DNA
tttgggtggaagcgatagctgagtggcggcggctgctgattgtgttctaggggacggagtaggggaagacgtttgctctcccggaacagcctatctcattcctttctttcgattacccgtggcgcggagagtcagggcggcggctgcggcagcaagggcggcggtggcggcggcggcagctgcagtgacatgtccagcatgaatcccgaatatgattatttattcaagttacttctgattggcgactcaggggttggaaagtcttgccttcttcttaggtttgcatgggacacagcaggccaggaaagatttcgaacaatcacctccagttattacagaggagcccatggcatcatagttgtgtatgatgtgacagatcaggagtccttcaataatgttaaacagtggctgcaggaaatagatcgttatgccagtgaaaatgtcaacaaattgttggtagggaacaaatgtgatctgaccacaaagaaagtagtagactacacaacagcgaaggaatttgctgattcccttggaattccgtttttggaaaccagtgctaagaatgcaacgaatgtagaacagtctttcatgacgatggcagctgagattaaaaagcgaatgggtcccggagcaacagctggtggtgctgagaagtccaatgttaaaattcagagcactccagtcaagcagtcaggtggaggttgctgctaaaatttgcctccatccttttctcacagcaatgaatttgcaatctgaacccaagtgaaaaaacaaaattgcctgaattgtactgtatgtagctgcactacaacagattcttaccgtctccacaaaggtcagagattgtaaatggtcaatactgactttttttttattcccttgactcaagacagctaacttcattttcagaactgttttaaacctttgtgtgctggtttataaaataatgtgtgtaatccttgttgctttcctgataccagactgtttcccgtggttggttagaatatattttgttttgatgtttatattggcatgtttagatgtcaggtttagtcttctgaagatgaagttcagccattttgtatcaaacagcacaagcagtgtctgtcactttccatgcataaagtttagtgagatgttatatgtaagatctgatttgctagttcttccttgtagagttataaatggaaagattacactatctgattaatagtttcttcatactctgcatataatttgtggctgcagaatattgtaatttgttgcacactatgtaacaaaacaactgaagatatgtttaataaatattgtacttattggaagtaatatcaaa

SEQ ID NO: 25208 - DNA, 2447 bp, Homo sapiens
  source 1..2447: mol_type = unassigned DNA
attttgggtggaagcgatagctgagtggcggcggctgctgattgtgttctaggggacggagtaggggaagacgtttgctctcccggaacagcctatctcattcctttctttcgattacccgtggcgcggagagtcagggcggcggctgcggcagcaagggcggcggtggcggcggcggcagctgcagtgacatgtccagcatgaatcccgaatatgattatttattcaagttacttctgattggcgactcaggggttggaaagtcttgccttcttcttaggtttgcagatgatacatatacagaaagctacatcagcacaattggtgtggatttcaaaataagaactatagagttagacgggaaaacaatcaagcttcaaatatgggacacagcaggccaggaaagatttcgaacaatcacctccagttattacagaggagcccatggcatcatagttgtgtatgatgtgacagatcaggagtccttcaataatgttaaacagtggctgcaggaaatagatcgttatgccagtgaaaatgtcaacaaattgttggtagggaacaaatgtgatctgaccacaaagaaagtagtagactacacaacagcgaaggaatttgctgattcccttggaattccgtttttggaaaccagtgctaagaatgcaacgaatgtagaacagtctttcatgacgatggcagctgagattaaaaagcgaatgggtcccggagcaacagctggtggtgctgagaagtccaatgttaaaattcagagcactccagtcaagcagtcaggtggaggttgctgctaaaatttgcctccatccttttctcacagcaatgaatttgcaatctgaacccaagtgaaaaaacaaaattgcctgaattgtactgtatgtagctgcactacaacagattcttaccgtctccacaaaggtcagagattgtaaatggtcaatactgactttttttttattcccttgactcaagacagctaacttcattttcagaactgttttaaacctttgtgtgctggtttataaaataatgtgtgtaatccttgttgctttcctgataccagactgtttcccgtggttggttagaatatattttgttttgatgtttatattggcatgtttagatgtcaggtttagtcttctgaagatgaagttcagccattttgtatcaaacagcacaagcagtgtctgtcactttccatgcataaagtttagtgagatgttatatgtaagatctgatttgctagttcttccttgtagagttataaatggaaagattacactatctgattaatagtttcttcatactctgcatataatttgtggctgcagaatattgtaatttgttgcacactatgtaacaaaacaactgaagatatgtttaataaatattgtacttattggaagtaatatcaaactgtatggtgataagtattgttttgattcttatggttaaagggaaatagagccttgcattatattcaacacagccatttgtgtgtgcacaatgcaaactaaggtattctagacctatcttagagcagcatccagtatttgctttctagataatatgcccaataacatgacctagaggggcttctgtgctgtgtagggatttaaccaacttcagtggttcagggagctcaaactatatgtaaaacaagtttagaatgtatgctatctagcccgttatctctgatccttctctaaaaccatttgaaatagcttcattgatcaacatttcataaatgcatctgtggtagaggtagaaagcagcacctttcctaattggcaaatgatcagactaatgtgtgctaatgtttttcttccatgctttcagtcagattcaactattttatcctccacagttgcttaacttggtgttggaggagggtttaagcattaagataggaagcaggaaatttgattgctctaaatttagaaattatatccctaaaaattaaaacatgaatactgggtggtaatgataattgaggcaaatgtatttattttggtgacattttgcatatatgaagattttctgaaataggaccttcaagatcctagggggttttgtttggtttttaattgtgaggaataaaaaatcttctgcccacactggcattttaaggtgactgaggtcaaacgttgtttccttaggttgaaatagcagccaaaacattcttcacgcaggggcttgggatatggctgctggcaacacattttgttgtgggctccttaatttaatgataaaatttaagctaaacacaagccaaaaatgaataggtttttttaatttttatttttcactaaacaggcaattgaaatacatggtacaaaaataagtggtaagataattgtaaaatgaaatggacagaatattcaattttccatctatgaaaatttcacaataaaaatcatagtttactttgt

SEQ ID NO: 25209 - DNA, 2254 bp, Homo sapiens
  source 1..2254: mol_type = unassigned DNA
ttttgggtggaagcgatagctgagtggcggcggctgctgattgtgttctaggggacggagtaggggaagacgtttgctctcccggaacagcctatctcattcctttctttcgattacccgtggcgcggagagtcagggcggcggctgcggcagcaagggcggcggtggcggcggcggcagctgcagtgacatgtccagcatgaatcccgaatatgattatttattcaagttacttctgattggcgactcaggggttggaaagtcttgccttcttcttaggtttgcagagtccttcaataatgttaaacagtggctgcaggaaatagatcgttatgccagtgaaaatgtcaacaaattgttggtagggaacaaatgtgatctgaccacaaagaaagtagtagactacacaacagcgaaggaatttgctgattcccttggaattccgtttttggaaaccagtgctaagaatgcaacgaatgtagaacagtctttcatgacgatggcagctgagattaaaaagcgaatgggtcccggagcaacagctggtggtgctgagaagtccaatgttaaaattcagagcactccagtcaagcagtcaggtggaggttgctgctaaaatttgcctccatccttttctcacagcaatgaatttgcaatctgaacccaagtgaaaaaacaaaattgcctgaattgtactgtatgtagctgcactacaacagattcttaccgtctccacaaaggtcagagattgtaaatggtcaatactgactttttttttattcccttgactcaagacagctaacttcattttcagaactgttttaaacctttgtgtgctggtttataaaataatgtgtgtaatccttgttgctttcctgataccagactgtttcccgtggttggttagaatatattttgttttgatgtttatattggcatgtttagatgtcaggtttagtcttctgaagatgaagttcagccattttgtatcaaacagcacaagcagtgtctgtcactttccatgcataaagtttagtgagatgttatatgtaagatctgatttgctagttcttccttgtagagttataaatggaaagattacactatctgattaatagtttcttcatactctgcatataatttgtggctgcagaatattgtaatttgttgcacactatgtaacaaaacaactgaagatatgtttaataaatattgtacttattggaagtaatatcaaactgtatggtgataagtattgttttgattcttatggttaaagggaaatagagccttgcattatattcaacacagccatttgtgtgtgcacaatgcaaactaaggtattctagacctatcttagagcagcatccagtatttgctttctagataatatgcccaataacatgacctagaggggcttctgtgctgtgtagggatttaaccaacttcagtggttcagggagctcaaactatatgtaaaacaagtttagaatgtatgctatctagcccgttatctctgatccttctctaaaaccatttgaaatagcttcattgatcaacatttcataaatgcatctgtggtagaggtagaaagcagcacctttcctaattggcaaatgatcagactaatgtgtgctaatgtttttcttccatgctttcagtcagattcaactattttatcctccacagttgcttaacttggtgttggaggagggtttaagcattaagataggaagcaggaaatttgattgctctaaatttagaaattatatccctaaaaattaaaacatgaatactgggtggtaatgataattgaggcaaatgtatttattttggtgacattttgcatatatgaagattttctgaaataggaccttcaagatcctagggggttttgtttggtttttaattgtgaggaataaaaaatcttctgcccacactggcattttaaggtgactgaggtcaaacgttgtttccttaggttgaaatagcagccaaaacattcttcacgcaggggcttgggatatggctgctggcaacacattttgttgtgggctccttaatttaatgataaaatttaagctaaacacaagccaaaaatgaataggtttttttaatttttatttttcactaaacaggcaattgaaatacatggtacaaaaataagtggtaagataattgtaaaatgaaatggacagaatattcaattttccatctatgaaaatttcacaataaaaatcatagtttactttgt

SEQ ID NO: 25210 - DNA, 2007 bp, Homo sapiens
  source 1..2007: mol_type = unassigned DNA
ccgggaatcagcgcggcgaggcctgagaagaagacgtttgcgcctgcgcgtcgcgggcggggcctctggggcggagcggccaccatcttggaacgggaggcggagcagagtcgactgggagcgaccgagcgggccgccgccgccgccatgaaccccgaatatgactacctgtttaagctgcttttgattggcgactcaggcgtgggcaagtcatgcctgctcctgcggtttgctgatgacacgtacacagagagctacatcagcaccatcggggtggacttcaagatccgaaccatcgagctggatggcaaaactatcaaacttcagatctgggacacagcgggccaggaacggttccggaccatcacttccagctactaccggggggctcatggcatcatcgtggtgtatgacgtcactgaccaggaatcctacgccaacgtgaagcagtggctgcaggagattgaccgctatgccagcgagaacgtcaataagctcctggtgggcaacaagagcgacctcaccaccaagaaggtggtggacaacaccacagccaaggagtttgcagactctctgggcatccccttcttggagacgagcgccaagaatgccaccaatgtcgagcaggcgttcatgaccatggctgctgaaatcaaaaagcggatggggcctggagcagcctctgggggcgagcggcccaatctcaagatcgacagcacccctgtaaagccggctggcggtggctgttgctaggaggggcacatggagtgggacaggagggggcaccttctccagatgatgtccctggagggggcaggaggtacctccctctccctctcctggggcatttgagtctgtggctttggggtgtcctgggctccccatctccttctggcccatctgcctgctgccctgagccccggttctgtcagggtccctaagggaggacactcagggcctgtggccaggcagggcggaggcctgctgtgctgttgcctctaggtgactttccaagatgcccccctacacacctttctttggaacgagggctcttctgtcggtgtccctcccacccccatgtatgctgcactgggttctctccttcttcttcctgctgtcctgcccaagaactgagggtctccccggcctctactgccctggctgcagtcagtgcccagggcgaggaatgtggccaggggatccaggacctgggatccagggccctgggctggacctcaggacaggcatggaggccacaggggcccagcagcccaccctttcctctccccactgcctcctctcccttcctacactcccagctcgagccgtccagctgcggtgggatctgagtatatctagggcgggtgggcgggtagcagtgctgggcctgtgtcttgagcctggagggagtctgctcctgccgccctctgccctgccagagacagacccatgcgctgcctgcccaccgtgcccctttgtccccatgtcaggcggaggcggaaggcccaccgtgccagaggctgggcaccagccttaaccctcactctgctagcacctcctccctttccccaaggtagcacatctggctcactccccactccgtctctggagcccaccagggaaggccctcatcccctgccgctacttctctggggaatgtgggttccatccaggattgggggcctctctgctcacccactctgcacccaggatcctagtcccctgccctctggcacagctgcttcctgcaagaaagcaagtctttggtctccctgagaagccatgtccctcgtgctgtctcttgcctgtcccacctgtgccctgccctccagcttgtatttaagtccctgggctgcccccttggggtgccccccgctcccaggttcccctctggtgtcatgtcaggcattttgcaaggaaaagccacttggggaaagatggaaaaggacaaaaaaaattaataaatttccattggccctcgggtgagctgagggtttttgcaaggaa

SEQ ID NO: 25211 - DNA, 1903 bp, Homo sapiens
  source 1..1903: mol_type = unassigned DNA
ggagcagagtcgactgggagcgaccgagcgggccgccgccgccgccatgaaccccgaatatgactacctgtttaagctgcttttgattggcgactcaggcgtgggcaagtcatgcctgctcctgcggtttgctgatgacacgtacacagagagctacatcagcaccatcggggtggacttcaagatccgaaccatcgagctggatggcaaaactatcaaacttcagatctgggacacagcgggccaggaacggttccggaccatcacttccagctactaccggggggctcatggcatcatcgtggtgtatgacgtcactgaccaggaatcctacgccaacgtgaagcagggctgcaggagattgaccgctatgccagcgagaacgtcaataagctcctggtgggcaacaagagcgacctcaccaccaagaaggtggtggacaacaccacagccaaggagtttgcagactctctgggcatccccttcttggagacgagcgccaagaatgccaccaatgtcgagcaggcgttcatgaccatggctgctgaaatcaaaaagcggatggggcctggagcagcctctgggggcgagcggcccaatctcaagatcgacagcacccctgtaaagccggctggcggtggctgttgctaggaggggcacatggagtgggacaggagggggcaccttctccagatgatgtccctggagggggcaggaggtacctccctctccctctcctggggcatttgagtctgtggctttggggtgtcctgggctccccatctccttctggcccatctgcctgctgccctgagccccggttctgtcagggtccctaagggaggacactcagggcctgtggccaggcagggcggaggcctgctgtgctgttgcctctaggtgactttccaagatgcccccctacacacctttctttggaacgagggctcttctgtcggtgtccctcccacccccatgtatgctgcactgggttctctccttcttcttcctgctgtcctgcccaagaactgagggtctccccggcctctactgccctggctgcagtcagtgcccagggcgaggaatgtggccaggggatccaggacctgggatccagggccctgggctggacctcaggacaggcatggaggccacaggggcccagcagcccaccctttcctctccccactgcctcctctcccttcctacactcccagctcgagccgtccagctgcggtgggatctgagtatatctagggcgggtgggcgggtagcagtgctgggcctgtgtcttgagcctggagggagtctgctcctgccgccctctgccctgccagagacagacccatgcgctgcctgcccaccgtgcccctttgtccccatgtcaggcggaggcggaaggcccaccgtgccagaggctgggcaccagccttaaccctcactctgctagcacctcctccctttccccaaggtagcacatctggctcactccccactccgtctctggagcccaccagggaaggccctcatcccctgccgctacttctctggggaatgtgggttccatccaggattgggggcctctctgctcacccactctgcacccaggatcctagtcccctgccctctggcacagctgcttcctgcaagaaagcaagtctttggtctccctgagaagccatgtccctcgtgctgtctcttgcctgtcccacctgtgccctgccctccagcttgtatttaagtccctgggctgcccccttggggtgccccccgctcccaggttcccctctggtgtcatgtcaggcattttgcaaggaaaagccacttggggaaagatggaaaaggacaaaaaaaattaataaatttccattggccctcgggtgagctgagggtttttgcaagg

SEQ ID NO: 25212 - DNA, 1038 bp, Homo sapiens
  source 1..1038: mol_type = unassigned DNA
cgccgccgccgccatgaaccccgaatatgactacctgtttaagctgcttttgattggcgactcaggcgtgggcaagtcatgcctgctcctgcggtttgctgatgacacgtacacagagagctacatcagcaccatcggggtggacttcaagatccgaaccatcgagctggatggcaaaactatcaaacttcagatctgggacacagcgggccaggaacggttccggaccatcacttccagctactaccggggggctcatggcatcatcgtggtgtatgacgtcactgaccaggaatcctacgccaacgtgaagcagtggctgcaggagattgaccgctatgccagcgagaacgtcaataagctcctggtgggcaacaagagcgacctcaccaccaagaaggtggtggacaacaccacagccaaggagtttgcagactctctgggcatccccttcttggagacgagcgccaagaatgccaccaatgtcgagcaggcgttcatgaccatggctgctgaaatcaaaaagcggatggggcctggagcagcctctgggggcgagcggcccaatctcaagatcgacagcacccctgtaaagccggctggcggtggctgttgctaggaggggcacatggagtgggacaggagggggcaccttctccagatgatgtccctggagggggcaggaggtacctccctctccctctcctggggcatttgagtctgtggctttggggtgtcctgggctccccatctccttctggcccatctgcctgcttcctgcaagaaagcaagtctttggtctccctgagaagccatgtccctcgtgctgtctcttgcctgtcccacctgtgccctgccctccagcttgtatttaagtccctgggctgcccccttggggtgccccccgctcccaggttcccctctggtgtcatgtcaggcattttgcaaggaaaagccacttggggaaagatggaaaaggacaaaaaaaattaataaatttccattggccctcgggtgagctgagggtttttgcaagga

SEQ ID NO: 25213 - DNA, 6180 bp, Homo sapiens
  source 1..6180: mol_type = unassigned DNA
gagacgccattagagggaggcagagagggatcgttcttcgcttttcctccggtgcctgacgtggtgggctggggcccttcattctcggactttccctcagcccttccaggcctcgcccgaggagggcgtggggacagcgcccgggtcggcggggccggggcggtgggggctgagccggccgtggctgtgaaggcgctgccgcggctgtcgggagggcggcgcgacactcgggctcgggcggccgggaagcgacgggatggctgcggccggcggcggcggcggcggggcggcggcggcgggccgagcctactcgttcaaggtggtgctgctgggggaaggctgcgtggggaagacgtcgctggtgctgcgctactgcgagaacaagtttaacgacaagcacatcaccactctgcaggcatcattcttaacaaagaagttaaatattggtgggaaaagagtaaaccttgccatatgggatacggcaggtcaagagagattccatgcattgggtccaatttactacagagattcaaatggagcgattttagtttatgacataacagatgaagattcttttcagaaggtaaaaaactgggtcaaagaattacggaaaatgttgggaaatgaaatctgtttatgtatagttggtaataaaatagacttggaaaaggagagacatgtttccattcaagaagcagagtcgtatgcagaatctgtgggagcaaaacattatcatacttcagccaaacagaacaaaggaattgaggaactctttcttgacctttgtaaaaggatgatagaaacagcacaagtggatgagagagcaaaaggcaatggctctagtcagccgggaactgcaaggcgaggtgtacagattattgatgatgaacctcaagcccagaccagtggtggagggtgctgttcttctggataactgttcacgcctaagaaattaaaagacagaacaaaactgtggatcattgccctcaacatgaagactgccatattccaagtcacattattttaccaatggaattatagaattaacagtattttaaattacgtttataacactgcagagaccttaagtgctaaacttagtggagtttgtgaccagagaattggcattttctacaaatgtttttttttgttttttttttgtttttttttgtttttttttgagacggagtctcgctctgtcacccaggctggagtgcactggcttgatctcggctcactgcaagctccacctcccaggttcacgccattctcctgcctcagcctcccgagtagctgggactataggcgcccaccacgacgcccggctaattttttgtatttttagtagagacggggtttcaccaggttagccaggatggtctcgatctcctgaccttgtgatccgcccgcctcggcctcccaaagtgctgggattacaggcgtgagccaccgtgcccggcctacaaatgttaacaaagcaattaccaatggcctttttacatattttttctttaatgaggaataatatgcatgtagaaaagacctacttaaagtcttcatttatattctttcaaatcaaatctttatttaataacttatatatgttgttggaatggttacatttttgcagccctttgtattttgtggtagttgaaattgtatcacttctaaacagcaaactgtttttgtttttaattagcagatatctgaagtactatttttgcagggtttgcacaggcccgtaactgtctactactttgatataatctgtatacatcctgtatgctgagctggtaaaatacattgtaaattacatattaaatattttatctgcttttacaagcgcaaggtgcaaaaatatatacaatagtctcattgatgactgtaaagtgaattaacatttggtgattatgcctagcttttttgactaatataaagatcatagctccccttcacttctgtcttaacttgaacatggcgtgtttaaattttcatacatactttacttgaattattgctgttgtcacatatttttgcctctgtgagttcatctgatgattgagcagtagcatttgccttttgggttttttgtttgttattatagaagagatgacttctgctgattttgctttagaatggttaccttagaagaatttgggtggctcatgttgaatttcacttctgcaatagctttcattttctcataggctttataagagatgggttcagtggtatgagcagaggaagagatcccagatagtagccagttaaccaagactcattcatatagcacgtagtttatgttcctgaggcagcacttttagatcctttgtgagcaagttctatttgttcattgcttgccagagatgaacacagaatgttctgtttcattttacaagaactatcctgagtttctgtggatggaaacattacatgtaatgcagatatagtgaacactggaaagatttattaaagaattatatttgtgtatactttataaattagtccctcattagatttttttttcttaagcataagactgaacttaaatgtgttaattttagtagaatcaggcactgctcgcagaaggaacacagattgtagagattaacataaattgttcttgttctaatatatatattttttcatttctgtcgtgcttggaaaactagtaaatattatgtctaagataaaatggaatggcccctggatttacttcttataagaagcagtagtatgtaataaagctattagcatgagcaattaagaggctataaagagattatagttacaaaagaaatactgccatatttttaagttaataacttaaaccttctcaaatgggttaaaagttgaatgaattgacaccctgatgttatgatgttggaattttaacttaaactgggaggcattctgtgagccttcactttaccttctttaattattgtccttgctaaactcaacacagacttttctgttatgtgtttttgaggaagttggggtgggaagagtcagggagataagctaaaattgtcttcttttatggggtaattgtactctgtagtctcttggtttcctgtgaagttagtatttatgtgggggtgggggaaggtagcaagaatcatgggtatcacggtactttgtttttgacctcctggctctttcagacagagtgaagaaagcttttccattcttactgttgtagaagtagataggaaataagcttttctcattacagtgaaatatgttttaaaaactagagtagctgggcacagaggcatgcatttgtagggccagctacttgggagagtgaggcaggaggatcacttgaggccaggatttcaaatccagcctaggtaacactgagacctccatctcgtaaaaggcacaaaaactagttagagatgaaattgagctttattttaaaaaaacgttctaaagcctgataattggagagctatacttcagcttttcatcctactttaatgaaacagctagataggaacctctgctccagaattgccagataattattggtgggtcataactattcttcatattttttttttcttttttctcctttggtttctgtgttatctttcttaacctcacgtatttctttatcctttttagtgggggcctgtaattgaggctaattcaatagcaacaatagacaacatgatatggctgctgtcactttgaaacccaaaaggtctttgggtaggaatagagtaatgaaagaggaccagtcaacttcagtatatatacaaaggaaagacaaagagatgataaaccaaggctgaggaaatttttctgatgctttcttcatttctctaatataccttttgcattctttttctgataattgtgctattaggcagaagacacaagttaccacgttgtgtattaaaagcagtaggtaggttgtgccagtattttttcagccagtaagcatatacagttaacttatataattaaaaattggtttaagatagtgattaaaaatacctgaatattatgttaaaagtatacaatcattgtttctgtaatgatgatgggtattctgcttcttgtttttcattgtaattacaggggaagattgtttttgaaaatgtatattgccatgcttttggggtaagcagtaatgtgaaaagaaaaaagcattatgttattgtatgaaatataagtgttcagatttgttttgtctggggtgttgcctaagaataccctaaagctatggctgttactgcattgaaatcttttttttttttaatagtagccatatgttattagtggagtactttatatttgacattaaagtgaagaagaagagtagtacttcacttttaggtttttagtagtgaaagataaaattggaaaaatagggaaagagcatagggaggaatagaatggaagtcaagtaaataaaaaactacaacctgacagttttttaaatcactttgaaaagtacattacttttatcaaagagtttctaattaaggcaaactatgcattatgccaaatattaagaacattttaaaaatggattgtgatactgtttatttctttaattatataatttgcaattttctgtattataagtgctaccaggattctagatagttgatcttacatattcagatagtatagtttactcttataattacccgttacgttatctctaaaagtagtttgatctgtgcctttaacttttagaattcatcttttgacttgtttgccactgtagagttttcagttttctctgtagattcagtgtgacaaagagggaatacataatttgtgaccatttaagatgctgatattttctggaaaaggatatagatagtagtagtgacccgcaggagcctcacaataatgtctaaagatataaactgagtagatccctaagtactcttctctaaattataaaatgcattacctaggctttaatagttaaaagctggaatttattgaaccgcatctacttgatttcataatatgcattgattttagtatgttgctgttctgttatctgtaatcaactataacagagtaatatatttggtgttctggaccaaaattcgtgctacacatatgtctgatggcctttaccttttcaagaaaacagttgcaattttgagcaaaattttcctagttgtaatattttaatagtgttatgtattggaaaaaatttagaaatactcctaagagttttcaatttcaagcagaaatgcttctcttctaaataaataccacttaattgatagacctttagcagttcttgtgctatctaggatttatacatttttgcttttctggaaaactgctttggcgcattaacctttctactgcaacattttctcttcagtagatatatgagtaaacatgatgagttaatgttacacagcatacccagttaggtctcttattcttaaagcatctttctttagaagtctgcacatattttcaaatgcatcatattaaaggcacaagtcaagaggaggtggagttgcctacttcagtggcctttattcccactataccagttctcagtcttgattttgatactttctggcaactgtatcatctcttcactatcacgtattttaagaaaaagctaaggtgatttctttacatttgaacatgtgtagatcaatgagagaatggtgagggatagcaaggataaagtataatgttgaaaagtagaaagaagtggtatctgctaaactctagctttagtagcaagctattttaaggaaatcattgtatgtggtacttcctagaaatatgaaagttcctcattttgtatttaattatgtaagaaaatgttctaggaaaagaataaaaaacatatattgtcaaagtgccctttggtagtgctcccaaatggtagtaactattggtctctagtatatactcctcaaatatctttttgctatgtattaatatatctatatgtttacatatagaaatacatagtgttgtgggttttaaattttcacataaattgtgtcttacccatgtgttttgccatttgccttttctcttgccaacgtgtctaggagctctttggtaaatacagactttttcattttatttcctcccacatttctatggatgtgtcttgcctttttcttttttttttctttctttttttcttttttaaaatagcctctgact

SEQ ID NO: 25214 - DNA, 8670 bp, Homo sapiens
  source 1..8670: mol_type = unassigned DNA
cgaggtgggcggggaggtcaggtgacgcggccggcgtcccaagatggcggcggcggcggctcccggaaggccgcggcggcgtcccggctgctaaggcgggccccacgcggctggcagcggacaggccggacctacggccggaggacgggcggcagccgcctctgcgcggaccggggctgggccgtgcggcggcagcggcgccaggggatgctcttgctgggcctggcctctcccttctcaacttagggcggcggcgggcccgcgcccctggctcccgggccatggcgctgagggagctcaaagtgtgtctgctcggggatacaggtgtaggtaaatcgagtattgtgtggcggtttgtggaagacagttttgatccaaacatcaacccaacaataggggcatcttttatgaccaagactgtccagtaccaaaatgagctacataaattcctaatctgggatacagctggacaagaacgatttcgtgccttagcaccaatgtactatcgagggtcggctgcagctataatcgtttatgatatcacaaaagaagagacattttcaacattaaagaattgggtgaaagagcttcgacagcatggcccacctaatattgtagttgccattgcaggaaataaatgtgatcttatcgatgtaagagaagtcatggagagagatgcaaaggactacgccgactctattcatgcaatttttgtagagaccagcgcaaaaaacgcgataaacataaatgaactctttatagaaattagtcgaagaattccatccactgacgccaacctgccatctggcggtaagggcttcaaactccgaagacagccttcagagccaaagcggagctgctgctgaccgaacctcagcctctcagacttgatgatgaagtaggtggtcctgaaagttaacaggagggctggggtccctgccaccagttttcacctagccagtcttgagtcttctccgtgcaaaaaggattcacagaaatggaccagttctgttctccaaagactgcagcaatgatatttcagtctgtgaacttctattatgtaaagaatctctagtgtacaaagggactacatcgttggcttttgaccttgctgaaaaggaacatataattgtatggatggtaggattaagttgttgagtagttttgtaatcaagattttatgtaacatttgtaaagggaaaattagcacttttgtggttcttaagggaaaagaaacagaccttgtggagattataatttccttggtttctgttaccactgttagagggagttgtatcatttaacatatagtaggatagtttaagtgtagggaggacaattattgtctgaagctaaaatgggttatttataggactgatggaaatgatttcatctctgccatctctaaagcacttttcattgaacatgttagcctaggatacgtacagtaaattaacaatgatagcagcagatgcctagctcatcctgggtttgcttctgaccttgtcatgtgtgtgccaccaaacacgttattggcacctttttaaataagctctcatgatcaagatggtgatggtagagaagctgcccggaataaactgaatttcatatgttctaaaatgactagcaatggtttaaaaaggaagaagagtggaagtgaagaaggtggtataaatgctgtcaatttttttttaacccaagtattttggtggggaaaagcaagtatctattgcttagcatatgtaaagttgtagtctatatttatggggccattgcttaaagattataaattatgtaaatacattaataaattctaagtttcatttgacattccattgaatctcgcacccagtcttgcgtatgcctgcccagttttcagcctcttaacgggagactcaagcacattggtattgtataaaggtatagagcacttagcttacaatctttaaaggtttctctgccttcccttctacccacccgcctcccaccagatcccatctggaaatcataataaagacatatgccactttgacaaacctgactagtccttactagcctgagggtaaaagattaagctccaacctcaagtcatttacctggtcttggtaataagtttcttttagcttgtacagcatcctcagaccaactgaggagctttccttgttaacaatttagcttatctttctgtttcctttatttttcccctgcctctgttagtggttaacactcttttccctcagggagcctaatgaggtttttaatatcatctaaaaataaagcattgaagtgaagttggtgaaaatttgttcctggtctaatttggcacccttccaacctgagtattgtaggggaaggaaatttacaagatttaataggaaatgaaacagcttgaatttcaaactaaattgtattttcagagctatcctgaaactgaacagctgaaactttaaaaaataattggtattattttgtgccccccacttaatatggatagattttaatgggaaaattataattcagattaaataaaaaacaattcccttttccctgttgtatatcttaagcatttggaattttttttatcttctgaaatcatataaaaagaatgtcattagtaaaaattctaacttcgttttgtttaaaagacatgtggatgctccatgcccctaggattttgcttcctccccggtgctaaattagcaagctcctagagaagccatgtgattcccagagccaggcgctttacacctaaagtagtttgactttcttctgtatacatccagatggatcccaggcatccgggcaccaccctggtgtgtccctagaattcccactgctgggcctctatctccatgacaacaaaataaaaacagaggttgcttgactcattaccaaagaggcaaagcatgtgcgaccctttctgtcttattttaccaaaagatggtgcaaatctatgaccttcacattttttccaccacacccaccagtagctgttggtgattgcatggtgtctcggtgcatggggaaaggcaaggtcttctgagctcatcttaactggtgaggcatctggatgtgtctgatcttactgtgatgttttactgtaccgagcccaatgtgggtccatctcatcagccctttgctgatttcatgatttctcaccctccctcccatatgtagggtgtgattctgttttattatagccacatgttttattaacagaatgagtgatatgaagcttgtacttatgcatttctcgggcctcttccctcattttcatcagtctgtctaagaacttgactcggcactgtttctcgtgtaatatccttctaatgcttagcaacaacaacaaaaaattgctctctcagatccataatccatactcagtgaaagcagggaaaaaatattttcacttattttatttgcttctaaaatgcaaagatgaatactaaagtcagaagcagtgtttcattttgaacacattttggattattaagctgactaagcaatgatctaatacacatttcatattttctttataataatttcttatggagaagaggctatatttcaaaggaattgagacatactcccatctataaacatgtttggttttcttacgatacagggccatttttttaaaactctcaggactgaacagaagagaaaaattattaattagctgctactgtatgttgattcttttcggagaaattgaaataagctctttgcaggcgtccaatcctagaaaccaatggtctccagaactctcacacaagtgtttttctgattctatgataactaattaaccatcatctggtgattaaaagaacataaagtaagattatgattaagtgtccatcacctgcctgtcagccgtggtcagaataagttttacacgaagcaggtgaaagatttagttcttttcaaagtaacttattttcttgtgacccgtttatgatgttgtttgaagtccctgtttcccattgtgtacgcactttctggatgtctggaaggatcgggacttttgtgtgagaggcttgagcgcctcctctatgtgggctggtgtccttcttgaagttgtcaattcctcttattcttaaatatctaaagggaaaggaaaccaactttaatttcagaacttctctttacgtcttgtatgtatttcttttctgttctcaaggaggaaaattggtctaggaagccttctaaattaaactctgggaaatatagtaatgaaaatatcctttagctaactttcctgtaactgtcaaaccaaaatgtcagtatttttagggcattgtgttaaaataagcagtttagattccgacgacactgcactaattggcatgtcagcctccagctcagaaaggcatttgctcatggttacaggcatcttttagattctaagagtgagttacagaattctttttggtactttcacttattctttcagaatacatcaaggatgtgatttatgggcccttaagagtataagatataggtgcacagtatgttacttaagtaacggatgagcccccctaaacatccacgtgtctctgcaggaacctgtgtaagtattgtgaaaacccttttcttccagggaaaaattattggaaattccttaactgagctatacttggtacttgctctagaacatttgggaaatgacaaactcaggctggctctcctctctaacctcactgggctataaatgttccttctaactctgtaatgaaagttcagtgacaaactagatagtgaacctgtgaaagtcattatttacatttgctttaaagggacagttttaccgttcaacttcaagagtttttctacctctttaacagttaatattttttaaaggaagaaatggaatgtaccttcaggggtcaagctgttaactgtatacctgcctctagttagcttggtttatcaaaaggatttttaaatgattcaaggtaatgtttaggatatttgttttaactcctgctgtgctgtgatttaaaaaaaaatagtctaagaaacaaatttatccatgagataaacatcatattttatagttttagaaaaaagggttgggggtggaatttagcctagaacttaaagaaacaacctctgcgaatttctcttgacagcggagttgcttgtcttgacttctaataatataaatccaggcagtttgattatccgatttgcaagaaactttaatggaattctggggcatttgtcctgttttatgtgcaaatgaaagtctaaaaaatatgaggaagatattacatttttcaggagcctccattttttcagtctaagagaatgataagtgagaggcctattgtgatgaagttgcattggacataatgtgggaagtgaataaatagaaccaagaatcttcatctatctctgttggtctttcaggattctcttagcatataggaaaatgatttaccttccagatctcgaaggacttccaatagcatagatcaggtttaatttgatggtctataccatcagaaataactaatatctgttttctttccttttagagtataatcaattatggataggccagaatatttttggcttcaaaacaaaaggattcataagcttaaaaaaacaaaaatcccaaaccttccatctatcccttttattacgttgaacattttagatagtaagattaagatgtatcattagtatatggtgaaattaaaaccgtggtgtctaacagatttaacaaaaagtgtttaatttactgcaagttcatttttagatctgtatggtgcccagtactccacaaaatgcatcataattgaaacaacaaaattattttcatgagcaagaattcaagtatcaaggcctatcagccaattaaaagccgtaagatagtaatgattttttttctttttttttttttttctttttttagatggagtctcactctgtcgcccaggctggtatgcagtggcgcgatctcagctcactgcaacctgtctcctgggttcaagcagttctcctgcctcagcctcctgagtagctgggatgacaggcgtgcaccaccatacccagctaatttttgtatttttagtagagatggggtttcaccatgtttgccaggctggtctcgaactcctgacctcaggtgatctgcttgcctcggcttcgcaacattctgggattacagacgtgagccaccgcgcccaaccagtaacgatttttttaaagggcctttcttaattgacagttttaagctgtagacattaatattataacaaacaaaacatgccagttttactgattccgctttttgcttgattcaggaacttttcattgtttggggaagcttttgaatgcagtactgtggaggaaatcatccttaaaatagcatttcacacatagggccaaaattgaaattgtcaaggaaacccctcagcatctaacgtcatcttgtagaagagctgggcatacctcttcctctaggccaattcagaggccactggccacccaagtagagtggggcccactggcatgagtagtccctgtgcccatgcccatggtggtgcttgactttgctttggggcttaatcctagtatcatttggccattaatttttaattaagtttatacttgaataatcagttttactcctgaaaaattttgaagccagcactgactttgtttatattcacttaccttgtatatgaacttatgacattagagtttgtgaaactgtcttaacgtggctcatacacgtgatgtcagagggactggtcagttctttacagggtgaattaatcggcagctggctagtcagagcaactgatgggtggcttttttttctttttttttttgagacggagtctcgctctgtcacccaggctggagtgtaagggcgcgatctcggctcactgcaacctccgcctcccaggttcaagcaattctcctgcctcagccacctgaatagctaggattacaggcgcccgcccccacacccggctaatattttttgtatttttagtagagacagggtttcaccgtgttgatcaggctggtctcgaactcctgacctcacgatccgcccgcctcggcctcccaaagtgctgggattacaggcgtgagtggtggccctatttttaaaccattcgttacgctgtgtagacagagctttattgccctggaaaagattttttttttaactctcatgcagttcagtctttccatcatttcactttgtgagtcactcacataattgtcaatcattcctctgaccttcttaagaatttacaccttaccgtctctgtgattgaagcagacttctcgctttatttcccttaggctcatttttctgtgggctctcccttaaagacacatggccacagacacctccttcgcatatgtaatctgccttcccctgcggccttccgtggtcacagcaacagggactgctcaccccctccagctggggcttttctaacaagcacagtcagaaatgcgcaggcctggggttggggatgaacagaagttgattagtgggcacagaaatacagttagatagaaggaatagttccagcattcgatattacagtagggagactgcatttaacaataattgattgtatatttgaaaacagctagaagaataagaatattcccaacacaaagaaaagataagcgaggtgaaggaaatcccagttaccctcattcagtccattacacattcgatacaggtatcaaaatatcataggcacctcaaagacatgtacaactcttaatttaacatttttgaaagaaaaaaaaaccggccagagcattaaaacaaataaaataagaaacacagaggccagtgttaggtgaagaactccgctgcttcagaaagagaatagcagcgctcgcttaccgtgggaacacggccagttaacaaaatgggttttggttttttgttttgttttgttttaccattggtaataagatagttaacataagtggtcagaacttcgctgaatttgtaataaagcatttgttaagcgtgtaaaagtccaaattaaaagtcttgaagaaaaacagctatggcaatgagcctagacatttttcaaaaaaaaaagctaagccgtcctaccagcaatctctctttctcctaagaatgtcatgccttctcaagacctgatgaaaggaataagatatttgtgcctttttataaaagcatctattacgaaagtaaaattcagttgcttacagttttggccgctttgtagcactattataaacagcccaaatttatggccttggacttactgcatgacacatggcctggttacctgtcatggaatgctgcagtggtggtttgccaagcttctgtggatgtttgaagactttatttttgcagtcttaaccttgggctggacctaagtgtatgtaaaccatatgatgcctgtattgtttatagatgctgacaaaagaaaactagaccttttgttttttgttgtaagatttttgttttcatgcctatgctcatagtagatagtttgcaaatgaaagttgatttgccatacttttaaataatattgttttagcttgaatattctataatacacttttatagagtataacatgctaaatcactgttttgttgtaagaagggtgtaaacattttgttaataaaatgctatgtttacaaatata

SEQ ID NO: 25215 - DNA, 2986 bp, Homo sapiens
  source 1..2986: mol_type = unassigned DNA
atgaggggagtcgagactcccgcgccccaccacccccggcggagctgctgctgagccactcaatctgagccctggctactaataaagttcgtttaaaaatcataatcattcttaagagagcgaaagagggtgcgaactagccgctcggccccgcagggagagctggcgcgtcgggaggagacagcggcggcagcggttgcgccgcgaccaggaggagccggtggcgccgggcggcgggtccgcggccggtgggggacggtgagtagcggctcgcgctgcggtgcagcggcgctgcactcactcgccctctccaggggctgggggttcgtccggctccactggggaagactcagcttctccccggggtcccgggttgtgccttactctccggagtgggcaggggtatcgagggcaggggcctcccggcccggctcccccatcccccggttcggaccgccgagcgccggctctcccctccctgagcaccgatcccaagttccagctagagaaggtgggcggcagcgccagcccggcgccccctcccagctcccagcgatttgagagggaagatctgatctcctagaattagagttggtacagaaaccatttcagctccaaaaatgttggaggaagatatggaagtcgccataaagatggtggttgtagggaatggagcagttggaaaatcaagtatgattcagcgatattgcaaaggcatttttacaaaagactacaagaaaaccattggagttgattttttggagcgacaaattcaagttaatgatgaagatgtcagactaatgttatgggacactgcaggtcaggaggaatttgatgcaattacaaaggcctactatcgaggagcccaggcttgtgtgctcgtgttctctaccacagatagggaatcttttgaagcagtttccagttggagagagaaagtagtagccgaagtgggagatataccaactgtacttgtgcaaaacaagattgatcttctggatgattcttgtataaagaatgaggaagctgaggcactggcaaaaaggttaaagttaagattctacagaacatcagtgaaagaagatctaaatgtgaatgaagtttttaagtatttggctgaaaaataccttcagaaactcaaacaacaaatagctgaggatccagaactaacgcattcaagtagtaacaagattggtgtctttaatacatctggtggaagtcactccggtcagaattcaggtaccctcaatggtggagatgtcatcaatcttagacccaacaaacaaaggaccaagaaaaacagaaatccttttagcagctgtagcataccctaagatgttttgggaggaaaacaattgaattacattgtgcaatgcattaagaaacccatccagctgtcatggtatgttacaaggttttcagcagactttgctcctaatggctctctgaaagtgacagacttaaatattgctctgcagtgcttttcagaatgtagagtgagacctctggtggaaaaattattgccctgtggactcctttaattttttttacattagacgaagcttctcctgtttgtaaaggaatgctataagaaatttcaaacacaggttttgcggaattttaaatgctggaaaacataaatgaaatgcctaaatatattgttacagattttaatactgtggatcaaggaaagatagcaagcattcttttcctgaaattggtcatgtagcttttctgcgaaatagtattgaatctgaatactttcacaaaataatactgaaaggtaaaccctaaatcttgccagactgcattagtattttggcattgaaacttgtgcaatatctgtgtaatgtagaatgtggggtgtgcatgcagatgtctggtactggagtaagctgaaggtatgtgcagtatttaagaaaatgtacattctaattaattcacttataaaaccatttacatattgtgtatatgtttttattttcaaatgataaactctagacatatattttgcaaaatgagcttgggtttaaaaagtgctttgtgccaaaaatatcatacctaatttttatagtgctttactatcagaatttatattgtttattatatcttttaaaagcagtaagcagttttcatctgacagcgtagataaaagaggagtataggaatttgaatgctagagcatctcccaggtgagccttattgcagatctttttgatatagtcacccataagcatggtgagctcctgctctcataaggtcagccaaagccccttaagaaggtacacagcacatctgcagtcattcaggaggtcctgtgaagtgtggtgatgcatctaacaccttttgctgctcactgagaacccagctttgaacttacaagattacactaaccatttttaaagtgcacaaaaatattattattagtcttaactaaaattacatattttataatgccctgcaactctaaaccatccttttgtttacacatttttgtatggtattttaagattatcaatcacttcaacatttctataaccttgtttgtatagcactttctcaagagctgtcagtcccacatacagaatcatttcttttacaaaatgatttaatatgtaatcatgtgtcaggacataaattttgtcacttgggacagtagctttccagctaagataattgcgtgaactctgttaaaactgattatcactcatcaatggctttatttttaacctataaataacccctttcaatatacctggtttttacagcattgcaaaatctgtaaaaataacttttattggaaaatgtcatgaagtcatttttcattatttgtactaaacaatgttttatgtactccttttgtgttttatcttttgtttttccatctgtactcccctcatcctcctaatgttgagaaaatcaaatttcctgggtgtgtccttgttaagtgatcaaaagtaaatgttctctttgccattttagatgg

SEQ ID NO: 25216 - DNA, 1530 bp, Homo sapiens
  source 1..1530: mol_type = unassigned DNA
tgacactggttgctacagaattaactttactcggagatccgaggagccatcggcagttcccaggagtaagaacctgagagcgtgtgagaatttgagagggaagatctgatctcctagaattagagttggtacagaaaccatttcagctccaaaaatgttggaggaagatatggaagtcgccataaagatggtggttgtagggaatggagcagttggaaaatcaagtatgattcagcgatattgcaaaggcatttttacaaaagactacaagaaaaccattggagttgattttttggagcgacaaattcaagttaatgatgaagatgtcagactaatgttatgggacactgcaggtcaggaggaatttgatgcaattacaaaggcctactatcgaggagcccaggcttgtgtgctcgtgttctctaccacagatagggaatcttttgaagcagtttccagttggagagagaaagtagtagccgaagtgggagatataccaactgtacttgtgcaaaacaagattgatcttctggatgattcttgtataaagaatgaggaagctgaggcactggcaaaaaggttaaagttaagattctacagaacatcagtgaaagaagatctaaatgtgaatgaagtttttaagtatttggctgaaaaataccttcagaaactcaaacaacaaatagctgaggatccagaactaacgcattcaagtagtaacaagattggtgtctttaatacatctggtggaagtcactccggtcagaattcaggtaccctcaatggtggagatgtcatcaatcttagacccaacaaacaaaggaccaagaaaaacagaaatccttttagcagctgtagcataccctaagatgttttgggaggaaaacaattgaattacattgtgcaatgcattaagaaacccatccagctgtcatggtatgttacaaggttttcagcagactttgctcctaatggctctctgaaagtgacagacttaaatattgctctgcagtgcttttcagaatgtagagtgagacctctggtggaaaaattattgccctgtggactcctttaattttttttacattagacgaagcttctcctgtttgtaaaggaatgctataagaaatttcaaacacaggttttgcggaattttaaatgctggaaaacataaatgaaatgcctaaatatattgttacagattttaatactgtggatcaaggaaagatagcaagcattcttttcctgaaattggtcatgtagcttttctgcgaaatagtattgaatctgaatactttcacaaaataatactgaaaggtaaaccctaaatcttgccagactgcattagtattttggcattgaaacttgtgcaatatctgtgtaatgtagaatgtggggtgtgcatgcagatgtctggtactggagtaagctgaaggtatgtgcagtatttaagaaaatgtacattctaattaattcacttataaaaccatttacatattgtgtatatgtttttattttcaaatgataaac

SEQ ID NO: 25217 - DNA, 1311 bp, Homo sapiens
  source 1..1311: mol_type = unassigned DNA
tcccgcgggagtcgcggcgctgcgggtaggagccgggttgcgggagaccccaggttcggttgggattcccagccagaacggagcttaagccgggcaggcgagcgaatgacggagtagcgagctgcacggcggcgtgctgcgctgttgaggacgctgtcccgcgcgctcccaggccgccccgaggcttggggtcttcgaaggataatcggcgcccggggccgaacagcgggggcacacggggcgctgccgaagtgcaaggccacggccagagctcgagcccgacgcgctgtctggagtcgtaggttggcgccgtttggggtcggggtctgaggcttgggcgctgcctgggccgagcggagatcggggtttgcctcccgtccccgctcaggaccctgacgtggctgaagcggccccgggagcatgagcgggcagcgcgtggacgtcaaggtggtgatgctgggcaaggagtacgtgggcaagactagcctggtggagcgctacgtgcacgaccgctttctggtggggccttatcagaacaccatcggggccgccttcgtggccaaggtgatgtcggtcggagaccggactgtgacattaggtatttgggacacagcaggctctgagcgctatgaggccatgagtagaatctactatcggggtgccaaggctgccatcgtctgctatgacctcacagacagcagcagctttgagcgagcaaagttctgggtgaaggaactgcgcagcctagaggagggctgccaaatctacttatgtggcaccaagagtgacctgctggaagaagaccggaggcgtcgacgtgtggacttccacgacgtccaggactatgcagacaatatcaaagctcagctctttgaaacatccagcaagacaggccagagtgtggacgagctcttccagaaagtggcagaggattacgtcagtgtggctgccttccaggtgatgacagaggacaagggcgtggatctgggccagaagccaaacccctacttctacagctgttgtcatcactgagtcagcactcacctggcctgggggaattaaaggaattccccgtaagggctggacccagctcctttctgggcttgggtagtcaaatgtctgagctaccccaggtcctcatgtcagcagagtggcgcctgcctgtgctggcccatggaacggagacagcattgggctgactgtgggcatgaggagggataaggctgatttggaccccaggcttctgccctggacagcacttgtgtctgcagattatttaagtggcttttgatctgtaaataaaatcagtgc

SEQ ID NO: 25218 - DNA, 1236 bp, Homo sapiens
  source 1..1236: mol_type = unassigned DNA
ccgcgggagtcgcggcgctgcgggtaggagccgggttgcgggagaccccaggttcggttgggattcccagccagaacggagcttaagccgggcaggcgagcgaatgacggagtagcgagctgcacggcggcgtgctgcgctgttgaggacgctgtcccgcgcgctcccaggccgccccgaggcttggggtcttcgaaggataatcggcgcccggggccgaacagcgggggcacacggggcgctgccgaagtgcaaggccacggccagagctcgagcccgacgcgctgtctggagtcgtaggaccctgacgtggctgaagcggccccgggagcatgagcgggcagcgcgtggacgtcaaggtggtgatgctgggcaaggagtacgtgggcaagactagcctggtggagcgctacgtgcacgaccgctttctggtggggccttatcagaacaccatcggggccgccttcgtggccaaggtgatgtcggtcggagaccggactgtgacattaggtatttgggacacagcaggctctgagcgctatgaggccatgagtagaatctactatcggggtgccaaggctgccatcgtctgctatgacctcacagacagcagcagctttgagcgagcaaagttctgggtgaaggaactgcgcagcctagaggagggctgccaaatctacttatgtggcaccaagagtgacctgctggaagaagaccggaggcgtcgacgtgtggacttccacgacgtccaggactatgcagacaatatcaaagctcagctctttgaaacatccagcaagacaggccagagtgtggacgagctcttccagaaagtggcagaggattacgtcagtgtggctgccttccaggtgatgacagaggacaagggcgtggatctgggccagaagccaaacccctacttctacagctgttgtcatcactgagtcagcactcacctggcctgggggaattaaaggaattccccgtaagggctggacccagctcctttctgggcttgggtagtcaaatgtctgagctaccccaggtcctcatgtcagcagagtggcgcctgcctgtgctggcccatggaacggagacagcattgggctgactgtgggcatgaggagggataaggctgatttggaccccaggcttctgccctggacagcacttgtgtctgcagattatttaagtggcttttgatctgtaaataaaatcagtgcactgtgcatcaca

SEQ ID NO: 25219 - DNA, 563 bp, Homo sapiens
  source 1..563: mol_type = unassigned DNA
gaccttgcggccccgccccctcgccctctagccccctcccgcgggagtcgcggcgctgcgggtaggagccgggttgcgggagaccccaggttcggttgggattcccagccagaacggagcttaagccgggcaggcgagcgaatgacggagtagcgagctgcacggcggcgtgctgcgctgttgaggacgctgtcccgcgcgctcccaggccgccccgaggcttggggtcttcgaaggataatcggcgcccggggccgaacagcgggggcacacggggcgctgccgaagtgcaaggccacggccagagctcgagcccgacgcgctgtctggagtcgaccctgacgtggctgaagcggccccgggagcatgagcgggcagcgcgtggacgtcaaggtggtgatgctgggcaaggagtacgtgggcaagactagcctggtggagcgctacgtgcacgaccgctttctggtggggccttatcagaacaccatcggggccgccttcgtggccaaggtgatgtcggtcggagaccggactgtgacattaggtatttgggacacagcagg

SEQ ID NO: 25220 - DNA, 1100 bp, Homo sapiens
  source 1..1100: mol_type = unassigned DNA
ctcagcttccgtcctctctgcttccttacagcacccccacctgccagagctgatcctccctaggccctgcctaaccttgagttggcccccaatccctctggctgcagaagtccccttacccccaatgagaggaggggcaggaccagatcttttgagagctgagggttgagggcattgagccaacacacagatttgtcgcctctgtccccgaagacacctgcaccctccatgcggagccaagatggggaatggaactgaggaagattataactttgtcttcaaggtggtgctgatcggcgaatcaggtgtggggaagaccaatctactctcccgattcacgcgcaatgagttcagccacgacagccgcaccaccatcggggttgagttctccacccgcactgtgatgttgggcaccgctgctgtcaaggctcagatctgggacacagctggcctggagcggtaccgagccatcacctcggcgtactatcgtggtgcagtgggggccctcctggtgtttgacctaaccaagcaccagacctatgctgtggtggagcgatggctgaaggagctctatgaccatgctgaagccacgatcgtcgtcatgctcgtgggtaacaaaagtgacctcagccaggcccgggaagtgcccactgaggaggcccgaatgttcgctgaaaacaatggactgctcttcctggagacctcagccctggactctaccaatgttgagctagcctttgagactgtcctgaaagaaatctttgcgaaggtgtccaagcagagacagaacagcatccggaccaatgccatcactctgggcagtgcccaggctggacaggagcctggccctggggagaagagggcctgttgcatcagcctctgaccttggccagcaccacctgcccccactggctttttggtgccccttgtccccacttcagccccaggacctttccttgccctttggttccagatatcagactgttccctgttcacagcaccctcagggtcttaaggtcttcatgccctatcacaaatacctcttttatctgtccacccctcacagactaggaccctcaaataaagctgttttatatcaa

SEQ ID NO: 25221 - DNA, 1650 bp, Homo sapiens
  source 1..1650: mol_type = unassigned DNA
ggcgcgagccgggcgcccgggatgatgccgccgccgccgccgccgccgccgccgccgccaggggaagggttcgggtccgggtcgggctcggcgggcgcggggtgcgggacggcccagggcacggcggctgcagcgggagcacactgagcgcccgcccgccatgtccaggaagaagacccccaagagcaaaggggccagcacccccgctgcctccacgctgcccaccgccaacggggcccgaccggcgcgctccgggactgcgctttccggccccgacgcgccgcccaacgggcccttgcagcccggccggccctcgcttggcggcggtgtcgacttctacgacgtcgccttcaaggtcatgctggtgggggactcgggtgtggggaagacctgtctgctggtgcgattcaaggatggtgctttcctggcggggaccttcatctccaccgtaggcattgacttccggaacaaagttctggacgtggatggtgtgaaggtgaagctgcagatgtgggacacagctggtcaggagcggttccgcagtgttacccatgcctactaccgggatgctcatgctctgctgctgctctacgatgtcaccaacaaggcctcctttgacaacatccaggcctggctgaccgagatccacgagtacgcccagcacgacgtggcgctcatgctgctggggaacaaggtggactctgcccatgagcgtgtggtgaagagggaggacggggagaagctggccaaggagtatggactgcccttcatggagaccagcgccaagacgggcctcaacgtggacttggccttcacagccatagcaaaggagttgaagcagcgctccatgaaggctcccagcgagccgcgcttccggctgcatgattacgttaagagggagggtcgaggggcctcctgctgccgcccttgaacctggctgagctcagtcctctggaggaagccgtccagtccctagaaggctggacagagggtctccaggcccttctgactttgttgcccagtggccaacgcccgagtgtctgttttcaggagccccaggtcaagccttgtcccttcctcctcccagcaacagtcccaacaagcaggcttctgagagcccgtggccgcacactggccgccacggaaaagcagtcttctgcacgggacggggagcggcaagtggacagactttgccacggtgctctgctgccccctcctgggcacgtccaggtgagggagggctggggctggcaccacgcacagtgcctaaccctagaaaagccatgtcttcagccgcacatgctcaggcagctaagggaggacgcctgcccacgcctgggacagaaggcttcactgctaatcacatcgtgcatctgtgtgtcctgggagctgcctgctcccggcccaccctctaggaggctctggctcaaacagcaatagggtcttcctcactgaccttggaggatgcctgtggccttgtgataaaatgtgggaaatcacagaaaacaccagaaacaacaactgccagcccggcctggccacaggtgaggtctgtgatttccgagcacgctccaccttgcactcaacttggccttttgattgcacaagcctttgttttcagtcctagtgaataaagttgtgttttctgga

SEQ ID NO: 25222 - DNA, 944 bp, Homo sapiens
  source 1..944: mol_type = unassigned DNA
gtgtgtttgccaagccagggctggagcttcctggacccgcctaccctggaggggatggagcagtgaagggcaccgggccaagcgctaggcatctggggctaaggagacagaagcccgcggtgcccgtccatgcgggccctctgccccagcacccacatctcaggacaccccttcctcccaggaagaagacccccaagagcaaaggggccagcacccccgctgcctccacgctgcccaccgccaacggggcccgaccggcgcgctccgggactgcgctttccggccccgacgcgccgcccaacgggcccttgcagcccggccggccctcgcttggcggcggtgtcgacttctacgacgtcgccttcaaggtcatgctggtgggggactcgggtgtggggaagacctgtctgctggtgcgattcaaggatggtgctttcctggcggggaccttcatctccaccgtaggcattgacttccggaacaaagttctggacgtggatggtgtgaaggtgaagctgcagatgtgggacacagctggtcaggagcggttccgcagtgttacccatgcctactaccgggatgctcatgctctgctgctgctctacgatgtcaccaacaaggcctcctttgacaacatccaggcctggctgaccgagatccacgagtacgcccagcacgacgtggcgctcatgctgctggggaacaaggtggactctgcccatgagcgtgtggtgaagagggaggacggggagaagctggccaaggagtatggactgcccttcatggagaccagcgccaagacgggcctcaacgtggacttggccttcacagccatagcaaaggagttgaagcagcgctccatgaaggctcccagcgagccgcgcttccggctgcatgattacgttaagagggagggtcgaggggcctcctgctgccgcccttga

SEQ ID NO: 25223 - DNA, 2799 bp, Homo sapiens
  source 1..2799: mol_type = unassigned DNA
cgccaacgacccaaaaaaggccggcggcgggtggacgcggcgcgcgaggacccgagccaggcggggacaggacggcggggcgagccagacaaaaagtaaccttcctgaagaggacatgtgattggaagttgtcaattgttgaagcattggtaactccagtctctaacgttttagaaaatcataacaagcggttctctaccctgtaaaggtgaactactgagttcttcattatgtctgatggagattatgattacctcatcaagtttttagctttgggagactctggtgtagggaagaccagtgtactttaccaatatacagatggtaaatttaactccaaatttatcacaacagtgggcattgatttcagggaaaaaagagtggtgtacagagccagtgggccggatggagccactggcagaggccagagaatccacctgcagttatgggacacagcagggcaggagaggtttcgtagcttaacgacagcgttcttcagagatgctatgggttttcttctactttttgatctgacaaatgagcaaagtttcctcaatgtcagaaactggataagccagctacagatgcatgcatattgtgaaaacccagatatagtgctgtgtggaaacaagagtgatctggaggaccagagagtagtgaaagaggaggaagccatagcactcgcagagaaatatggaatcccctactttgaaactagtgctgccaatgggacaaacataagccaagcaattgagatgcttctggacctgataatgaagcgaatggaacggtgtgtggacaagtcctggattcctgaaggagtggtgcgatcaaatggtcatgcctctacggatcagttaagtgaagaaaaggagaaaggggcatgtggctgttgagaagtcaagtaagcgacatagtagttcaggtggcccatgcctgggatcttctctatgattgatacatggcacagtgagagattaatgggcattgtgtacaaattgcttctcaccatccccattagacctacgaataaagcatccggttctaaaattaatttgttgcagctttgtaaatatttctttaagattcagcctgagagttaggagaaatatttcagagccaaaagtgccttatacaaccttagcctattatagtaaatcattcaaggattcagaattttgcagtcacagaagagtgtatttattatgtagaatgaatgagggtactgtcacctgccttaatgtaggtaggcccagagtcttacatttaagatcttacatgcagttataaaaccgccacagtcttcaatccagatttgaagactcatgccataggtgacattctaaaataccattaaagccacttaaatgttaaataagaatatacatgcacatcagctcaatgtctttgagtattaattttatgtaagcattctatttaacatgaatataggacaaatcatggctatatctatagaccttggataaactggattgaccaattatacactcacggtgacttttttattggtgggaaggggattggggtggggcaggctggcttaatgtaatatgagcaaccaaagtgggacttctgtctccccgctatattcccattgctctgaatggttgattgaagggtcagggaactagattttatggctttagttcactgtgattgtacatttatacttggcctatgtgctggccgcacctgaacatagctggtgcttatgccgagttatttgcgatgagtaaatatttagtttctttttcttcatatttataatgttgatctggcatcctcaggctgcagctttattagcttataacttactcatctctatctttaccagcaggctctgtattgttgatatttgcaacttgttttgcttttccattggtggaattgaaataattagtttttaattacataagatgcctgtttgctatttggtggaagatagatgttcatattgaagcagtcacatttgtactgtagttcaataaaagaaaaatgaagtattctgtagcctatatttttcatagagctcatgagcatttactgtacttgctgggtcttgccaagatcatttattccgctgcattgccaaagtgtcttcataccaaattaaaggtggttttaatatatgtttcatggaagttgtttataaaattcaaaggtatttcatttaggtgaaaagtcttatttattaaagtggtttgaataaagtagatcaaaacttccagagatcttaatggctatataggaagaaatatcactcaccataatttaaataaagaataaaaatacttgtattttgtggtggcaaatgtttggtagaactgtaattagaaaaatacaagtatatttgcgtgatggttacactagaagcccagactttacgactacacaatatattcatgtatctaaactgtacttgtaccccctaaatttatttttaaaaaaggaaaaataaaagtatcatgaaaaaacctatttttttttccactgtccttccactactcccataacaaacttatccatggttggtaaaattttacatatttctatccttgaaatgaaggcttcttttaaattccaaagaagtcatggaggcctgtgcatttgaattgtatatgctagtgaggaaaagatttagacatttcaagagcagggttggccaggcgcggtggctcacacctgtaatcccagcactttgggaggccgaggagggcggatcacgaggtcaggagatcgagaccatcctggctaacacagtgaaaccccatctctact

SEQ ID NO: 25224 - DNA, 2790 bp, Homo sapiens
  source 1..2790: mol_type = unassigned DNA
gttttgaaagttgatggagcgaactgcttttccaaagactcttttgaaaaactttttaagtaggccattctgactttaacatttctctttgtcttaacattagacaaaaagtaaccttcctgaagaggacatgtgattggaagttgtcaattgttgaagcattggtaactccagtctctaacgttttagaaaatcataacaagcggttctctaccctgtaaaggtgaactactgagttcttcattatgtctgatggagattatgattacctcatcaagtttttagctttgggagactctggtgtagggaagaccagtgtactttaccaatatacagatggtaaatttaactccaaatttatcacaacagtgggcattgatttcagggaaaaaagagtggtgtacagagccagtgggccggatggagccactggcagaggccagagaatccacctgcagttatgggacacagcagggcaggagaggtttcgtagcttaacgacagcgttcttcagagatgctatgggttttcttctactttttgatctgacaaatgagcaaagtttcctcaatgtcagaaactggataagccagctacagatgcatgcatattgtgaaaacccagatatagtgctgtgtggaaacaagagtgatctggaggaccagagagtagtgaaagagaaatatggaatcccctactttgaaactagtgctgccaatgggacaaacataagccaagcaattgagatgcttctggacctgataatgaagcgaatggaacggtgtgtggacaagtcctggattcctgaaggagtggtgcgatcaaatggtcatgcctctacggatcagttaagtgaagaaaaggagaaaggggcatgtggctgttgagaagtcaagtaagcgacatagtagttcaggtggcccatgcctgggatcttctctatgattgatacatggcacagtgagagattaatgggcattgtgtacaaattgcttctcaccatccccattagacctacgaataaagcatccggttctaaaattaatttgttgcagctttgtaaatatttctttaagattcagcctgagagttaggagaaatatttcagagccaaaagtgccttatacaaccttagcctattatagtaaatcattcaaggattcagaattttgcagtcacagaagagtgtatttattatgtagaatgaatgagggtactgtcacctgccttaatgtaggtaggcccagagtcttacatttaagatcttacatgcagttataaaaccgccacagtcttcaatccagatttgaagactcatgccataggtgacattctaaaataccattaaagccacttaaatgttaaataagaatatacatgcacatcagctcaatgtctttgagtattaattttatgtaagcattctatttaacatgaatataggacaaatcatggctatatctatagaccttggataaactggattgaccaattatacactcacggtgacttttttattggtgggaaggggattggggtggggcaggctggcttaatgtaatatgagcaaccaaagtgggacttctgtctccccgctatattcccattgctctgaatggttgattgaagggtcagggaactagattttatggctttagttcactgtgattgtacatttatacttggcctatgtgctggccgcacctgaacatagctggtgcttatgccgagttatttgcgatgagtaaatatttagtttctttttcttcatatttataatgttgatctggcatcctcaggctgcagctttattagcttataacttactcatctctatctttaccagcaggctctgtattgttgatatttgcaacttgttttgcttttccattggtggaattgaaataattagtttttaattacataagatgcctgtttgctatttggtggaagatagatgttcatattgaagcagtcacatttgtactgtagttcaataaaagaaaaatgaagtattctgtagcctatatttttcatagagctcatgagcatttactgtacttgctgggtcttgccaagatcatttattccgctgcattgccaaagtgtcttcataccaaattaaaggtggttttaatatatgtttcatggaagttgtttataaaattcaaaggtatttcatttaggtgaaaagtcttatttattaaagtggtttgaataaagtagatcaaaacttccagagatcttaatggctatataggaagaaatatcactcaccataatttaaataaagaataaaaatacttgtattttgtggtggcaaatgtttggtagaactgtaattagaaaaatacaagtatatttgcgtgatggttacactagaagcccagactttacgactacacaatatattcatgtatctaaactgtacttgtaccccctaaatttatttttaaaaaaggaaaaataaaagtatcatgaaaaaacctatttttttttccactgtccttccactactcccataacaaacttatccatggttggtaaaattttacatatttctatccttgaaatgaaggcttcttttaaattccaaagaagtcatggaggcctgtgcatttgaattgtatatgctagtgaggaaaagatttagacatttcaagagcagggttggccaggcgcggtggctcacacctgtaatcccagcactttgggaggccgaggagggcggatcacgaggtcaggagatcgagaccatcctggctaacacagtgaaaccccatctctact

SEQ ID NO: 25225 - DNA, 3459 bp, Homo sapiens
  source 1..3459: mol_type = unassigned DNA
gatgcctgttttgaaagttgatggagcgaactgcttttccaaagactcttttgaaaaactttttaagtaggccattctgactttaacatttctctttgtcttaacattagacaaaaagtaaccttcctgaagaggacatgtgattggaagttgtcaattgttgaagcattggtaactccagtctctaacgttttagaaaatcataacaagcggttctctaccctgtaaaggtgaactactgagttcttcattatgtctgatggagattatgattacctcatcaagtttttagctttgggagactctggtgtagggaagaccagtgtactttaccaatatacagatggtaaatttaactccaaatttatcacaacagtgggcattgatttcagggaaaaaagagtggtgtacagagccagtgggccggatggagccactggcagaggccagagaatccacctgcagttatgggacacagcagggcaggagaggtttcgtagcttaacgacagcgttcttcagagatgctatgggttttcttctactttttgatctgacaaatgagcaaagtttcctcaatgtcagaaactggataagccagctacagatgcatgcatattgtgaaaacccagatatagtgctgtgtggaaacaagagtgatctggaggaccagagagtagtgaaagaggaggaagccatagcactcgcagagaaatatggaatcccctactttgaaactagtgctgccaatgggacaaacataagccaagcaattgagatgcttctggacctgataatgaagcgaatggaacggtgtgtggacaagtcctggattcctgaaggagtggtgcgatcaaatggtcatgcctctacggatcagttaagtgaagaaaaggagaaaggggcatgtggctgttgagaagtcaagtaagcgacatagtagttcaggtggcccatgcctgggatcttctctatgattgatacatggcacagtgagagattaatgggcattgtgtacaaattgcttctcaccatccccattagacctacgaataaagcatccggttctaaaattaatttgttgcagctttgtaaatatttctttaagattcagcctgagagttaggagaaatatttcagagccaaaagtgccttatacaaccttagcctattatagtaaatcattcaaggattcagaattttgcagtcacagaagagtgtatttattatgtagaatgaatgagggtactgtcacctgccttaatgtaggtaggcccagagtcttacatttaagatcttacatgcagttataaaaccgccacagtcttcaatccagatttgaagactcatgccataggtgacattctaaaataccattaaagccacttaaatgttaaataagaatatacatgcacatcagctcaatgtctttgagtattaattttatgtaagcattctatttaacatgaatataggacaaatcatggctatatctatagaccttggataaactggattgaccaattatacactcacggtgacttttttattggtgggaaggggattggggtggggcaggctggcttaatgtaatatgagcaaccaaagtgggacttctgtctccccgctatattcccattgctctgaatggttgattgaagggtcagggaactagattttatggctttagttcactgtgattgtacatttatacttggcctatgtgctggccgcacctgaacatagctggtgcttatgccgagttatttgcgatgagtaaatatttagtttctttttcttcatatttataatgttgatctggcatcctcaggctgcagctttattagcttataacttactcatctctatctttaccagcaggctctgtattgttgatatttgcaacttgttttgcttttccattggtggaattgaaataattagtttttaattacataagatgcctgtttgctatttggtggaagatagatgttcatattgaagcagtcacatttgtactgtagttcaataaaagaaaaatgaagtattctgtagcctatatttttcatagagctcatgagcatttactgtacttgctgggtcttgccaagatcatttattccgctgcattgccaaagtgtcttcataccaaattaaaggtggttttaatatatgtttcatggaagttgtttataaaattcaaaggtatttcatttaggtgaaaagtcttatttattaaagtggtttgaataaagtagatcaaaacttccagagatcttaatggctatataggaagaaatatcactcaccataatttaaataaagaataaaaatacttgtattttgtggtggcaaatgtttggtagaactgtaattagaaaaatacaagtatatttgcgtgatggttacactagaagcccagactttacgactacacaatatattcatgtatctaaactgtacttgtaccccctaaatttatttttaaaaaaggaaaaataaaagtatcatgaaaaaacctatttttttttccactgtccttccactactcccataacaaacttatccatggttggtaaaattttacatatttctatccttgaaatgaaggcttcttttaaattccaaagaagtcatggaggcctgtgcatttgaattgtatatgctagtgaggaaaagatttagacatttcaagagcagggttggccaggcgcggtggctcacacctgtaatcccagcactttgggaggccgaggagggcggatcacgaggtcaggagatcgagaccatcctggctaacacagtgaaaccccatctctactaaaaaaaaaaaaaaaaaaaaaatgggctgggcgtggtggtgggcacctgtagtcccagctactcaggaggctgaggcaggagaatggcgtgaacctgggaggcggagcttgcagtgagccgagattgcgccactgcactccagcctgggcgacagaggagactctgtctcaaaaaaaaaaaaaaaaaaaaagagcagggtcataatcacacagcagtgccttatatagttgccataagacttcagtgcagtacaacataattttacagctacatatcagggcatattctatatggtgtatttgtgttagaataacacattaaatgtctttaaacataaaaataagaatgtttgcatgtttcagttttcaagaaccaaatgagtaattagctatagattccactggccttaaacatacaattaagtgtatacatgatatagtgcacacacaaaagccacctttaattattgaaataacctgtattctttttggaaatcatttaagtttggtattgaagtactatattttttgtgcatcaatgtatttttctatttacaagcctatgtaaaagtgaagtgtatcttcagtgaaccatgtgccaattaagctgtaataaaaaagtggtctagtctgtcaaa

SEQ ID NO: 25226 - DNA, 1810 bp, Homo sapiens
  source 1..1810: mol_type = unassigned DNA
gtgcgcgtagggggcggggccgcgcgcagagggcggggaggtgggcaagatggcgcttgccgagtgattctcctcgaatacctcctgccggcgcggagacaccggggcgggggtcctgccgcaactacctcccttcctcctctcccccgcccccggagccttcatccttcccttccccccccacctcgaggggcgggcctggttcccgggacaccatgtcggactctgaggaggagagccaggaccggcaactgaaaatcgtcgtgctgggggacggcgcctccgggaagacctccttaactacgtgttttgctcaagaaacttttgggaaacagtacaaacaaactataggactggatttctttttgagaaggataacattgccaggaaacttgaatgttacccttcaaatttgggatataggagggcagacaataggaggcaaaatgttggataaatatatctatggagcacagggagtcctcttggtatatgatattacaaattatcaaagctttgagaatttagaagattggtatactgtggtgaagaaagtgagcgaggagtcagaaactcagccactggttgccttggtaggcaataaaattgatttggagcatatgcgaacaataaaacctgaaaaacacttacggttttgccaggaaaatggttttagtagccactttgtctcagccaagacaggagactctgtcttcctgtgctttcagaaagttgctgctgaaatccttgggatcaaattaaacaaagcagaaatagaacagtcacagcgtattgtcagggcagaaatagtgaagtacccggaagaagaaaatcaacataccacctctactcagagtagaatctgttcagtacagtagtgcagagggtggtgaaggcagatattgtaaactacaaccaggaacctatgtcaaggactgttaaccctcctagaagctctatgtgtgcagttcagtgagcgcatttttcttttgtgttgatagttctggctgcccttcacctctgggtgggcccgaggacttctaggaacttgttttatcagtgaccatctctgtagttcagttaacactttactcccaacttgcttcatcattgctattgcctcacagtggcaggcagctccttggatttgaaagaattcaactttgggaccacacactttgaattcaaaatggaaaacccattccctggaattagactgcttcattgcaaaagaatgatgttgtttctttgtatgtccttgcttcttttttcattgatgtaaatttttttaacttaatatgaaaactctccaagtcttgatcatcagccaggattttgccacagcaatttcattctcttatcggaacttgtatgtgtcaaagtatacttcagagtgcaaacattaagcaagtaatatattttacctacagatacttatgaagacattctttcgctatcgtgagtaaaagtatataaagctgtttctaactgaaaatgcttgaaataagcctgtaatagaaatattttttcattttttaaaaaagggcctaaattgtttatattgtagtttgtaactcacaaagtaatatttgatattgtatttttattactgtatcgttgtcgttatgtattgtgtaatactcaggtttgaaggctttctgaattctgataaatgttcagctgatgctccacgtggaatttctcttgcaaactgcataagagtactcccgagaatgagttatgacattgtggatcagactgtacctgatgttcagatgtttttctttcacaaataaacttatttaaatta

SEQ ID NO: 25227 - DNA, 1715 bp, Homo sapiens
  source 1..1715: mol_type = unassigned DNA
gtgcgcgtagggggcggggccgcgcgcagagggcggggaggtgggcaagatggcgcttgccgagtgattctcctcgaatacctcctgccggcgcggagacaccggggcgggggtcctgccgcaactacctcccttcctcctctcccccgcccccggagccttcatccttcccttccccccccacctcgaggggcgggcctggttcccgggacaccatgtcggactctgaggaggagagccaggaccggcaactgaaaatcgtcgtgctgggggacggcgcctccgggaagacctccttaactacgtgttttgctcaagaaacttttgggaaacagtacaaacaaactataggactggatttctttttgagaaggataacattgccaggaaacttgaatgttacccttcaaatttgggatataggagggcagacaataggaggcaaaatgttggataaatatatctatggagcacagggagtcctcttggtatatgatattacaaattatcaaagctttgagaatttagaagattggtatactgtggtgaagaaagtgagcgaggagtcagaaactcagccactggttgccttggtaggcaataaaattgatttggagcatatgcgaacaataaaacctgaaaaacacttacggttttgccaggaaaatggttttagtagccactttgtctcagccaagacaggagactctgtcttcctgtgctttcagaaagttgctgctgaaatccttgggatcaaattaaacaaagcagaaatagaacagtcacagagggtggtgaaggcagatattgtaaactacaaccaggaacctatgtcaaggactgttaaccctcctagaagctctatgtgtgcagttcagtgagcgcatttttcttttgtgttgatagttctggctgcccttcacctctgggtgggcccgaggacttctaggaacttgttttatcagtgaccatctctgtagttcagttaacactttactcccaacttgcttcatcattgctattgcctcacagtggcaggcagctccttggatttgaaagaattcaactttgggaccacacactttgaattcaaaatggaaaacccattccctggaattagactgcttcattgcaaaagaatgatgttgtttctttgtatgtccttgcttcttttttcattgatgtaaatttttttaacttaatatgaaaactctccaagtcttgatcatcagccaggattttgccacagcaatttcattctcttatcggaacttgtatgtgtcaaagtatacttcagagtgcaaacattaagcaagtaatatattttacctacagatacttatgaagacattctttcgctatcgtgagtaaaagtatataaagctgtttctaactgaaaatgcttgaaataagcctgtaatagaaatattttttcattttttaaaaaagggcctaaattgtttatattgtagtttgtaactcacaaagtaatatttgatattgtatttttattactgtatcgttgtcgttatgtattgtgtaatactcaggtttgaaggctttctgaattctgataaatgttcagctgatgctccacgtggaatttctcttgcaaactgcataagagtactcccgagaatgagttatgacattgtggatcagactgtacctgatgttcagatgtttttctttcacaaataaacttatttaaatta

SEQ ID NO: 25228 - DNA, 1787 bp, Homo sapiens
  source 1..1787: mol_type = unassigned DNA
gtgcgcgtagggggcggggccgcgcgcagagggcggggaggtgggcaagatggcgcttgccgagtgattctcctcgaatacctcctgccggcgcggagacaccggggcgggggtcctgccgcaactacctcccttcctcctctcccccgcccccggagccttcatccttcccttccccccccacctcgaggggcgggcctggttcccgggacaccatgtcggactctgaggaggagagccaggaccggcaactgaaaatcgtcgtgctgggggacggcgcctccgggaagacctccttaactacgtgttttgctcaagaaacttttgggaaacagtacaaacaaactataggactggatttctttttgagaaggataacattgccaggaaacttgaatgttacccttcaaatttgggatataggagggcagacaataggaggcaaaatgttggataaatatatctatggagcacagggagtcctcttggtatatgatattacaaattatcaaagctttgagaatttagaagattggtatactgtggtgaagaaagtgagcgaggagtcagaaactcagccactggttgccttggtaggcaataaaattgatttggagcatatgcgaacaataaaacctgaaaaacacttacggttttgccaggaaaatggttttagtagccactttgtctcagccaagacaggagactctgtcttcctgtgctttcagaaagttgctgctgaaatccttgggatcaaattaaacaaagcagaaatagaacagtcacagggccatttcattattttcatttcatcaactaatagagaataatcgagtgtgctttgtggctctaaaaataaagagggtggtgaaggcagatattgtaaactacaaccaggaacctatgtcaaggactgttaaccctcctagaagctctatgtgtgcagttcagtgagcgcatttttcttttgtgttgatagttctggctgcccttcacctctgggtgggcccgaggacttctaggaacttgttttatcagtgaccatctctgtagttcagttaacactttactcccaacttgcttcatcattgctattgcctcacagtggcaggcagctccttggatttgaaagaattcaactttgggaccacacactttgaattcaaaatggaaaacccattccctggaattagactgcttcattgcaaaagaatgatgttgtttctttgtatgtccttgcttcttttttcattgatgtaaatttttttaacttaatatgaaaactctccaagtcttgatcatcagccaggattttgccacagcaatttcattctcttatcggaacttgtatgtgtcaaagtatacttcagagtgcaaacattaagcaagtaatatattttacctacagatacttatgaagacattctttcgctatcgtgagtaaaagtatataaagctgtttctaactgaaaatgcttgaaataagcctgtaatagaaatattttttcattttttaaaaaagggcctaaattgtttatattgtagtttgtaactcacaaagtaatatttgatattgtatttttattactgtatcgttgtcgttatgtattgtgtaatactcaggtttgaaggctttctgaattctgataaatgttcagctgatgctccacgtggaatttctcttgcaaactgcataagagtactcccgagaatgagttatgacattgtggatcagactgtacctgatgttcagatgtttttctttcacaaataaacttatttaaatt

SEQ ID NO: 25229 - DNA, 1551 bp, Homo sapiens
  source 1..1551: mol_type = unassigned DNA
ggggaggtgggcaagatggcgcttgccgagtgattctcctcgaatacctcctgccggcgcggagacaccggggcgggggtcctgccgcaactacctcccttcctcctctcccccgcccccggagccttcatccttcccttccccccccacctcgaggggcgggcctggttcccgggacaccatgtcggactctgaggaggagagccaggaccggcaactgaaaatcgtcgtgctgggggacggcgcctccgggaagacctccttaactacgtgttttgctcaagaaacttttgggaaacagtacaaacaaactataggactggatttctttttgagaaggataacattgccaggaaacttgaatgttacccttcaaatttgggatataggagggcagacaataggaggcaaaatgttggataaatatatctatggagcacagttgatttggagcatatgcgaacaataaaacctgaaaaacacttacggttttgccaggaaaatggttttagtagccactttgtctcagccaagacaggagactctgtcttcctgtgctttcagaaagttgctgctgaaatccttgggatcaaattaaacaaagcagaaatagaacagtcacagagggtggtgaaggcagatattgtaaactacaaccaggaacctatgtcaaggactgttaaccctcctagaagctctatgtgtgcagttcagtgagcgcatttttcttttgtgttgatagttctggctgcccttcacctctgggtgggcccgaggacttctaggaacttgttttatcagtgaccatctctgtagttcagttaacactttactcccaacttgcttcatcattgctattgcctcacagtggcaggcagctccttggatttgaaagaattcaactttgggaccacacactttgaattcaaaatggaaaacccattccctggaattagactgcttcattgcaaaagaatgatgttgtttctttgtatgtccttgcttcttttttcattgatgtaaatttttttaacttaatatgaaaactctccaagtcttgatcatcagccaggattttgccacagcaatttcattctcttatcggaacttgtatgtgtcaaagtatacttcagagtgcaaacattaagcaagtaatatattttacctacagatacttatgaagacattctttcgctatcgtgagtaaaagtatataaagctgtttctaactgaaaatgcttgaaataagcctgtaatagaaatattttttcattttttaaaaaagggcctaaattgtttatattgtagtttgtaactcacaaagtaatatttgatattgtatttttattactgtatcgttgtcgttatgtattgtgtaatactcaggtttgaaggctttctgaattctgataaatgttcagctgatgctccacgtggaatttctcttgcaaactgcataagagtactcccgagaatgagttatgacattgtggatcagactgtacctgatgttcagatgtttttctttcacaaataaacttatttaaatta

SEQ ID NO: 25230 - DNA, 3848 bp, Homo sapiens
  source 1..3848: mol_type = unassigned DNA
tggcggggcgcggccagcgtgcagggctgggccagcgtgcggggctcctcccctttcctccggcggcgccggcggccgcagaacttccgggtcggcgcggaggcggggcggaggcgccgcggcggctgttattgttcggctgggctcggtcgggcgctgtctccctcggctctgcgggtgtcagttcgtccggcttcctcacagcccctcactcccggcggctgacagcagcagcggcggcggcgggcggcgcctggcgtttcgaggctgagcggcaccggggttggggcgcggaggaggagcagcagcgggaggaggagccgtgtgccctggcactgagcggccgcggccatggcgtacgcctatctcttcaagtacatcataatcggcgacacaggtgttggtaaatcatgcttattgctacagtttacagacaagaggtttcagccagtgcatgaccttactattggtgtagagttcggtgctcgaatgataactattgatgggaaacagataaaacttcagatatgggatacggcagggcaagaatcctttcgttccatcacaaggtcgtattacagaggtgcagcaggagctttactagtttacgatattacacggagagatacattcaaccacttgacaacctggttagaagatgcccgccagcattccaattccaacatggtcattatgcttattggaaataaaagtgatttagaatctagaagagaagtaaaaaaagaagaaggtgaagcttttgcacgagaacatggactcatcttcatggaaacgtctgctaagactgcttccaatgtagaagaggcatttattaatacagcaaaagaaatttatgaaaaaattcaagaaggagtctttgacattaataatgaggcaaatggcattaaaattggccctcagcatgctgctaccaatgcaacacatgcaggcaatcagggaggacagcaggctgggggcggctgctgttgagtctgtttttactgtctagctgcccaacggggcctactcacttattctttcaccccctctcctcctgctcagctgagacatgaaactatttgaaatggctttatgtcacagaagactttaatccgtcaaattcttgtataactttgaataaatggttaatgttcacttaaaagacagattttggagattgtattcatatctatttgcatttgatttctaggtcaattgatgtgattatttttgttaaatgttgtcttgtgcccttaactacgaactgaattgtattaaacactacaaagtcatcttgagtattttaaatcggtttgtgtagttaggtttcccaacatctgtggttacctaatgtttaatattatagaactgtcctcagaaactttgtcaattttcacggctataaggaaacagaaggactcttttaattctgtatttatcatttactttctgtatatatagtttaataacctgcttgggtgtaatttgccaagcttgaattctttaatgcatttgcataaattctatactgtttagagcttaaagctacagaagcattgttaggaattgcttggacactgaattttaaactttttgacattgttaacaagcatgttcatcttttcttgtcactagtccaagaaaaatatgcttaatgtatattacaaaggctttgtatatgttaacctgttttaatgccaaaagtttgctttgtccacaatttccttaagacctcttcagaaagggatttgtttgccttaatgaatactgttgggaaaaaacacagtataatgagtgaaaagggcagaagcaagaaatttctacatcttagcgactccaagaagaatgagtatccacatttagatggcacattatgaggactttaatctttccttaaacacaataatgttttcttttttcttttattcacatgatttctaagtatatttttcatgcaggacagtttttcaaccttgatgtacagtgactgtgtaaaatttttctttcagtggcaacctctataatctttaaaatatggtgagcatcttgtctgttttgaaggggatatgacaataaatctatcagatggaaaatcctgttacaaagtagaaaagctttagtaatttactcagtgtggtggttttatcctttttttctttttctcccttggtctataatgaaattgttacagcagtgcaaaataaaatcctatgtataaaagtgttctttttttttattatgaccacctcttttttaatgtatttttagtccacttacagcttttacatgggtttaagcatgttttttaaaagggtcagaatggttaacactcaaccctttttaaaaattttgctaaaatgcgacaaatctcaccatactgaaattatttttgttgatggtgtaagcagtgtaagcaagtgttttctcctgaactagcacaaaagcacttatgcctgaaagaaagcataaagaagttctaactctgaaactaactactttcatttcgctcatggccttcaactttctacaggtcttccctgaagattcagcagtactctctcaaaggtttgacagtactcttgtgggaaatcaccaaatgctgtcatagttttgttttaactgtctccttgagggcagagggaagggtgagagaaaatctgttttcatgggtatttgtagtacagcctttttttctttcaagtggctgtatcaaattcactggtcttactaatcactgtctttaccagtgagtacaaaaagttaaggcaactaggacaggtactgctctataccaagaagagaatgattctttggaaattgttatttttaagcttctgttaatttttccagaagtttagtgcgtttcttttccatactttctcccctaattcttttatttgaagaagagaacttaatggcaaataaacaacaaaccaggacatgcattttaataccctaaggaaaaatggaaccctcaaatataactcctcccacaaccaccctaatgtgcctcagtctggggcagcaggtggacttctcaatagttcttttccacattctctacaaatcacatctaccgttaaggaatatgttatgaatcctttctgttaattgagaaagcaatgttattgtctgtgatttccagtctttgctcattttattatccctgtcaaataatgtaatattggtacctgcagttgaatttgtaatattgtaattgaatttttagttgatcttcgatcagtttttatagcatctatggacatagaaaatcagtcactgaaaaaaataaacacagctttcaatgtctcactcaacatgtaacattcaaaattgtgatcttcataaagacattgttaccattcgtcttgcaaatttaagacaactgaatgaaaagccaattttttgaaagaatgtggcatataattagatatacaactgaaacaggatatacaactgcatacaatttgtttttaatgatattttaaaatagcctgttagcaggaaaatagtccctatttatctgctaatggtcaaaaagagttaggatataaatcgtaccaaaatgtttccaatcactcagaaaaactgattcatgtctggctttgcaacaccttaaacatttattctgtcatagatagtaaagccccatctcagtttatttagtcctgaggttggcagcatggggtttgactatatgagctaaaagatacacaaagagataacgctgtttcataataaacaggaattgactatacaaataggtaaaccagcatatctacctgtatttctcagagtttagatgtgtgctttatgtttacattaaaataaagcctaacgccacagta

SEQ ID NO: 25231 - DNA, 1058 bp, Homo sapiens
  source 1..1058: mol_type = unassigned DNA
agaacttccgggtcggcgcggaggcggggcggaggcgccgcggcggctgttattgttcggctgggctcggtcgggcgctgtctccctcggctctgcgggtgtcagttcgtccggcttcctcacagcccctcactcccggcggctgacagcagcagcggcggcggcgggcggcgcctggcgtttcgaggctgagcggcaccggggttggggcgcggaggaggagcagcagcgggaggaggagccgtgtgccctggcactgagcggccgcggccatggcgtacgcctatctcttcaagtacatcataatcggcgacacaggtgtagagttcggtgctcgaatgataactattgatgggaaacagataaaacttcagatatgggatacggcagggcaagaatcctttcgttccatcacaaggtcgtattacagaggtgcagcaggagctttactagtttacgatattacacggagagatacattcaaccacttgacaacctggttagaagatgcccgccagcattccaattccaacatggtcattatgcttattggaaataaaagtgatttagaatctagaagagaagtaaaaaaagaagaaggtgaagcttttgcacgagaacatggactcatcttcatggaaacgtctgctaagactgcttccaatgtagaagaggcatttattaatacagcaaaagaaatttatgaaaaaattcaagaaggagtctttgacattaataatgaggcaaatggcattaaaattggccctcagcatgctgctaccaatgcaacacatgcaggcaatcagggaggacagcaggctgggggcggctgctgttgagtctgtttttactgtctagctgcccaacggggcctactcacttattctttcaccccctctcctcctgctcagctgagacatgaaactatttgaaatggctttatgtcacagaagactttaatccgtcaaattcttgtataactttgaataaatggttaatgttcacttaaaagacagattttggagattgtattcatatctatttgcatttgatttcta

SEQ ID NO: 25232 - DNA, 1612 bp, Homo sapiens
  source 1..1612: mol_type = unassigned DNA
cggccatggcgtacgcctatctcttcaagtacatcataatcggcgacacaggtgttggtaaatcatgcttattgctacagtttacagacaagaggtttcagccagtgcatgaccttactattggtgtagagttcggtgctcgaatgataactattgatgggaaacagataaaacttcagatatgggatacggcagggcaagaatcctttcgttccatcacaaggtcgtattacagaggtgcagcaggagctttactagtttacgatattacacggagagatacattcaaccacttgacaacctggttagaagatgcccgccagcattccaattccaacatggtcattatgcttattggaaataaaagtgatttagaatctagaagagaagtaaaaaaagaagaaggtgaagcttttgcacgagaacatggactcatcttcatggaaacgtctgctaagactgcttccaatgtagaagaggcatttattaatacagcaaaagaaatttatgaaaaaattcaagaaggagtctttgacattaataatgaggcaaatggcattaaaattggccctcagcatgctgctaccaatgcaacacatgcaggcaatcagggaggacagcaggctgggggcggctgctgttgagtctgtttttactgtctagctgcccaacggggcctactcacttattctttcaccccctctcctcctgctcagctgagacatgaaactatttgaaatggctttatgtcacagaagactttaatccgtcaaattcttgtataactttgaataaatggttaatgttcacttaaaagacagattttggagattgtattcatatctatttgcatttgatttctaggtcaattgatgtgattatttttgttaaatgttgtcttgtgcccttaactacgaactgaattgtattaaacactacaaagtcatcttgagtattttaaatcggtttgtgtagttaggtttcccaacatctgtggttacctaatgtttaatattatagaactgtcctcagaaactttgtcaattttcacggctataaggaaacagaaggactcttttaattctgtatttatcatttactttctgtatatatagtttaataacctgcttgggtgtaatttgccaagcttgaattctttaatgcatttgcataaattctatactgtttagagcttaaagctacagaagcattgttaggaattgcttggacactgaattttaaactttttgacattgttaacaagcatgttcatcttttcttgtcactagtccaagaaaaatatgcttaatgtatattacaaaggctttgtatatgttaacctgttttaatgccaaaagtttgctttgtccacaatttccttaagacctcttcagaaagggatttgtttgccttaatgaatactgttgggaaaaaacacagtataatgagtgaaaagggcagaagcaagaaatttctacatcttagcgactccaagaagaatgagtatccacatttagatggcacattatgaggactttaatctttccttaaacacaataatgttttcttttttcttttattcacatgatttctaagtatatttttcatgcag

SEQ ID NO: 25233 - DNA, 1987 bp, Homo sapiens
  source 1..1987: mol_type = unassigned DNA
agaggtcggaggtaagtggctatagaagtcgggcggacccggaacccagaggacgcgacaccatgacttatgcttatctcttcaagtatatcatcatcggagacacaggtgtggggaagtcatgtctcctcctgcagtttacagataagcggttccagcctgtccacgacctcacaataggtgtggagtttggagctcgtatggtcaacattgatggaaaacaaatcaaactgcaaatctgggatacggctgggcaagaatccttccgttctatcacccgttcctactacaggggagcagctggagcactgctggtgtacgacattacaaggcgtgaaaccttcaaccacctgacctcatggttagaggatgcccggcagcactctagttccaacatggttatcatgctcattgggaataagagtgacctagagtcccgcagggatgtgaagagagaagaaggagaggcctttgctagggagcatggacttatattcatggaaacttcagccaaaacagcctgcaatgttgaagaggccttcattaacacagccaaagaaatatataggaagatccagcagggtttatttgatgtccacaatgaggcaaatggcatcaagattgggccccaacagtcaatttcaacatcagtgggacccagtgcctcccaaagtgctggattacaggtgtgagccaccgtgcctggcctaaataaataatttcgtaagcatatacaatccacttcccactaagaattagggtcaaagacattctatttgaacacttgcaattacctagatctagttggcctttggttgatagatcctctgcctcggaatttcattgagtttttttcttccttgcctttgggtgtctgcttgccacttcctaagaattcttgtagaaggcagtttcctctacttgcccaagagcactgagtacttctctactatcctattattagcttctatctcttagtgtaacttcaaaacttttaagagcagtgaagttggtcagggacatgtggccacttattattacctaaagaaaacatttgttccctgttcattttattttaggggccagatctaacattgtagtgtctttcaccagatagacttctactgtttcatcaaactcccttcttaactagacctagactttctactccaatcaggctaatctacttactgaatgtgacatatttattcctagttccatacctttgcacatgccctactctccactaattatacttaaaagtccaaaaattttttctttagtaacagacttaggtactgctaagcagttattaacacaatattccttagttttcatatgttggttattcatatgtctatttatatgtatatttatttttatgtatgttactatgtaaatatggtttgcagttgtttttgtgtggaatcttgtctttccgtataagttgtaagctccttgagagcaggatccatgtcattcctttatttttataaattattccccctatcattcctttacagtgcctagtgctactcattatgtgttcattgaatttgactgacatagttaaaaacttaaggtttattttagactttcaaggaaacaaaagactttagagtcctctctctgtaattctgccccactcatttgtttaccctgggttttatacagttctcttccttctcccctcccacctttccctggctttttgcctccattccatgaggcatacagtaaggctgcctgctagtaagcagtcacataagtgggtacctatccagccattctcttttcagagcatataatactatcttagccaaacttgcctttgcttcactcatcatgcagccttctgggttggttgctatatatatcttttttccttgatgtcccgttctcttccacagccctgaggtcttacgaatttttctactttctttttgctgttgatgaattgtttcattattaaatatatgcatgtatc

SEQ ID NO: 25234 - DNA, 2928 bp, Homo sapiens
  source 1..2928: mol_type = unassigned DNA
aagggggagaagaagaagatcggtagattgagtggctagagaggtcggaggtaagtggctatagaagtcgggcggacccggaacccagaggacgcgacaccatgacttatgcttatctcttcaagtatatcatcatcggagacacaggtgtggggaagtcatgtctcctcctgcagtttacagataagcggttccagcctgtccacgacctcacaataggtgtggagtttggagctcgtatggtcaacattgatggaaaacaaatcaaactgcaaatctgggatacggctgggcaagaatccttccgttctatcacccgttcctactacaggggagcagctggagcactgctggtgtacgacattacaaggcgtgaaaccttcaaccacctgacctcatggttagaggatgcccggcagcactctagttccaacatggttatcatgctcattgggaataagagtgacctagagtcccgcagggatgtgaagagagaagaaggagaggcctttgctagggagcatggacttatattcatggaaacttcagccaaaacagcctgcaatgttgaagaggccttcattaacacagccaaagaaatatataggaagatccagcagggtttatttgatgtccacaatgaggcaaatggcatcaagattgggccccaacagtcaatttcaacatcagtgggacccagtgcctcccagcggaactctcgtgacatagggtccaactctggctgctgctgaacatctggcttgaactttttttgtccttcctggaatagcttcagatcaataggcttaatgaaagaggtctttcttgctttggctgagagcagcctctttttaaagtgtgatgttttgcctttccacctaaagaccaggagagaatttgggcccttactgacctgtcctccttcagggacatgagcattccctatagattagggttcttcttatcctcctatacaaatttcttaaattgttaggatcaaagttgattatcacagtagttaaaaaataatttcatggcggggcgccatggctcatgcctgtaatcctagcactttgggaggccaaggtgggcagatcacctgaggtcaagagttcgagaccagcctgaccaacttggagaaatgccatctcaactgaaaatacaaaattagctgggtgtggtggtgcatgcctgtaatcccaggtactcgggaggccaaggcaggagaatcgcttgaacccaggaggtgaaggttacgctaagccaagatcacgccattgcactgcagcctgggcaacaagagcaaaactctgtctcaaataaataaataattttttttttctttttttttttttttttttggggggatggagtctcactctgtctccaggctggagtgcagtggcatgatcttggctcactgcaacctccactttccaggttcaagcagttctcctgcctcaacctcccgagtagctgggactacaggcatgtgccaccacacctggctcatttttgtatttttagtagagacagggtttcaccatgttggccaggatggtcttgatctcttgacctcgtgatccgcccaccttggcctcccaaagtgctggattacaggtgtgagccaccgtgcctggcctaaataaataatttcgtaagcatatacaatccacttcccactaagaattagggtcaaagacattctatttgaacacttgcaattacctagatctagttggcctttggttgatagatcctctgcctcggaatttcattgagtttttttcttccttgcctttgggtgtctgcttgccacttcctaagaattcttgtagaaggcagtttcctctacttgcccaagagcactgagtacttctctactatcctattattagcttctatctcttagtgtaacttcaaaacttttaagagcagtgaagttggtcagggacatgtggccacttattattacctaaagaaaacatttgttccctgttcattttattttaggggccagatctaacattgtagtgtctttcaccagatagacttctactgtttcatcaaactcccttcttaactagacctagactttctactccaatcaggctaatctacttactgaatgtgacatatttattcctagttccatacctttgcacatgccctactctccactaattatacttaaaagtccaaaaattttttctttagtaacagacttaggtactgctaagcagttattaacacaatattccttagttttcatatgttggttattcatatgtctatttatatgtatatttatttttatgtatgttactatgtaaatatggtttgcagttgtttttgtgtggaatcttgtctttccgtataagttgtaagctccttgagagcaggatccatgtcattcctttatttttataaattattccccctatcattcctttacagtgcctagtgctactcattatgtgttcattgaatttgactgacatagttaaaaacttaaggtttattttagactttcaaggaaacaaaagactttagagtcctctctctgtaattctgccccactcatttgtttaccctgggttttatacagttctcttccttctcccctcccacctttccctggctttttgcctccattccatgaggcatacagtaaggctgcctgctagtaagcagtcacataagtgggtacctatccagccattctcttttcagagcatataatactatcttagccaaacttgcctttgcttcactcatcatgcagccttctgggttggttgctatatatatcttttttccttgatgtcccgttctcttccacagccctgaggtcttacgaatttttctactttctttttgctgttgatgaattgtttcattattaaatatatgcatgtatcaaagcta

SEQ ID NO: 25235 - DNA, 559 bp, Homo sapiens
  source 1..559: mol_type = unassigned DNA
aagatcggtagattgagtggctagagaggtcggaggtaagtggctatagaagtcgggcggacccggaacccagaggacgcgacaccatgacttatgcttatctcttcaagtatatcatcatcggagacacaggtgtggggaagtcatgtctcctcctgcagtttacagataagcggttccagcctgtccacgacctcacaataggtgtggagtttggagctcgtatggtcaacattgatggaaaacaaatcaaactgcaaatctgggatacgtgacctagagtcccgcagggatgtgaagagagaagaaggagaggcctttgctagggagcatggacttatattcatggaaacttcagccaaaacagcctgcaatgttgaagaggccttcattaacacagccaaagaaatatataggaagatccagcagggtttatttgatgtccacaatgaggcaaatggcatcaagattgggccccaacagtcaatttcaacatcagtgggacccagtgcctcccagcggaactctcgtgacatagggtccaactctggctgctgct

SEQ ID NO: 25236 - DNA, 4197 bp, Homo sapiens
  source 1..4197: mol_type = unassigned DNA
cttcttcccggcagccttagcgccaggcccggcgctcctcaagatggctgccgacagtgagcccgaatccgaggtatttgagatcacggacttcaccactgcctcggaatgggaaaggtttatttccaaagttgaagaagtcttgaatgactggaaactgattggaaactctttgggaaagccactcgaaaagggtatatttacttctggcacatgggaagagaaatcagatgaaatttcctttgctgacttcaagttctcagtcactcatcattatcttgtacaagagtccactgataaagaaggaaaggatgagttattagaggatgttgttccacaatctatgcaagatttgctgggtatgaataatgactttcctccaagagcacattgcctggtaagatggtatgggctacgtgagttcgtggtgattgcccctgctgcacacagtgacgctgttctcagcgaatctaagtgcaaccttcttctgagttctgtttctattgccttgggaaacactggctgtcaggtgccactctttgtgcaaattcaccacaaatggcgaagaatgtatgtaggagaatgtcaaggtcctggtgtacgaactgatttcgaaatggttcatcttagaaaagtgccaaatcagtacactcacttatcaggtctgctggatatcttcaaatcaaagattggatgtcctttaactccattgcctccagttagtattgctattcgatttacctatgtacttcaagattggcagcagtatttttggcctcagcaacctccagacatagatgcccttgtaggaggagaagttggaggcttggagtttggcaagttaccatttggtgcctgcgaagatcctattagtgaactccatttagctactacatggcctcatctgaccgaagggatcattgtggataatgatgtttattctgatttggatcctattcaagctccacattggtctgttagagttcgaaaagctgagaatcctcagtgtttgctaggtgattttgtcactgaattttttaaaatttgccgtcgaaaggagtcaactgatgagattcttggacgatctgcatttgaggaagaaggcaaagaaactgctgatataactcatgctttgtcaaaattgacagagccggcatcagttccaattcataaattatcagtttcaaatatggtacacactgcaaagaagaaaatccgaaaacacagaggtgtagaggagtcaccgctaaataatgatgttcttaatactattctcctgttcttattccctgatgctgtttctgagaaaccattagatggaactacttcaacagataataataatcctccatcagagagtgaagactataatctctacaatcagttcaagtctgcaccatctgacagtttaacatacaaactggctttgtgtctctgtatgatcaatttttaccatggagggttgaaaggagtggcacacctctggcaggaatttgttcttgaaatgcgtttccgatgggaaaacaactttctgattccaggattagcaagtggacccccagatctgaggtgttgtttactgcatcagaaactacagatgttaaattgttgtattgaaagaaagaaggcacgtgatgaggggaaaaagacaagtgcttcagatgtcactaatatatatccaggggatgctggaaaagcaggagaccagttggtgccagataatctaaaagaaacagataaggaaaagggagaggtaggaaaatcttgggattcctggagtgacagcgaagaagaattttttgaatgcctaagtgatactgaagaacttaaaggaaatggacaagagagtggcaagaaaggaggacctaaggagatggcaaatttaaggccggaaggacggctctatcagcatgggaaacttacactgctgcataatggagaacctctctacattccagtaacccaggaaccagcacctatgacagaagatctgctagaagagcagtctgaagttttagctaaattaggtacatcggcagagggggctcaccttcgagcacgcatgcagagtgcctgtctgctctcagatatggagtcttttaaggcagctaatccaggttgctccctggaagattttgtgaggtggtattcaccccgggattatattgaagaggaggtgattgatgaaaagggcaatgtggtgctgaaaggagaactgagtgcccggatgaagattccaagcaatatgtgggtagaagcctgggaaacagctaagccaattcctgctagaaggcaaaggagactctttgatgatacacgggaagcagaaaaggtgctgcactatctggcaatccagaaacctgcagaccttgctcggcacctgttaccttgtgtgattcatgcagctgtactcaaggtaaaggaagaagaaagtctcgaaaacatttcttcagttaagaagatcataaagcagataatatcccattccagtaaagttttgcacttccccaatccagaagacaagaaattggaagaaatcattcaccagattactaatgtggaagctctcattgccagagctcggtcactaaaagccaagtttggaactgagaaatgtgaacaggaggaggaaaaggaagatcttgaaaggtttgtgagttgcctgctggagcagcctgaagtgttagtcaccggtgcaggaagaggacatgctggcaggatcattcacaagctgtttgtgaatgcccagagggctgcagctatgactccaccagaggaggaattgaagagaatgggctccccagaggaaagaaggcagaactccgtgtcagacttcccaccccctgctggccgggaattcattttgcgcaccactgtgccgcgccctgctccctactccaaagctctgcctcagcggatgtacagtgttctcaccaaagaggactttagacttgcaggtgccttttcatcagatacttccttcttctgattcttctagcattactcgttggtggcttcagagacagtgctgcctcctcctgagggagggaaggtaccagggagaacctgggaggtcctggagagggccctgtccagttgggtgatcaggaatcaaaccagcatcggaaagacttcccagcaccaagcttgagctgtgtcgtttcgtggagggggcagcgaggatgggcttgagctgttgagagatttctgccctagagatggcctttgtatatgggggggtggtggggggacacaaacacatcagacactccgtcctcacactggcaggacggtgttcatcgcattctcttctgtgaccagcctctaggctagcggctgcattcgtggtctgtgcaaacacttcgtggttctatatatcagcagcaagtgtgcaaaataaaggacctgttaactcagatttctggatattttggtggtagcttctagtcccagaatctgtgtttttaaaatactacatgacattctgtctattcaatcacctggtggtcatctttcttgtactaattaactgttgatgagcattttggatattctaggagaaagcctataatttcacatagtttctctttttcatgtaactgtaacctaaatgtattacttctgataaaactatatatcaaatgtcactgcaaattagttttatatctgtcatgtgagatttgtcttacttatttttcttttggttgccatggaagttatggccctgaaaatcgtctccctccccttctcttgctgtacagcatgcgttctctttttgtggttgctggctgggtactgtatttaatgaagtagagaatagcacttgcaaaaatacagtcttggtacctagagactgtcatgcagatagtataatttggtatatgtgctaatgcattgagtagaggattattttaacacactattttgcttttgtattttagttaaaataatcgatggggatgtgtagcccccccgtgtgaggatgacatcaccacatttctagtttcatggagctcaagatgtcttgtgtctgtgtggctagatggcctctgcttggtaatcttatttttaggcctaaaattcccacttaaatccaaagtaaaaatggttatactgaagcataaaccttgcctgtgtaattttaaaaaattaatagagctgtgcaaaccctgttatttttgtaaaaaaaaaaaaaaa

SEQ ID NO: 25237 - DNA, 3717 bp, Homo sapiens
  source 1..3717: mol_type = unassigned DNA
ggcgctcctcaagatggctgccgacagtgagcccgaatccgaggtatttgagatcacggacttcaccactgcctcggaatgggaaaggtttatttccaaagttgaagaagtcttgaatgactggaaactgattggaaactctttgggaaagccactcgaaaagaacaacttttaacagttccatgtgtgcacattataccttgaaaaaaagtgttcacaacagcgaagacttgaaaccaacccaaatgtccatcaatgacagactggattaagaaaatgtggcacatataaaccatggaatactatgcagccataaaaaaggatgagttcatgtcctttgtagggacatggatgaagctggaaaccatcattctcagcactcttaacacgggaacagaaaaccaaatgctgcatgttctcactcataagtggtatatttacttctggcacatgggaagagaaatcagatgaaatttcctttgctgacttcaagttctcagtcactcatcattatcttgtacaagagtccactgataaagaaggaaaggatgagttattagaggatgttgttccacaatctatgcaagatttgctgggtatgaataatgactttcctccaagagcacattgcctggtaagatggtatgggctacgtgagttcgtggtgattgcccctgctgcacacagtgacgctgttctcagcgaatctaagtgcaaccttcttctgagttctgtttctattgccttgggaaacactggctgtcaggtgccactctttgtgcaaattcaccacaaatggcgaagaatgtatgtaggagaatgtcaaggtcctggtgtacgaactgatttcgaaatggttcatcttagaaaagtgccaaatcagtacactcacttatcaggtctgctggatatcttcaaatcaaagattggatgtcctttaactccattgcctccagttagtattgctattcgatttacctatgtacttcaagattggcagcagtatttttggcctcagcaacctccagacatagatgcccttgtaggaggagaagttggaggcttggagtttggcaagttaccatttggtgcctgcgaagatcctattagtgaactccatttagctactacatggcctcatctgaccgaagggatcattgtggataatgatgtttattctgatttggatcctattcaagctccacattggtctgttagagttcgaaaagctgagaatcctcagtgtttgctaggtgattttgtcactgaattttttaaaatttgccgtcgaaaggagtcaactgatgagattcttggacgatctgcatttgaggaagaaggcaaagaaactgctgatataactcatgctttgtcaaaattgacagagccggcatcagttccaattcataaattatcagtttcaaatatggtacacactgcaaagaagaaaatccgaaaacacagaggtgtagaggagtcaccgctaaataatgatgttcttaatactattctcctgttcttattccctgatgctgtttctgagaaaccattagatggaactacttcaacagataataataatcctccatcagagagtgaagactataatctctacaatcagttcaagtctgcaccatctgacagtttaacatacaaactggctttgtgtctctgtatgatcaatttttaccatggagggttgaaaggagtggcacacctctggcaggaatttgttcttgaaatgcgtttccgatgggaaaacaactttctgattccaggattagcaagtggacccccagatctgaggtgttgtttactgcatcagaaactacagatgttaaattgttgtattgaaagaaagaaggcacgtgatgaggggaaaaagacaagtgcttcagatgtcactaatatatatccaggggatgctggaaaagcaggagaccagttggtgccagataatctaaaagaaacagataaggaaaagggagaggtaggaaaatcttgggattcctggagtgacagcgaagaagaattttttgaatgcctaagtgatactgaagaacttaaaggaaatggacaagagagtggcaagaaaggaggacctaaggagatggcaaatttaaggccggaaggacggctctatcagcatgggaaacttacactgctgcataatggagaacctctctacattccagtaacccaggaaccagcacctatgacagaagatctgctagaagagcagtctgaagttttagctaaattaggtacatcggcagagggggctcaccttcgagcacgcatgcagagtgcctgtctgctctcagatatggagtcttttaaggcagctaatccaggttgctccctggaagattttgtgaggtggtattcaccccgggattatattgaagaggaggtgattgatgaaaagggcaatgtggtgctgaaaggagaactgagtgcccggatgaagattccaagcaatatgtgggtagaagcctgggaaacagctaagccaattcctgctagaaggcaaaggagactctttgatgatacacgggaagcagaaaaggtgctgcactatctggcaatccagaaacctgcagaccttgctcggcacctgttaccttgtgtgattcatgcagctgtactcaaggtaaaggaagaagaaagtctcgaaaacatttcttcagttaagaagatcataaagcagataatatcccattccagtaaagttttgcacttccccaatccagaagacaagaaattggaagaaatcattcaccagattactaatgtggaagctctcattgccagagctcggtcactaaaagccaagtttggaactgagaaatgtgaacaggaggaggaaaaggaagatcttgaaaggtttgtgagttgcctgctggagcagcctgaagtgttagtcaccggtgcaggaagaggacatgctggcaggatcattcacaagctgtttgtgaatgcccagagggctgcagctatgactccaccagaggaggaattgaagagaatgggctccccagaggaaagaaggcagaactccgtgtcagacttcccaccccctgctggccgggaattcattttgcgcaccactgtgccgcgccctgctccctactccaaagctctgcctcagcggatgtacagtgttctcaccaaagaggactttagacttgcagttaaaataatcgatggggatgtgtagcccccccgtgtgaggatgacatcaccacatttctagtttcatggagctcaagatgtcttgtgtctgtgtggctagatggcctctgcttgctccccaggtgtgtcctggtagacaactgctcccaggagctggcatagaagcaaacctgcaggaaaagccaacccactccaggtgtgtggaagctgctggcaggaacccagcaaggatccagctgggttgtaatggaaacaatgcaaccaacaatccttgagcgagccgggatagatgtggcctcatcactgaagatttcatctgagacctctgcaaatatccaaattgtatatgctcttagagcagatcattttctcacaggttgtctaaccaaaggaaaggaaatcagcatatcaaagagatatctgcactcccatgttgattgcagcactgttcacaacagccaagatgtggaatcaaccagagtgtccattggcagatgaatggattaaaaatgtggtgcatgg

SEQ ID NO: 25238 - DNA, 4185 bp, Homo sapiens
  source 1..4185: mol_type = unassigned DNA
gctcctcaagatggctgccgacagtgagcccgaatccgaggtatttgagatcacggacttcaccactgcctcggaatgggaaaggtttatttccaaagttgaagaagtcttgaatgactggaaactgattggaaactctttgggaaagccactcgaaaagggtatatttacttctggcacatgggaagagaaatcagatgaaatttcctttgctgacttcaagttctcagtcactcatcattatcttgtacaagagtccactgataaagaaggaaaggatgagttattagaggatgttgttccacaatctatgcaagatttgctgggtatgaataatgactttcctccaagagcacattgcctggtaagatggtatgggctacgtgagttcgtggtgattgcccctgctgcacacagtgacgctgttctcagcgaatctaagtgcaaccttcttctgagttctgtttctattgccttgggaaacactggctgtcaggtgccactctttgtgcaaattcaccacaaatggcgaagaatgtatgtaggagaatgtcaaggtcctggtgtacgaactgatttcgaaatggttcatcttagaaaagtgccaaatcagtacactcacttatcaggtctgctggatatcttcaaatcaaagattggatgtcctttaactccattgcctccagttagtattgctattcgatttacctatgtacttcaagattggcagcagtatttttggcctcagcaacctccagacatagatgcccttgtaggaggagaagttggaggcttggagtttggcaagttaccatttggtgcctgcgaagatcctattagtgaactccatttagctactacatggcctcatctgaccgaagggatcattgtggataatgatgtttattctgatttggatcctattcaagctccacattggtctgttagagttcgaaaagctgagaatcctcagtgtttgctaggtgattttgtcactgaattttttaaaatttgccgtcgaaaggagtcaactgatgagattcttggacgatctgcatttgaggaagaaggcaaagaaactgctgatataactcatgctttgtcaaaattgacagagccggcatcagttccaattcataaattatcagtttcaaatatggtacacactgcaaagaagaaaatccgaaaacacagaggtgtagaggagtcaccgctaaataatgatgttcttaatactattctcctgttcttattccctgatgctgtttctgagaaaccattagatggaactacttcaacagataataataatcctccatcagagagtgaagactataatctctacaatcagttcaagtctgcaccatctgacagtttaacatacaaactggctttgtgtctctgtatgatcaatttttaccatggagggttgaaaggagtggcacacctctggcaggaatttgttcttgaaatgcgtttccgatgggaaaacaactttctgattccaggattagcaagtggacccccagatctgaggtgttgtttactgcatcagaaactacagatgttaaattgttgtattgaaagaaagaaggcacgtgatgaggggaaaaagacaagtgcttcagatgtcactaatatatatccaggggatgctggaaaagcaggagaccagttggtgccagataatctaaaagaaacagataaggaaaagggagaggtaggaaaatcttgggattcctggagtgacagcgaagaagaattttttgaatgcctaagtgatactgaagaacttaaaggaaatggacaagagagtggcaagaaaggaggacctaaggagatggcaaatttaaggccggaaggacggctctatcagcatgggaaacttacactgctgcataatggagaacctctctacattccagtaacccaggaaccagcacctatgacagaagatctgctagaagagcagtctgaagttttagctaaattaggtacatcggcagagggggctcaccttcgagcacgcatgcagagtgcctgtctgctctcagatatggagtcttttaaggcagctaatccaggttgctccctggaagattttgtgaggtggtattcaccccgggattatattgaagaggaggtgattgatgaaaagggcaatgtggtgctgaaaggagaactgagtgcccggatgaagattccaagcaatatgtgggtagaagcctgggaaacagctaagccaattcctgctagaaggcaaaggagactctttgatgatacacgggaagcagaaaaggtgctgcactatctggcaatccagaaacctgcagaccttgctcggcacctgttaccttgtgtgattcatgcagctgtactcaaggtaaaggaagaagaaagtctcgaaaacatttcttcagttaagaagatcataaagcagataatatcccattccagtaaagttttgcacttccccaatccagaagacaagaaattggaagaaatcattcaccagattactaatgtggaagctctcattgccagagctcggtcactaaaagccaagtttggaactgagaaatgtgaacaggaggaggaaaaggaagatcttgaaaggtttgtgagttgcctgctggagcagcctgaagtgttagtcaccggtgcaggaagaggacatgctggcaggatcattcacaagctgtttgtgaatgcccagaggctgactgaatcttctgatgaggctgcagctatgactccaccagaggaggaattgaagagaatgggctccccagaggaaagaaggcagaactccgtgtcagacttcccaccccctgctggccgggaattcattttgcgcaccactgtgccgcgccctgctccctactccaaagctctgcctcagcggatgtacagtgttctcaccaaagaggactttagacttgcaggtgccttttcatcagatacttccttcttctgattcttctagcattactcgttggtggcttcagagacagtgctgcctcctcctgagggagggaaggtaccagggagaacctgggaggtcctggagagggccctgtccagttgggtgatcaggaatcaaaccagcatcggaaagacttcccagcaccaagcttgagctgtgtcgtttcgtggagggggcagcgaggatgggcttgagctgttgagagatttctgccctagagatggcctttgtatatgggggggtggtggggggacacaaacacatcagacactccgtcctcacactggcaggacggtgttcatcgcattctcttctgtgaccagcctctaggctagcggctgcattcgtggtctgtgcaaacacttcgtggttctatatatcagcagcaagtgtgcaaaataaaggacctgttaactcagatttctggatattttggtggtagcttctagtcccagaatctgtgtttttaaaatactacatgacattctgtctattcaatcacctggtggtcatctttcttgtactaattaactgttgatgagcattttggatattctaggagaaagcctataatttcacatagtttctctttttcatgtaactgtaacctaaatgtattacttctgataaaactatatatcaaatgtcactgcaaattagttttatatctgtcatgtgagatttgtcttacttatttttcttttggttgccatggaagttatggccctgaaaatcgtctccctccccttctcttgctgtacagcatgcgttctctttttgtggttgctggctgggtactgtatttaatgaagtagagaatagcacttgcaaaaatacagtcttggtacctagagactgtcatgcagatagtataatttggtatatgtgctaatgcattgagtagaggattattttaacacactattttgcttttgtattttagttaaaataatcgatggggatgtgtagcccccccgtgtgaggatgacatcaccacatttctagtttcatggagctcaagatgtcttgtgtctgtgtggctagatggcctctgcttggtaatcttatttttaggcctaaaattcccacttaaatccaaagtaaaaatggttatactgaagcataaaccttgcctgtgtaattttaaaaaattaatagagctgtgcaaaccctgttatttttgtaaaaaaaaaaaaaaa

SEQ ID NO: 25239 - DNA, 7257 bp, Homo sapiens
  source 1..7257: mol_type = unassigned DNA
ggtttctccgccttctgcttggctagagctattggggctcggtggcggccgcagtggggtggagggggcagggcgtggtgaggtaaggtgagtgccgtagtggggttccctggagccatggcctgctccattgtccagttctgctacttccaggacctccaggccgcccgggacttcctctttcctcacctgcgggaggagatcctcagcggcgccttgcggagggaccccagtaaatcaacagactgggaagatgatggttggggagcatgggaagaaaatgaaccacaagaacctgaagaagaaggaaatacttgcaaaacacaaaaaacttcctggctccaagattgtgttttatccttatctccaaccaatgatcttatggtgatagctcgagagcaaaaagctgtatttctagtgccaaaatggaaatatagtgataaaggaaaggaagaaatgcaatttgctgttggctggagtggttccttaaatgtcgaagaaggggaatgtgtaaccagtgctctatgtatcccactagcaagccaaaagaggagttccactgggcgtcctgactggacctgcattgtggtgggttttacttcaggttatgtacgcttctacactgagaatggtgtgctcttgcttgcacagcttttgaatgaggacccagtacttcaacttaaatgcagaacctatgaaataccacgacatcccggcgtgactgagcagaatgaagagttgagtatcttatatccagctgccattgtgactattgatggatttagcctttttcaatctcttcgtgcttgtcgaaatcaggtagcaaaagctgcagcatcaggcaatgagaacatacaaccaccaccattagcttataagaaatggggtctacaagatattgacactattattgatcatgctagtgttggtattatgactctgtccccctttgatcaaatgaagactgcctccaatataggtggatttaatgcagcaattaaaaatagtccacctgccatgtctcagtatatcactgtagggtccaatccatttactggcttcttctatgctttagagggaagcacacaaccattattatcccatgttgcactagcagttgcaagtaaactcacttctgctttatttaatgctgccagtggttggcttggttggaaaagtaagcacgaagaagaagctgtccaaaagcaaaagccgaaggttgagccagctaccccattagctgtaagatttggacttccagattctagacgccatggtgaaagcatatgtctgtctccatgtaacacactggcagcagtaacagatgatttcggcagagttattttattggatgtagctagaggaattgcaatacgcatgtggaaagggtaccgcgacgcacaaattggatggattcaaactgtagaggacctccatgaaagagtgccagaaaaggcagatttttccccctttggaaattctcagggtccaagtcgagtagctcaattccttgtgatctatgcgccaagaaggggaattttagaagtgtggagcacacagcagggacctagagtaggagctttcaatgtggggaagcactgcaggctgctgtatcctggctataaaataatgggtttaaataatgttaccagtcagagttggcagccacagacttatcagatctgtctggttgatccagtgtctggaagtgtgaaaacagtgaacgttcccttccatttagcactgagtgataagaagagtgaacgagccaaggatatgcacctagtgaagaaactagcagccttactgaaaacaaaatctcccaatcttgatttggttgaaacagaaataaaggaattaattcttgatattaaataccctgcaaccaaaaaacaagctttggaaagcattttggcaagtgaacgtttaccattttcttgccttagaaacatcactcagactttaatggacactttaaaaagtcaagaacttgagtctgttgatgaaggattgctacagttttgtgccaataaactaaaactgctgcaactctatgagtctgtcagtcaattaaattcccttgattttcatttagacacaccattctctgataatgacttggctctgttactaaggcttgatgaaaaagaactgcttaagctccaggcattactagagaaatataagcaagagaacaccaggacaaatgttcgattttctgatgataaagatggtgtgttgcctgtaaaaacattcttggaatatttagaatatgaaaaggatgtgctcaacataaagaaaataagtgaagaggaatatgtggctttaggtagtttctttttttggaagtgtttgcatggagaaagctccactgaggatatgtgtcacactttggagtcggctggtcttagccctcagctgttgttgtctctgctcctgagtgtttggctttcaaaggaaaaggatattttggataaaccacagtcaatctgctgtcttcataccatgctgtccctcctgagcaagatgaaagtggccatcgatgagacctgggattctcagtctgtgtccccatggtggcagcagatgcgcacagcctgtattcagtctgagaacaatggagccgctctgttgtctgcgcatgttgggcattctgttgctgcacagatatcaaacaacatgacagagaaaaaattttcccaaacagttttgggtgctgattcagaggccctcactgattcctgggaggcactttctcttgacactgagtactggaaactccttctgaaacagctggaggattgtctcatacttcagactctgcttcacagcaaagggaacactcagacctccaaagtgtcatcactgcaggctgagccacttccaaggctttctgttaaaaagttattagaaggaggaaaaggtggcattgcagacagtgtagccaagtggatatttaaacaggacttcagccctgaagtattaaaactggctaatgaagaaagagatgcagaaaacccagatgaacccaaagaaggtgttaacagaagtttccttgaggtatcagagatggagatggacttaggagccataccagacttactgcatttagcctatgagcagtttccttgtagccttgagctcgatgtcttgcatgcacattgctgctgggagtacgttgttcagtggaataaagatccagaggaagcacgtttttttgttaggtcaatagaacacttgaagcaaatatttaatgcacatgttcaaaatggcattgcactgatgatgtggaatacgttcttagttaaaagattttctgctgctacatacttaatggataaggttggaaaatcaccaaaagataggttatgccgaagggatgtgggaatgagtgacacagcaatgacatctttcctcggctcctgtttggatcttcttcagatcttaatggaggcagatgttagcagggatgaaatacaggtgcctgtgctggatactgaggatgcgtggctctccgtggaaggaccaatctccatagtggaactggcccttgaacagaagcacatccactacccactggtggagcaccactccatcctgtgctccatcttgtatgcagtcatgaggttttctctgaagaccgtgaagccactttcactttttgacagtaagggaaaaaatgcatttttcaaagacctaacttcaattcagttattacctagtggggaaatggatccaaattttatttctgtacgacaacagttcttattgaaagttgtcagtgcagctgtccaggcccaacattcagccacaaaggtcaaagatcccacagaagaggccacacccactccttttgggaaagaccaagattggccagctctagctgtggatttagcccatcaccttcaagttagtgaagatgttgttagaaggcattatgtgggggaactatacaactatggagttgaccacttaggagaagaggccattctacaggttcatgacaaagaggtccttgcctctcagctgctggtgctcacggggcaaaggctggctcatgcgcttctccacacccagacaaaagaaggaatggagctgcttgccagacttccacccacactgtgtacttggctgaaagcaatggacccccaggaccttcaaaacactgaagtgccaattgcaacaacagctaaactagtaaataaagtaattgagcttttaccagaaaaacatgggcaatatggtctagccttacacctcattgaagctgtggaagccatatctcttccttctttatgacacttacctactggaaatagtctaaaattatgattataacatgaagtagtgcatggttattttacatagtaagacctggaattttatgggaaaagtatgtctttttttttccttttgtaaaataaataaaagtatatacaacttttaaaaagtgcaaccctggctaaattccactcctttggttaatactgaagataaaatataaacaaatgtcaactctgttataattaatacagatgttttactgtttatttctaattcaaacacttaagtagctttattgttaaactttgctatttaaaattggttataatttagattatgttcttataagattctatatttcctatctaaaatgttgttgtaattcaatttaaatgtgttcatgtacagtccccatcagtagcgtatagaacaccccactctcctttagtaaatgttgagaaaatgcctttgttgtcatgctccaaatcccacactgggctgccacctgggagttctggataccgaaaggttcctttcccagaggttctgctgttgccatcagaggaggatgaccgtgcttgaggaggaagaatgggttcaagatcatcatattcatcagaaggggacactaaatagaacccttaacctgttgtacttgccaaaattgagaatcagagatgtgtaaaatgcagcaaattaattataatgtaagttaagatttgctttttgccaagttgcaaagttgtatccacatcaggtcactgtaaaaatgtattatcttgtaaaacttatgtaaaaaaaaaaaaaaaaaaaaggcaaagatactaaaaattttaagtccgactttatttttcctacaagtgtttagaaatgcttctgggatttgctaatattatctgtccttgggaacagtattgaaaaaactgcttagtggtattacagctttagcaaacctacctcacagctgggatgagaggataaaatacaactaattttgtaccctatagtgcctagagcagtccaagtgctaaataaatatttactgattaaaaccaaactatagctactcgggaggctggaggaggatcgcttgagcccaggagtttgaggccattctgggcaatatagcaagaccctgtctcgaaaaaaaaaaaaaaaagaaaaaaccaaactaaccaaaactctgtaaaagagtgctttgagctctacaaataccaagtatttattgtggtatatttttagaatgtagccatacagtgtaattatgggtatctgtcatggatcacaattattattcatagtaagtcattgtgatacagaagtttgtttcttcacttccccttaagaagccaactatagtaatcatgcaaagttgaggagtatgtccttcagggatataaaaagaaaaacaaatctgttttttgagctaaaagagcacatccaaacaagaatttaactggctaaaatttagtaattactgttaagtaactatcaaacttgaaatcttacaagataaatggttaagatgtcttgagtatttgggatgggggcctgtgagtctgattgagacatacattttacagagtagcagcactggaaagggctagtccaacctcccagcctctgcttgggtctccgctgccccagccacacacatcctagaattcttgtaaacatatctggctctgtgttaacagtcacttgttatatgttttctaagagattagttcttcctgtgatttttccaagtacgctgaaagtagtagtatgaacttaaggaggctagtcaaagaaacttggagttataggtatttttaaagaataaatcctcaattccatcatcacttggcggggagggggcacttattaagcattttagataataaaactggttaagcttactctggtagaacagacaatcaaatctggggattgctgagaacaataataagctgaagtatggctcacagaatcctaacacaaatcattaagtctctagttagatttgttatcctaaaatttttcatagaattttaaaatctaattctgacttgtatggttaagaaaagcagttaaatattttactacttatcaagggcttttaaaataaataaatctgattgataggaagaaaggcaaataaatacctatgtagacattctataataacaaagagccatagatgataaaggaattagattttaatgtagaatgggtggtttctgaaacaaaggtatgtggtactttgtagttattgatgagaagccagtaaccagtagtgttttcctagatatatgcccaccctcacacaactttcttcattaacaaacattaaatatgcatttgtatcttattaaattatattgtataatgctgaaggaaaacaaaaagtgttcaaataatcataacttctacattacaggttctgtttagatgcagaactagaggggccagggtaaatgtagataaagagatatatagcaccatgcttcttaatgcttcatacttttgcaaacagaaaaaaaaagttttacttttattataaaacttcatctatggtcaaagtaaacactgttacatttaaattgctttttaaaaacaattgcgatctaaaaagtcaaaaatctgaaatttaataatatgagacttacactgaatataatgttcatttagaagttgctgtggtccacttcatttataaggaacaaatatttttacagtacactatagcaacagcaaaagccctctctcaccctgataggaatgggtttgctgggtgtctagaagttagattcctgctgaatagaattagccatccttaaaagattttaatccaatactgaactgtttataaaatgctttctctattgtaatgtactgtaagtagtgaaattctgtatatactgctattttctgtctgttcattgttgtgaacttcttatgtatattagtgaaataaattttcagctttca

SEQ ID NO: 25240 - DNA, 1393 bp, Homo sapiens
  source 1..1393: mol_type = unassigned DNA
gtttcataatctgttggctcaaatctgctgctgccacaccctgtgcctctcagggtccctgggtcctgttgcagttatcatatgcctcacctttaacctaaatgactctgcgaagtggctgctatggaaggatttactgagtgcaaaatggattttcttccctgctctttggggcaaagctggctcagagattcttagctgcagggggaggggctggcaggcctgaaccgcagttggacttagcagccaggggttttctggttttcattaaaattctctggctgtcttttgggatagctccattggatatgactgtgcactggagccggttgtgctgttctctcagctgtacacacccatcaaatcacagtgcccctgaggacgagagaaaattgaagctgtgtaaatgagtatggaagattatgatttcctgttcaaaattgttttaattggcaacgctggtgtggggaagacgtgcctcgtccgaagattcactcagggtcttttccccccaggtcaaggagccacaattggagttgattttatgattaagacagtggagattaatggtgaaaaagtaaagctacagatctgggacacagcaggtcaagagagatttcggtccattacccagagttactaccgaagcgccaatgccttgatcctcacctatgacattacctgtgaggaatccttccgttgccttcctgagtggctgcgggagatagaacaatatgccagcaacaaggtcatcactgtgttagtgggcaacaagattgacctggctgaaaggagagaggtttcccagcagcgagctgaagaattctcagaagctcaggacatgtattatctggagacctcagccaaggaatctgataatgtggagaaactcttccttgacttagcatgccgactcatcagtgaagccagacagaacacacttgtgaacaatgtatcctcacccttacctggagaagggaaaagcatcagctatttgacttgttgtaatttcaactaaaggctgaggcacggagaagaaaaggaatcagcaactgccctgatgggccatgagatgctggggagatctggcgatgactgtggctcccgctctctgaccttctgactcctgtgggctcctgagcttacaaagcatggcaggccaagggcctcgaccacaggccagcattagcagaacatataatggtttcacccttttccagtctggagttggagcaaggagaaaattgcactaggcactccatgatctgcagagcatgttgcttttgtttttttaaaaagcaagtaaaagcgcattcctaaacagagtccggggggaaatgtactgtagggatccctcctgcacatcagtgggtgcatgtgggaactcttcttt

SEQ ID NO: 25241 - DNA, 591 bp, Homo sapiens
  source 1..591: mol_type = unassigned DNA
aagtgtagcagcagcaccagggcagggactgactccagcccttggactcaggacatcgcagaccttcccttgcgtgcgtgactcattcgcacatccatttctgtttatgcctggggtggggagaaaaatcccaaaccaggttggatggagtgcagtggcgcaatctcggctcacggcaacctccgcctcccgggttcaagcaattctcctgcctcagcctccggagtagctgggattacagctgtgtaaatgagtatggaagattatgatttcctgttcaaaattgttttaattggcaacgctggtgtggggaagacgtgcctcgtccgaagattcactcagggtcttttccccccaggtcaaggagccacaattggagttgattttatgattaagacagtggagattaatggtgaaaaagtaaagctacagatctgggacacagcaggtcaagagagatttcggtccattacccagagttactaccgaagcgccaatgccttgatcctcacctatgacattacctgtgaggaatccttccgttgccttcctgagtggctgcgggagatagaacaatatgccagcaacaag

SEQ ID NO: 25242 - DNA, 792 bp, Homo sapiens
  source 1..792: mol_type = unassigned DNA
gattgccgctcgctccagctgagctaagtgtagcagcagcaccagggcagggactgactccagcccttggactcaggacatcgcagaccttcccttgcgtgcgtgactcattcgcacatccatttctgtttatgcctggggtggggagaaaaatcccaaaccagctgtgtaaatgagtatggaagattatgatttcctgttcaaaattgttttaattggcaacgctggtgtggggaagacgtgcctcgtccgaagattcactcagggtcttttccccccaggtcaaggagccacaattggagttgattttatgattaagacagtggagattaatggtgaaaaagtaaagctacagatctgggacacagcaggtcaagagagatttcggtccattacccagagttactaccgaagcgccaatgccttgatcctcacctatgacattacctgtgaggaatccttccgttgccttcctgagtggctgcgggagatagaacaatatgccagcaacaaggtcatcactgtgttagtgggcaacaagattgacctggctgaaaggagagaggtttcccagcagcgagctgaagaattctcagaagctcaggacatgtattatctggagacctcagccaaggaatctgataatgtggagaaactcttccttgacttagcatgccgactcatcagtgaagccagacagaacacacttgtgaacaatgtatcctcacccttacctggagaagggaaaagcatcagctatttgacttgttgtaatttcaactaaaggctgag

SEQ ID NO: 25243 - DNA, 558 bp, Homo sapiens
  source 1..558: mol_type = unassigned DNA
gaggttgctgcttgaggttgcatgggcctatggagcagggcctggggaaagaagctgtctgcttctatactcatgtgagtctctggatcatggtggtggccttctccttcactcatgtcgggacaactgagtccatggtgcatgggaaggtagagacatagctatcaccttccccagagccagtgatactgtgcctccactgaagattgctgggaggaattgaaagtttacagttcccatctcacagtgaggatgaaatgagatcagagcacctgatacatactccattggatatgactgtgcactggagccggttgtgctgttctctcagctgtacacacccatcaaatcacagtgcccctgaggacgagagaaaattgaagctgtgtaaatgagtatggaagattatgatttcctgttcaaaattgttttaattggcaacgctggtgtggggaagacgtgcctcgtccgaagattcactcagggtcttttccccccaggtcaaggagccacaattggagttgattttatgattaagacagtggagattaatggtga

SEQ ID NO: 25244 - DNA, 588 bp, Homo sapiens
  source 1..588: mol_type = unassigned DNA
agtgcccctgaggacgagagaaaattgaaggtaggcaatagcctggctgagggctcttgctcagcaatctttgtgctgtgtaaatgagtatggaagattatgatttcctgttcaaaattgttttaattggcaacgctggtgtggggaagacgtgcctcgtccgaagattcactcagggtcttttccccccaggtcaaggagccacaattggagttgattttatgattaagacagtggagattaatggtgaaaaagtaaagctacagatctgggacacagcaggtcaagagagatttcggtccattacccagagttactaccgaagcgccaatgccttgatcctcacctatgacattacctgtgaggaatccttccgttgccttcctgagtggctgcgggagatagaacaatatgccagcaacaaggtcatcactgtgttagtgggcaacaagattgacctggctgaaaggagagaggtttcccagcagcgagctgaagaattctcagaagctcaggacatgtattatctggagacctcagccaaggaatctgataatgtggagaaactcttccttgacttagcatgcc

SEQ ID NO: 25245 - DNA, 550 bp, Homo sapiens
  source 1..550: mol_type = unassigned DNA
ttgtgctacggtctctccaccccctgctgctgctgggcttgcgattgccgctcgctccagctgagctaagtgtagcagcagcaccagggcagggactgactccagcccttggactcaggacatcgcagaccttcccttgcgtgcgtgactcattcgcacatccatttctgtttatgcctggggtggggagaaaaatcccaaaccagtttacagttcccatctcacagtgaggatgaaatgagatcagagcacctgatacatactccattggatatgactgtgcactggagccggttgtgctgttctctcagctgtacacacccatcaaatcacagtgcccctgaggacgagagaaaattgaagctgtgtaaatgagtatggaagattatgatttcctgttcaaaattgttttaattggcaacgctggtgtggggaagacgtgcctcgtccgaagattcactcagggtcttttccccccaggtcaaggagccacaattggagttgattttatgattaagacagtggagattaatggtgaaaaagtaaagct

SEQ ID NO: 25246 - DNA, 9929 bp, Homo sapiens
  source 1..9929: mol_type = unassigned DNA
tgctgggcttgcgattgccgctcgctccagctgagctaagtgtagcagcagcaccagggcagggactgactccagcccttggactcaggacatcgcagaccttcccttgcgtgcgtgactcattcgcacatccatttctgtttatgcctggggtggggagaaaaatcccaaaccagctccattggatatgactgtgcactggagccggttgtgctgttctctcagctgtacacacccatcaaatcacagtgcccctgaggacgagagaaaattgaagctgtgtaaatgagtatggaagattatgatttcctgttcaaaattgttttaattggcaacgctggtgtggggaagacgtgcctcgtccgaagattcactcagggtcttttccccccaggtcaaggagccacaattggagttgattttatgattaagacagtggagattaatggtgaaaaagtaaagctacagatctgggacacagcaggtcaagagagatttcggtccattacccagagttactaccgaagcgccaatgccttgatcctcacctatgacattacctgtgaggaatccttccgttgccttcctgagtggctgcgggagatagaacaatatgccagcaacaaggtcatcactgtgttagtgggcaacaagattgacctggctgaaaggagagaggtttcccagcagcgagctgaagaattctcagaagctcaggacatgtattatctggagacctcagccaaggaatctgataatgtggagaaactcttccttgacttagcatgccgactcatcagtgaagccagacagaacacacttgtgaacaatgtatcctcacccttacctggagaagggaaaagcatcagctatttgacttgttgtaatttcaactaaaggctgaggcacggagaagaaaaggaatcagcaactgccctgatgggccatgagatgctggggagatctggcgatgactgtggctcccgctctctgaccttctgactcctgtgggctcctgagcttacaaagcatggcaggccaagggcctcgaccacaggccagcattagcagaacatataatggtttcacccttttccagtctggagttggagcaaggagaaaattgcactaggcactccatgatctgcagagcatgttgcttttgtttttttaaaaagcaagtaaaagcgcattcctaaacagagtccggggggaaatgtactgtagggatccctcctgcacatcagtgggtgcatgtgggaactcttctttagggcttcggtggtaatcatctgggggccctggttttcttgtctaccagataaaccaaaactgggaaggccaagtacagtctctgtggtgcgtattgacgaccccatggagattttgaaaagtgttatttctcttgtccacaggcactttcaagaactttgggatgtaaaaatgaaatgaaacctttacccatgaccaacagtaacaatcattgttttaataatatatacaagctccataactccttttggtgctaatgattccgctatttcacagaccaaacgttttagtacattaatgtccttaaatgtgttatatagaaataaaaaaatgggggaagtccatgaatcagcactctttctcaaagtctcattactacctttttaaaggtggatttttgggaaaagagaatacttttccttttatgttcccctctgaatctctaccactttcttgtctctccagccctttatgtaaatgaaaacgtttgcaaaatgaaaaaaataaacaaatggttgatgacattctaatataaaaacttagctctaacacattttgagtagtatgaggaaacagaccagatatgaccaaaatactgtggattaatggactgtagtgcagggctcctagcagagcacagtccttgatagtaggtcacatcttttacttcctggtactctccatcttggacagaccaaggcttaggattttgtagattttttagtatgataagtgagaatagcaacagatgaaaagtctcacgacccatttttatatcttcgatgataaccttagaaaaattctgctcgtggaagcagattgaactgtcatttatcccctccttcttgtaataatgttaccttcagacgcttaaccatatgttctttcttttttctttctcttttcctctctatttttctggtctctccttttcttcttccctccctccctccctccttccctcccatccttatatgcctgtgttactgcaaatctccaattcaaatggaggtgtatatgcctttacttagccaatttaaaaacaggactcaaaatgggagatgtgctgctgaatatgtgtttctttttcttcagtgccatactttgatagcttccaatttgttcactgatataaatgcaaattgggaaaataattaaacctgtatgctgttgatgctgtcagatgtttctgtagcttgctgcttagcataactgagggatgagtaatggaataaggatatgatgtgtaattccactgttgctgtagatggtgacaatctcagttctgatatgttgatgtttgaaagctatttaattgtaaagaaattagtcatgtagagacatgatgtggataaagcatttctggcatttctctagcaggttctagattgaccagtgtcttgcacatgagattatgcatattttttaaggggctgatacttttggttggcctcactgtgtttttcctgatcctgtgggaaagagaaaggcatcccagaagtttgacttgtttttcttttagaatctgtctctgcaggaaagaaaagtcattttaataaaaaccaaaataatttataataattgttgcctttccctccccatcctctccactaagccagcaactaaatgtattcagaaaacaagttaatcaaggagggcagaagaattttttttaaactgtaagaaaatgttcctaagtttagatttattacctgtcatttagggcaaaaatccagtgtccccagcacatgatgacccaactttgtctcacagttgcaagtgtgttgaaaataaagttgctttgtgaacttagaggaaatggctgtgttagattggactgatttagttgcaaaataataccttttagggtcacacttgtattattccctagggtttagccttctctatatacccttggccagactcagaaggggattaaaaagctctggtcttggcctctatcttccttgttgctcctcccagcctttccataacttacccatccacagcccatcagcaggaacacatgagaatgtgggactttgtttctttttttcttagttgtatgaattccagattaggccttatggatacttgtctactaatatatctgaagtttgaaaacaatccctgacaatattgtaggtgcaataaatattagtcaaataaacatttaagtgccaaggtggggtggtagtggttgggggagctttttttgattaaacagaaattccttcaagtagaacttgagaaaggacactaaatacagtcatcttaacccaggccagaacctaaatttattggtttgcctaacagtcttattgtcatggcaatatttgctaagatgagccttctttagataaaaatgaactctcatttagtggtggatgaaaaaagagaaattgctttatcatatagtttaatttggctcggtctactaagaccaccagggttgatgtattcctccatttttggtgtgatctttttcttcattcaataaagttattaaatatatggcaaaacttttttcagtttccagtgaaaatgcatgatactcatgtcatggagtcaggcttgggaaaatctatgaaataatagtttgctgataatgatattttcttatggctttgtatagactacatcctcaaaggattttgtgcttctttgcccatagaaggctttttctccctttgtgtgcttttattaaatctgttgaattatattaatattttttgaatttacagggccaattatcttttttgatggattacttagattaggccatgggttcttcctggcctttctttttctcggtcttttaatcatttcacgtttttatctctccctgagtaaagtggcaagaaaactaaaaatgaaagttaaatgggttgatttgacaatgtgtcaagttctgatttagagtttataaggaaggtagaaacgattggccaaaataagatatttggatgaggattatttaagccgtttagatttggccagagacgccagatttagcaaaggactgggttcttatcttctttcattcatgaatatatgccttgggaggacactggtgattcccacagaattaggccaatgatttgccacattaccctttaagctagcccataattccaccagatcccacaccaagtttcagttcatgactcatactgaataaacgtcagttgtaaatgatgtttgaattggtcttcctactaaagtgaaacatcttcttttaagccaagccacatgaatgaaatagcacaatcagaaaaaaatctttttttttttttttgcatatcaaaccaatggccttctccactaagccagcaactaaaggtattcagaaaacaagttaatcaaggtgggcagaactttttgaactgtgaggaaatgttcctaagtttagatttattacctgtcatttagggcaaaaatctaatgtcttttttatttcttaatcttgtagaactctgtatttcatagtaatgagtacttagggatcattgctctattagcctctgggagagatcttctagagtttgccattcctttttttccaaaattttttgttgttgttgttgttgttttaactgcaactggttacttttctcaaccatggtcctgacatgtttatactatgatacttttgagacttcgctaaagaattaaaagctgtgaaacaacatttgcttctcatccttcagacaaaatgtgttccatttaagcagcatggttaaacactaattttgggataagggagggatatgttttctttactttctttttggatttcatttctgtggcatgagcctatttgcgtttggaaggaaagatgccttcctttacattcttcacactggtaattttttcatactgaattaagaaattatcatcccttcaaaacacatattaatatagcaacattagagtaagggagatggcatttcatctcctctcctcagtcccttgatgttggaatgttattatcatttccaggagccatactttgaaattaaaaacaaattgaggcattaccagtctgatgaaggaattttaaatgcaagccatttaaagaatacttgaaggatttggggagacttaggttaggaaaaagaggggaatacaattagtgcattagaacaagatgctctgtggttcagaggggtggaatgaggcctactgaatgaggccgtagggacacagatttgggttccatgtcagggcgaccattctcaaaaagttggttcactatgggacagtctgcctcaggtaatagcctctgtcaagaggcaaagatgtggagaggatccaattggttggagattggagcaggtgacctattaacctaaattccatgttgtatgtagtactttgcctctcataacatgttcaattaaatatctgttaattcatagctaatgatttttttaatggggcctcgttcttctgccacaagtgcatcccacctttatctttcagggaagaggttggttgcacgttgttaggccaagagactggccctccattatgccctatgctggacttgctttgtcggtccattcattgatgtcctgttgaatcaaaaggtattgttttagtagaagttacatgaagtatattcatttatcacttgctaaacataggccttgctctgtttaataaataatgggtgtctctttcaagattttaggataggcctttttaacagagcagaatcttctgttaaagttctcacaaacagaccaactcccaagagagatgggctggtgggtcactgacataaagcagtccacaagatctattttagaaaagtatcaatgacatttccttagttggtttgattctcttgagaatacatgagtttaaaagaactgaggtcaaattgctttatgtggaaagcaataaaaacaagtatttttgacttgcaaattagaggtaactgtaagcaatttttgctattgaagcctatggcccaaattattccacctgcaaaataactttcacccttgcaaggctgatagacggctcttcattggtctttttttatggttttgttttgtttttttaagtcattggtcttaaatctgtatggtgacaaatctatttgagtttgattgagactttcttggactcctttggacaagaggtcagagcacaaaggctagtcaccacttctttgacttcttgaggtatgagccaaaattttacttttccattgatttaaagcagaatttttggagatgctgtgttctagttcctgacggaatcggtggtggttgctgactttgacactttggagagtgatgtggggagttatatagaaggggaaacactagtttaggtgtgaggagttctagtatgccacaaattagctgagactttagacgaagcacaatatttgagcatcaatcttctcatctatgagatagacctgtcaggattattgtgaaaattagatgagataagttgaaagtacagtgcttggtaaacagttagcactcaaatattagttctttttcactttaattaagagcagactttgaatggtctgatgccaagtgtagatccttaagagacaaaacaaagaaactttcctggcttcaaagaaaagaactccatttctgaaagggtgccttaaaaggaattcatttgtctgatccatccttttgcctttgggcattactactgtcaccctccatttctttacaaacttcaggcaaggtggtctctctctctctcccaataggcaattccagggttgtaaactcattatcaggaagcttaatcttagaactgaaatacctcacagagcaatttaaacctctttcttcttgttcctattcttcatgggaagaaaactgggttgatccctatcttctttttaaggagccacatttgccatttattattgctcttttgcctatttaaaaaaaataacagtcagaaaaaataatgattattaaaatgatagtcattatttacttagtgaatgtcaggataggtatttattactcttagcttcttattggtatcagatgtagatcacggtcttactgttgattaactcttcagttatatatacatactttgattctttagttacataattgataacaaagtgtgcttctgaagaattattctggctgtatggctcttgtttcctccccttggtaaaaatggaggcatgaatctcggttttgtgatctgcttttaatttcatatatgacattatttgatgtacataattaccaacatccaaaagcgtttcttcccctttctacgtgtgcactaaattctaaaacaaaaattggaatacaaaatgcctaataaagaaaaaattcatgtacagaaaagcaaaagataatctactttgttaagataatttgtcactagctggttgaataatgcacagtttttgtttaaggttacacatttatgcctggattaaataacaatagtaaaacttgacaagtcttttgaaaaacagctgctaaacatattgctttctggaatgtaatcattagcaacaaatattctcttattctatacaattgcagaatgctagtggaactttcttgtaggttatttgacaatgaatgttaattgatttattttttaaaaatgtaaaatcctcttatccctttaaggccggtttaggctttcatgtccctgtgatagaaaatttcaaatgctggcttctaatttctactcactgaagtgtcttccagacataccagatggttggagctcctttgatagtatataagggagctacataaatgtatttgaactaactcgtgagcaaaatttctgttttcagcaaaaaaaaaaaaaaaaagaaaaaacaacaaactctgctcaaaatttcagataatacaggagtaaaaagaggtttttgataatctgaagggaaaagtgtgccccatatatcttgtacacacttttaatgcatgacttttagtatagagatgaaataaaatgcaaaatatataattctggagatctcagcagctagttaaaatatttagagaagctgctttatgaagacttagagaatccttgatctcccccacatttcctatcactccattgaaacatggatctttaatattaatacatacatagttttaactaataaacaggttaatcactgagttttatgaactcgattcttgatatttggctattggttttaagcataggatatcagtattatttgtatacagcgttatataaaatctaaccaacttcaatataagaatagtacttgattttaaatgttaatatgcaaatattaacagtatactacatcatattttatgtgttcatatattgatctttttacttaacaaaaagcctgttagaaatataacccactgatgacccgagtccaattagctgaaaaccttctgtagaaaggtgattgtatgaaaaattcaatcaacattaaaaaagggaagtggggagggaatacaaacttgaacaaaatattcttaaatgaagttgcatctctttttaaaattaagatatcattcatgcaccatacggtttatcctattaaggtgtaaacttcaatgtttttaatcatattcactaagttgtgcaacatcaccactccctaacttcagaacactttcatcacctccaaaagaaaccccataccatttgcaatcactcctcctcctccttcccccagcatccggcaaccactaatctactttctgtccctatgaatttgcctatcctggacatttcatatagtcaaacaacatgtggccttttgtgtctggcttctctaagtaagcataatgtttttaaagctcatccatgttgtagcataaatcagtacattgttttcatgtttaaataatattccattgcatgtatatgccacattttatttgtccatttatcatttgatggacatttgggttttttccaccttttgattataataatgctgctgtgaacatttatgtaaaagttttttgtatgggtgtatgttttcacatctctcttaaaaacaattagtctgacaaatcaaatcaaatcatttatgtttatttacgtagaacctcttgcaatcctgtttggagagtgcaacttacgatcttagtttaattgatcaattaggagacctctgaataaagactaactccccaatacatccataagaatttttctatgagcctgtcatttagatgtgataagcaatcaatttcatgaagactgtttcagtcttgtagaaattgagttgccatcacatagaggatttcttgtcctctgcattgtttaaaggacaactacaaatcatgctggataagagtactcattcaatcttttaggattcaatgaagtagcattttaaatatgtaagttattttatatattgtctgtcttttaaaattggactttgcttcttgaaaaaagtttgtcaaatcaccaaaccatatgactgtccattcattgtagcctatgttttctattattaagaaataattcatactgagagtaaaagaaaaagaatgtattttgtgtgcaaaggatgaatgtattaaaaactttttatttgtaacaattttttaaaaaaactaaatggaaattgctttcccatgtacttgtatataaataaacatttcctgttgcccaca

SEQ ID NO: 25247 - DNA, 673 bp, Homo sapiens
  source 1..673: mol_type = unassigned DNA
catcgtgtggcccagtctggttgtcaagatagatgctgtgtctagacagtcatctcccttgggaaatcacagttgcttaaaaaggaggcacgtggtctcctgttaagaatacaaaacaggcctgtgagctgttgaggaagaggttgctgcttgaggttgcatgggcctatggagcagggcctggggaaagaagctgtctgcttctatactcatgtgagtctctggatcatggtggtggccttctccttcactcatgtcgggacaactgagtccatggtgcatgggaaggtagagacatagctatcaccttccccagagccagtgatactgtgcctccactgaagattgctgggaggaattgaaagctgtgtaaatgagtatggaagattatgatttcctgttcaaaattgttttaattggcaacgctggtgtggggaagacgtgcctcgtccgaagattcactcagggtcttttccccccaggtcaaggagccacaattggagttgattttatgattaagacagtggagattaatggtgaaaaagtaaagctacagatctgggacacagcaggtcaagagagatttcggtccattacccagagttactaccgaagcgccaatgccttgatcctcacctatgacattacctgtgaggaatccttccgttgcctt

SEQ ID NO: 25248 - DNA, 3746 bp, Homo sapiens
  source 1..3746: mol_type = unassigned DNA
gtcattgcaaaagccccactgcattcattgtgctacggtctctccaccccctgctgctgctgggcttgcgattgccgctcgctccagctgagctaagtgtagcagcagcaccagggcagggactgactccagcccttggactcaggacatcgcagaccttcccttgcgtgcgtgactcattcgcacatccatttctgtttatgcctggggtggggagaaaaatcccaaaccagctgtgtaaatgagtatggaagattatgatttcctgttcaaaattgttttaattggcaacgctggtgtggggaagacgtgcctcgtccgaagattcactcagggtcttttccccccaggtcaaggagccacaattggagttgattttatgattaagacagtggagattaatggtgaaaaagtaaagctacagatctgggacacagcaggtcaagagagatttcggtccattacccagagttactaccgaagcgccaatgccttgatcctcacctatgacattacctgtgaggaatccttccgttgccttcctgagtggctgcgggagatagaacaatatgccagcaacaaggtcatcactgtgttagcaacaagattgacctggctgaaaggagagaggtttcccagcagcgagctgaagaattctcagaagctcaggacatgtattatctggagacctcagccaaggaatctgataatgtggagaaactcttccttgacttagcatgccgactcatcagtgaagccagacagaacacacttgtgaacaatgtatcctcacccttacctggagaagggaaaagcatcagctatttgacttgttgtaatttcaactaaaggctgaggcacggagaagaaaaggaatcagcaactgccctgatgggccatgagatgctggggagatctggcgatgactgtggctcccgctctctgaccttctgactcctgtgggctcctgagcttacaaagcatggcaggccaagggcctcgaccacaggccagcattagcagaacatataatggtttcacccttttccagtctggagttggagcaaggagaaaattgcactaggcactccatgatctgcagagcatgttgcttttgtttttttaaaaagcaagtaaaagcgcattcctaaacagagtccggggggaaatgtactgtagggatccctcctgcacatcagtgggtgcatgtgggaactcttctttagggcttcggtggtaatcatctgggggccctggttttcttgtctaccagataaaccaaaactgggaaggccaagtacagtctctgtggtgcgtattgacgaccccatggagattttgaaaagtgttatttctcttgtccacaggcactttcaagaactttgggatgtaaaaatgaaatgaaacctttacccatgaccaacagtaacaatcattgttttaataatatatacaagctccataactccttttggtgctaatgattccgctatttcacagaccaaacgttttagtacattaatgtccttaaatgtgttatatagaaataaaaaaatgggggaagtccatgaatcagcactctttctcaaagtctcattactacctttttaaaggtggatttttgggaaaagagaatacttttccttttatgttcccctctgaatctctaccactttcttgtctctccagccctttatgtaaatgaaaacgtttgcaaaatgaaaaaaataaacaaatggttgatgacattctaatataaaaacttagctctaacacattttgagtagtatgaggaaacagaccagatatgaccaaaatactgtggattaatggactgtagtgcagggctcctagcagagcacagtccttgatagtaggtcacatcttttacttcctggtactctccatcttggacagaccaaggcttaggattttgtagattttttagtatgataagtgagaatagcaacagatgaaaagtctcacgacccatttttatatcttcgatgataaccttagaaaaattctgctcgtggaagcagattgaactgtcatttatcccctccttcttgtaataatgttaccttcagacgcttaaccatatgttctttcttttttctttctcttttcctctctatttttctggtctctccttttcttcttccctccctccctccctccttccctcccatccttatatgcctgtgttactgcaaatctccaattcaaatggaggtgtatatgcctttacttagccaatttaaaaacaggactcaaaatgggagatgtgctgctgaatatgtgtttctttttcttcagtgccatactttgatagcttccaatttgttcactgatataaatgcaaattgggaaaataattaaacctgtatgctgttgatgctgtcagatgtttctgtagcttgctgcttagcataactgagggatgagtaatggaataaggatatgatgtgtaattccactgttgctgtagatggtgacaatctcagttctgatatgttgatgtttgaaagctatttaattgtaaagaaattagtcatgtagagacatgatgtggataaagcatttctggcatttctctagcaggttctagattgaccagtgtcttgcacatgagattatgcatattttttaaggggctgatacttttggttggcctcactgtgtttttcctgatcctgtgggaaagagaaaggcatcccagaagtttgacttgtttttcttttagaatctgtctctgcaggaaagaaaagtcattttaataaaaaccaaaataatttataataattgttgcctttccctccccatcctctccactaagccagcaactaaatgtattcagaaaacaagttaatcaaggagggcagaagaattttttttaaactgtaagaaaatgttcctaagtttagatttattacctgtcatttagggcaaaaatccagtgtccccagcacatgatgacccaactttgtctcacagttgcaagtgtgttgaaaataaagttgctttgtgaacttagaggaaatggctgtgttagattggactgatttagttgcaaaataataccttttagggtcacacttgtattattccctagggtttagccttctctatatacccttggccagactcagaaggggattaaaaagctctggtcttggcctctatcttccttgttgctcctcccagcctttccataacttacccatccacagcccatcagcaggaacacatgagaatgtgggactttgtttctttttttcttagttgtatgaattccagattaggccttatggatacttgtctactaatatatctgaagtttgaaaacaatccctgacaatattgtaggtgcaataaatattagtcaaataaacatttaagtgccaaggtggggtggtagtggttgggggagctttttttgattaaacagaaattccttcaagtagaacttgagaaaggacactaaatacagtcatcttaacccaggccagaacctaaatttattggtttgcctaacagtcttattgtcatggcaatatttgctaagatgagccttctttagataaaaatgaactctcatttagtggtggatgaaaaaagagaaattgctttatcatatagtttaatttggctcggtctactaagaccaccagggttgatgtattcctccatttttggtgtgatctttttcttcattcaataaagttattaaatatatggcaaaa

SEQ ID NO: 25249 - DNA, 580 bp, Homo sapiens
  source 1..580: mol_type = unassigned DNA
tttctgtctagctggcagggtcaccggaggggagctttaaattgctctttaaatgagtcagacctgttcccccggagagaaggctggtgcagcttgagctctgtgggcaagtctgactgggcctttctcacttttgcctgtgtttgccttgcagctgtgtaaatgagtatggaagattatgatttcctgttcaaaattgttttaattggcaacgctggtgtggggaagacgtgcctcgtccgaagattcactcagggtcttttccccccaggtcaaggagccacaattggagttgattttatgattaagacagtggagattaatggtgaaaaagtaaagctacagatctgggacacagcaggtcaagagagatttcggtccattacccagagttactaccgaagcgccaatgccttgatcctcacctatgacattacctgtgaggaatccttccgttgccttcctgagtggctgcgggagatagaacaatatgccagcaacaaggtcatcactgtgttagtgggcaacaagattgacctggctgaaaggagagaggtttcccagcagcgagctgaagaat

SEQ ID NO: 25250 - DNA, 3994 bp, Homo sapiens
  source 1..3994: mol_type = unassigned DNA
ggccggcggccacgtgacccaccgcggcggggccggcggcccagaaatagcagcggcggcggttccgcccgcgggcggcgcgagcgaggggcagaggcgagagacgccggcggggcgcgggcgcggcggccccggaggatgctgctgagccccggcactgcctggctgcgagcacatgatggcgatacgggagctcaaagtgtgccttctcggggacactggggttgggaaatcaagcatcgtgtgtcgatttgtccaggatcactttgaccacaacatcagccctactattggggcatcttttatgaccaaaactgtgccttgtggaaatgaacttcacaagttcctcatctgggacactgctggtcaggaacggtttcattcattggctcccatgtactatcgaggctcagctgcagctgttatcgtgtatgatattaccaagcaggattcattttataccttgaagaaatgggtcaaggagctgaaagaacatggtccagaaaacattgtaatggccatcgctggaaacaagtgcgacctctcagatattagggaggttcccctgaaggatgctaaggaatacgctgaatccataggtgccatcgtggttgagacaagtgcaaaaaatgctattaatatcgaagagctctttcaaggaatcagccgccagatcccacccttggacccccatgaaaatggaaacaatggaacaatcaaagttgagaagccaaccatgcaagccagccgccggtgctgttgacccaagggccgtggtccacggtacttgaagaagccagagcccacatcctgtgcactgctgaaggaccctacgctcggtggcctggcacctcactttgagaagagtgagcacactggctttgcatcctggaagacctgcagggggcggggcaggaaatgtacctgaaaaggattttagaaaaccctgggaaaacccaccacaccaccacaaaatggcctttagtgtatgaaatgcacatggaggggatgtagttgcatttttgctaaaaaaaaaaaaaaacctttaaaaattgttggatgtgtacaaaagtcttactgccttattatgtgtatgggattctaaagtggcattccacttggatttcctgtgctacctatccaaattccagtaactacttcagtgtcattgcctttgttacctaaccaaccttcactgaaaggcaaatttagttcaggaggttagtttttagctagctttggaagtaagcctttatttattactttttggaggaaatcagagaagtgtcaatggaccgtcactcagactgagacttgagttattacagaagccaggaaaagtgtattagaaactgttgtctacaccacttttaattggtgaacaatttttctaagttatggtcatatatacccaaacaaaccaaatcaaactaaattactgcatataattttgggattgggtggcctagtttgaaagagtgatttaagtaatcactatgtaagtggtgagagatgcaggacatacacattattcaagagaccacctgacatgcatctcctccgcaggaatacattcgtcctctcttagagaagtttaacgcacatagtattattttactaagagaatatctcttggtgtcatatctaggggaagagaattaactagaattaaatttaatgtttgaatctaaatcattgggcaaacttctaataataacaattaataataggttacaggaaagccagccagaggaagtgtcagcactttaaaattctagaccccaaaaaactacaaaatcagaaaaagtatttttatgtttctagcttgaggagaagggctttagggctaaccagaggtctgaccctagaatgccaaggaactgagaatgggctccgatgaaaaccttccttttcagattccctgtctgctcaattaaagatgtttgaatccaaaggaagtcaaggaagaaaaagcatggaaaggaagagaactgattcctactgaaaattcaaattctattaccattctaactttcataaaaagttgggatcaagaagcagctgatttcctgccagggcttatattagggggtgattcttaaaggacattaggattggtgctcagaaatggttaatcatgctgtgtgctagccagggccagctggtaccttctttgccatgagcattcaagggacggctaacctttattgacaatctatatcgcaaaagtcaggaaagaggttgtgagctgattggattaaagacctggcacttcagtaactcagcacgcttccacttcactcaacttaagagagttcattgacagtgttaggatgtgaaggctgggaaacacttattttgcttcaagagttccacttggctctcccaaataggtacctcaaaaactgttagcaagcggcatttggatgtcttgacaggggctttgcagggatttttagggttttttccacattgtccacattaatggttggcatgattgtgcttgcaggccaagaaatgatcataccccttgccaaaggtaaaaaaaaaaaaaaaaaaatgagttgaaaattgaagtgacctctttccagctgagttgcaggcttattttgtaacctttcctcatccagttttccctgagaacctgggtttatctctagatagctgttcaggttttttagctgaggggtaagtatcctagctgagagttttgcatctttgggctgggtttgcagtggttgtgttttgcataaaatgtctagtctttgccacagatagtgagctacccactaatgagcccatggttttatttcagaagcacatgagggtgtgaaaccactctgttacctttctgtattgtcttagctattcaagccagtcagaggataatatatatattctcatcagcactcagagtagtcagtgaagagagtagatcacacttgggcacaccaggattcacataaacattgtatcttctctgtggatgctcaggccttgtctacaatgaggctttacaaccttcctttgttttggctcgggattacttcctggctgtctaataattgaaccataaccatgtaatattatgtaaaggcctggaaattactgttgctaaaaaaagtcatgtagtttcatgtagtgtagcatccttggcatcgttttccaaaatttgttccttctcccttttttttttctttcgtgtgtggcatgagtgtgtatctgtgtaaatatgattgtatatgtgttactccgatatgtaatccatttcactggctgagtttggcccctagccatgtgttaatataaagtaggcatggcttcccaatggaaatctctgagaatgacagtggagttgtgcaagcattttacattgccacataattgacttgccattttatggttaaaaacggcacattaggcagttgaatatgacgttaccttgcagactaaaaggttgaaggcccgaaactaacttttagctaacaataagggctgtgccccaatggaaactgagttcattttctgagaaaggtttggatgactgaaatatttcctctacagtcaaggactttggcatgtggtggctgaaactgagcttttttgtgtgggctccagttctcactgttctgcaatgctcatggcaagttgaatggtgagctagcttataaattaaagagctctgaactgtattcagaccgactgggtatctagcttactgttttaacatcattgttgaaaccagaccctgtagtccagtggtgctgccctgttgtgcaaactgctcctttttctcgtgtttttgtaaagagcttccatctgggctggacccagttcttgcacatacaagacaccgctgcagtcagctaggacctttccgccatgtattctattctgtagtaaagcatttccatcaacaatgcctaattgtatctgttatttttggtttaacacacactgattcatactaataaatattttcagttttaccgtt

SEQ ID NO: 25251 - DNA, 825 bp, Homo sapiens
  source 1..825: mol_type = unassigned DNA
tgtcttttgaatgacactggggttgggaaatcaagcatcgtgtgtcgatttgtccaggatcactttgaccacaacatcagccctactattggggcatcttttatgaccaaaactgtgccttgtggaaatgaacttcacaagttcctcatctgggacactgctggtcaggaacggtttcattcattggctcccatgtactatcgaggctcagctgcagctgttatcgtgtatgatattaccaagcaggattcattttataccttgaagaaatgggtcaaggagctgaaagaacatggtccagaaaacattgtaatggccatcgctggaaacaagtgcgacctctcagatattagggaggttcccctgaaggatgctaaggaatacgctgaatccataggtgccatcgtggttgagacaagtgcaaaaaatgctattaatatcgaagagctctttcaaggaatcagccgccagatcccacccttggacccccatgaaaatggaaacaatggaacaatcaaagttgagaagccaaccatgcaagccagccgccggtgctgttgacccaagggccgtggtccacggtacttgaagaagccagagcccacatcctgtgcactgctgaaggaccctacgctcggtggcctggcacctcactttgagaagagtgagcacactggctttgcatcctggaagacctgcagggggcggggcaggaaatgtacctgaaaaggattttagaaaaccctgggaaaacccaccacaccaccacaaaatggcctttagtgtatgaaatgcacatggaggggatgtagttgcatttttgct

SEQ ID NO: 25252 - DNA, 1217 bp, Homo sapiens
  source 1..1217: mol_type = unassigned DNA
ggccgcgagcactggcgggttctgggtcctgtgaccggtcaggcggcgtcagcgggcgcggcggagggctggccggcctcgggggagtttccgcggccgccgggggcgcggcggcagagcgcgaggccgggcagggggccagactcggagtcgaggcgcgcccgacagccgcagcgctcatggcgggcggaggagccggggaccccggcctgggggcggccgccgccccagcgcccgagacccgcgagcacctcttcaaggtgctggtgatcggcgagcttggcgtgggcaagaccagcatcatcaagcgctacgtccaccagctcttctcccagcactaccgggccaccatcggggtggacttcgccctcaaggtcctcaactgggacagcaggactctggtgcgcctgcagctgtgggacatcgcggggcaggagcgatttggcaacatgacccgagtatactacaaggaagctgttggtgcttttgtagtctttgatatatcaagaagttccacatttgaggcagtcttaaaatggaaaagtgatctggatagtaaagttcatcttccaaatggcagccctatccctgctgtcctcttggctaacaaatgtgaccagaacaaggacagtagccagagtccttcccaggtggaccaattctgcaaagaacatggctttgccggatggtttgaaacctctgcaaaggataacataaacatagaggaagctgcccggttcctagtggagaagattcttgtaaaccaccaaagctttcctaatgaagaaaacgatgtggacaaaattaagctagatcaagagaccttgagagcagagaacaaatcccagtgttgctgatatatggcttctgcttctcttgtgtgtgcctcagctctgaagaagttcctgagaatgggttacagatgtcatgttagctgggagtcttcccacatgtggcacttcaaaaggcagcaccactgggcgcctgcacttatttgaaaatggaactttgggagaagtatccctgctagtggctctgtaacttaacagatgacaattaggcttttgtcattgttgccatcatatggaagataatgtttacatccttttaaacatttttatatgacaattcctcaggatttggtaaggcttccaagttgtagcttttagtgtaagtgctggggtggtaataaaatgttacctccagtcttatggtca

SEQ ID NO: 25253 - DNA, 1258 bp, Homo sapiens
  source 1..1258: mol_type = unassigned DNA
cgggtccgtcccgggaatgcaggcaggggagggtgtgggccgaggcgcggcggcggctggagcagcgcggtagggtccttcgccagagcatccggtccgagggcgcacacaggcagaaggctcgcggctcgtccactctcctccctctctcctcctctccctggcttttgtgttggtgcctccgagctgcaaggagggtgcgctggaggaggaggaggggggcccggagtgagaggcacccccttcacgcgcgcgcgcgcacacggtgccggcgcacgcacacacgggcggacacacacacacgcgcgcacacacacacgcacagagctcgctcgcctcgagcgcacgaacgtggacgttctctttgtgtggagccctcaaggggggttggggccccggttcggtccgggggagatggcgcagcccatcctgggccatgggagcctgcagcccgcctcggccgctggcctggcgtccctggagctcgactcgtcgctggaccagtacgtgcagattcgcatcttcaaaataatcgtgattggggactccaacgtgggcaagacctgcctgaccttccgcttctgcgggggtaccttcccagacaagactgaagccaccatcggcgtggacttcagggagaagaccgtggaaatcgagggcgagaagatcaaggttcaggtgtgggacacagcaggtcaggaacgtttccgcaaaagcatggtcgagcattactaccgcaacgtacatgccgtggtcttcgtctatgacgtcaccaagatgacatctttcaccaacctcaaaatgtggatccaagaatgcaatgggcatgctgtgcccccactagtccccaaagtgcttgtgggcaacaagtgtgacttgagggaacagatccaggtgccctccaacttagccctgaaatttgctgatgcccacaacatgctcttgtttgagacatcggccaaggaccccaaagagagccagaacgtggagtcgattttcatgtgcttggcttgccgattgaaggcccagaaatccctgctgtatcgtgatgctgagaggcagcaggggaaggtgcagaaactggagttcccacaggaagctaacagtaaaacttcctgtccttgttgaaaccaaacgatataaatacaagataaattatcactggagttttttctttcccttttttctgtgcctgcataatgctgacacctgcttgtttccatacaaattgatatcaaaataaaatttgtatagatta

SEQ ID NO: 25254 - DNA, 1293 bp, Homo sapiens
  source 1..1293: mol_type = unassigned DNA
ggttcctggcatcgccagatgctgcgcagcagtctccgattccccatcaccaattcggctggcgtctccgagaccgcggactcccgtagggtccccgtggccccgagttgtagtcgggacaccccggccgcgggtgatcgtcgggtctccacgcgcccgggtcgctgacgcggatccggcctcggcgccttctcagggcgccctgcaaggccgcaggcaggatgaacattctggcacccgtgcggagggatcgcgtcctggcggagctgccccagtgcctgaggaaggaggccgctttgcacgggcacaaagacttccacccccgcgtcacctgcgcctgccaggagcaccggacaggcaccgtggggttctgcaaagacacctttgataagaattacaaggccaccattggagtggacttcgagatggaacgatttgaggtgctgggcattcccttcagtttgcagctttgggataccgctgggcaggagaggttcaaatgcattgcatcaacctactatagaggagctcaagccatcatcattgtcttcaacctgaatgatgtggcatctctggaacataccaagcagtggctggccgatgccctgaaggagaatgacccttccagtgtgcttctcttccttgtaggttccaagaaggatctgagtacccctgctcagtatgcgctgatggagaaagacgccctccaggtggcccaggagatgaaggctgagtactgggcagtctcatctctcactggtgagaatgtccgagaattcttcttccgtgtggcagcactgacctttgaggccaatgtgctggctgagctggagaaatcgggggctcgacgcattggggatgttgtccgcatcaacagtgatgacagcaacctctacctaactgccagcaagaagaagcccacatgttgcccatgagggctgaggagactgttcagagactgcccagccctagggcactgtgccaccctcattcctccagagcttgacccctggacatttgcactgactttatccagaccaaagagctgcctcttggtggcagtattcccacagaggggtagctgggatcatgctagtcacttcctgcccccaggcaccgtgccaaagactggatgccccctactcctcaggggactgtccagggcgcccagtggtagtgagggagagtgtctctgttcttttgctcagcctgctgggccctttgtgtttgaggatgcttaatgattccagcctctcactgtgccttatgcattaaaatttctttgttacgagc

SEQ ID NO: 25255 - DNA, 1592 bp, Homo sapiens
  source 1..1592: mol_type = unassigned DNA
cagccttgaaggaaaagacgccagacttcagacgtctctctcctcggtgggcacctcattctaaccctggcacccccttcgcacgcttcccctccaccatcctcacccccgacctcccagggcagaagggcgagagggggcagactctatgagtcacctcccaggcctggagttgaggagggaagcgccgcctctccttgggccccttctctccccctttcccctccctgctggttcctggcatcgccagatgctgcgcagcagtctccgattccccatcaccaattcggctggcgtctccgagaccgcggactcccgtagggtccccgtggccccgagttgtagtcgggacaccccggccgcgggtgatcgtcgggtctccacgcgcccgggtcgctgacgcggatccggcctcggcgccttctcagggcgccctgcaaggccgcaggcaggatgaacattctggcacccgtgcggagggatcgcgtcctggcggagctgccccagtgcctgaggaaggaggccgctttgcacgggcacaaagacttccacccccgcgtcacctgcgcctgccaggagcaccggacaggcaccgtgggatttaagatctccaaggtcattgtggtgggggacctgtcggtggggaagacttgcctcattaataggttctgcaaagacacctttgataagaattacaaggccaccattggagtggacttcgagatggaacgatttgaggtgctgggcattcccttcagtttgcagctttgggataccgctgggcaggagaggttcaaatgcattgcatcaacctactatagaggagctcaagccatcatcattgtcttcaacctgaatgatgtggcatctctggaacataccaagcagtggctggccgatgccctgaaggagaatgacccttccagtgtgcttctcttccttgtaggttccaagaaggatctgagtacccctgctcagtatgcgctgatggagaaagacgccctccaggtggcccaggagatgaaggctgagtactgggcagtctcatctctcactggtgagaatgtccgagaattcttcttccgtgtggcagcactgacctttgaggccaatgtgctggctgagctggagaaatcgggggctcgacgcattggggatgttgtccgcatcaacagtgatgacagcaacctctacctaactgccagcaagaagaagcccacatgttgcccatgagggctgaggagactgttcagagactgcccagccctagggcactgtgccaccctcattcctccagagcttgacccctggacatttgcactgactttatccagaccaaagagctgcctcttggtggcagtattcccacagaggggtagctgggatcatgctagtcacttcctgcccccaggcaccgtgccaaagactggatgccccctactcctcaggggactgtccagggcgcccagtggtagtgagggagagtgtctctgttcttttgctcagcctgctgggccctttgtgtttgaggatgcttaatgattccagcctctcactgtgccttatgcattaaaatttctttgttacgagca

SEQ ID NO: 25256 - DNA, 1060 bp, Homo sapiens
  source 1..1060: mol_type = unassigned DNA
ctccttgggccccttctctccccctttcccctccctgctggttcctggcatcgccagatgctgcgcagcagtctccgattccccatcaccaattcggctggggtctgcgcgggcccggcccccaccagacgggactccccgcccccaattggcggccgaagagtctcctcgccccagagtcatcttcgggacgcccagggcccgggtgattttgggctcgccgcggccccgggtgattgtttcatctccgtggcccgcggtggtcgtagcgtctccgagaccgcggactcccgtagggtccccgtggccccgagttgtagtcgggacaccccggccgcgggtgatcgtcgggtctccacgcgcccgggtcgctgacgcggatccggcctcggcgccttctcagggcgccctgcaaggccgcaggcaggatgaacattctggcacccgtgcggagggatcgcgtcctggcggagctgccccagtgcctgaggaaggaggccgctttgcacgggcacaaagacttccacccccgcgtcacctgcgcctgccaggagcaccggacaggcaccgtgggatttaagatctccaaggtcattgtggtgggggacctgtcggtggggaagacttgcctcattaataggttctgcaaagacacctttgataagaattacaaggccaccattggagtggacttcgagatggaacgatttgaggtgctgggcattcccttcagtttgcagctttgggataccgctgggcaggagaggttcaaatgcattgcatcaacctactatagaggagctcaagccatcatcattgtcttcaacctgaatgatgtggcatctctggaacataccaagcagtggctggccgatgccctgaaggagaatgacccttccagtgtgcttctcttccttgtaggttccaagaaggatctgagtacccctgctcagtatgcgctgatggagaaagacgccctccaggtggcccaggagatgaaggctgagtactgggcagtctcatctctcactggtgagaatgtccgagaattcttcttccg

SEQ ID NO: 25257 - DNA, 1597 bp, Homo sapiens
  source 1..1597: mol_type = unassigned DNA
cgtgtggcggggccgctccgcgcccccgggccgctctgtaatggtagggcagcctcagccccgagatgacgtcgggtctccgcggccccgggttattgtaggaaccatccggccccgcgtaatcgtaggaactatccggccccgcgtaatcgtagggtctgcgcgggcccggcccccaccagacgggactccccgcccccaattggcggccgaagagtctcctcgccccagagtcatcttcgggacgcccagggcccgggtgattttgggctcgccgcggccccgggtgattgtttcatctccgtggcccgcggtggtcgtagcgtctccgagaccgcggactcccgtagggtccccgtggccccgagttgtagtcgggacaccccggccgcgggtgatcgtcgggtctccacgcgcccgggtcgctgacgcggatccggcctcggcgccttctcagggcgccctgcaaggccgcaggcaggatgaacattctggcacccgtgcggagggatcgcgtcctggcggagctgccccagtgcctgaggaaggaggccgctttgcacgggcacaaagacttccacccccgcgtcacctgcgcctgccaggagcaccggacaggcaccgtgggatttaagatctccaaggtcattgtggtgggggacctgtcggtggggaagacttgcctcattaataggttctgcaaagacacctttgataagaattacaaggccaccattggagtggacttcgagatggaacgatttgaggtgctgggcattcccttcagtttgcagctttgggataccgctgggcaggagaggttcaaatgcattgcatcaacctactatagaggagctcaagccatcatcattgtcttcaacctgaatgatgtggcatctctggaacataccaagcagtggctggccgatgccctgaaggagaatgacccttccagtgtgcttctcttccttacccctgctcagtatgcgctgatggagaaagacgccctccaggtggcccaggagatgaaggctgagtactgggcagtctcatctctcactggtgagaatgtccgagaattcttcttccgtgtggcagcactgacctttgaggccaatgtgctggctgagctggagaaatcgggggctcgacgcattggggatgttgtccgcatcaacagtgatgacagcaacctctacctaactgccagcaagaagaagcccacatgttgcccatgagggctgaggagactgttcagagactgcccagccctagggcactgtgccaccctcattcctccagagcttgacccctggacatttgcactgactttatccagaccaaagagctgcctcttggtggcagtattcccacagaggggtagctgggatcatgctagtcacttcctgcccccaggcaccgtgccaaagactggatgccccctactcctcaggggactgtccagggcgcccagtggtagtgagggagagtgtctctgttcttttgctcagcctgctgggccctttgtgtttgaggatgcttaatgattccagcctctcactgtgccttatgcattaaaatttctttgttacgagca

SEQ ID NO: 25258 - DNA, 1736 bp, Homo sapiens
  source 1..1736: mol_type = unassigned DNA
tccaggaatttccggggatcgtgttacagcgttggcggagcccgagcggagtgggactcgaggccctgtagccggactgggcccctcgccccctcctccagcggcctgcgggccttggcagcgccgcccctgcccacactgaccccgtgtggcggggccgctccgcgcccccgggccgctctgtaatggtagggcagcctcagccccgagatgacgtcgggtctccgcggccccgggttattgtaggaaccatccggccccgcgtaatcgtaggaactatccggccccgcgtaatcgtagggtctgcgcgggcccggcccccaccagacgggactccccgcccccaattggcggccgaagagtctcctcgccccagagtcatcttcgggacgcccagggcccgggtgattttgggctcgccgcggccccgggtgattgtttcatctccgtggcccgcggtggtcgtagcgtctccgagaccgcggactcccgtagggtccccgtggccccgagttgtagtcgggacaccccggccgcgggtgatcgtcgggtctccacgcgcccgggtcgctgacgcggatccggcctcggcgccttctcagggcgccctgcaaggccgcaggcaggatgaacattctggcacccgtgcggagggatcgcgtcctggcggagctgccccagtgcctgaggaaggaggccgctttgcacgggcacaaagacttccacccccgcgtcacctgcgcctgccaggagcaccggacaggcaccgtgggatttaagatctccaaggtcattgtggtgggggacctgtcggtggggaagacttgcctcattaataggttctgcaaagacacctttgataagaattacaaggccaccattggagtggacttcgagatggaacgatttgaggtgctgggcattcccttcagtttgcagctttgggataccgctgggcaggagaggttcaaatgcattgcatcaacctactatagaggagctcaagccatcatcattgtcttcaacctgaatgatgtggcatctctggaacataccaagcagtggctggccgatgccctgaaggagaatgacccttccagtgtgcttctcttccttgtaggttccaagaaggatctgagtacccctgctcagtatgcgctgatggagaaagacgccctccaggtggcccaggagatgaaggctgagtactgggcagtctcatctctcactggtgagaatgtccgagaattcttcttccgtgtggcagcactgacctttgaggccaatgtgctggctgagctggagaaatcgggggctcgacgcattggggatgttgtccgcatcaacagtgatgacagcaacctctacctaactgccagcaagaagaagcccacatgttgcccatgagggctgaggagactgttcagagactgcccagccctagggcactgtgccaccctcattcctccagagcttgacccctggacatttgcactgactttatccagaccaaagagctgcctcttggtggcagtattcccacagaggggtagctgggatcatgctagtcacttcctgcccccaggcaccgtgccaaagactggatgccccctactcctcaggggactgtccagggcgcccagtggtagtgagggagagtgtctctgttcttttgctcagcctgctgggccctttgtgtttgaggatgcttaatgattccagcctctcactgtgcc

SEQ ID NO: 25259 - DNA, 717 bp, Homo sapiens
  source 1..717: mol_type = unassigned DNA
cacaatctacacagcagccttgaaggaaaagacgccagacttcagacgtctctctcctcgggcgccctgcaaggccgcaggcaggatgaacattctggcacccgtgcggagggatcgcgtcctggcggagctgccccagtgcctgaggaaggaggccgctttgcacgggcacaaagacttccacccccgcgtcacctgcgcctgccaggagcaccggacaggcaccgtgggatttaagatctccaaggtcattgtggtgggggacctgtcggtggggaagacttgcctcattaataggttctgcaaagacacctttgataagaattacaaggccaccattggagtggacttcgagatggaacgatttgaggtgctgggcattcccttcagtttgcagctttgggataccgctgggcaggagaggttcaaatgcattgcatcaacctactatagaggagctcaagccatcatcattgtcttcaacctgaatgatgtggcatctctggaacataccaagcagtggctggccgatgccctgaaggagaatgacccttccagtgtgcttctcttccttgtaggttccaagaaggatctgagtacccctgctcagtatgcgctgatggagaaagacgccctccaggtggcccaggagatgaaggctgagtactgggcagtctcatctctcactggtgagaatgtccgagaattcttcttccg

SEQ ID NO: 25260 - DNA, 983 bp, Homo sapiens
  source 1..983: mol_type = unassigned DNA
gcagtctccgattccccatcaccaattcggctggggcgccctgcaaggccgcaggcaggatgaacattctggcacccgtgcggagggatcgcgtcctggcggagctgccccagtgcctgaggaaggaggccgctttgcacgggcacaaagacttccacccccgcgtcacctgcgcctgccaggagcaccggacaggcaccgtgggcagatttaagatctccaaggtcattgtggtgggggacctgtcggtggggaagacttgcctcattaataggttctgcaaagacacctttgataagaattacaaggccaccattggagtggacttcgagatggaacgatttgaggtgctgggcattcccttcagtttgcagctttgggataccgctgggcaggagaggttcaaatgcattgcatcaacctactatagaggagctcaagccatcatcattgtcttcaacctgaatgatgtggcatctctggaacataccaagcagtggctggccgatgccctgaaggagaatgacccttccagtgtgcttctcttccttgtaggttccaagaaggatctgagtacccctgctcagtatgcgctgatggagaaagacgccctccaggtggcccaggagatgaagactgttcagagactgcccagccctagggcactgtgccaccctcattcctccagagcttgacccctggacatttgcactgactttatccagaccaaagagctgcctcttggtggcagtattcccacagaggggtagctgggatcatgctagtcacttcctgcccccaggcaccgtgccaaagactggatgccccctactcctcaggggactgtccagggcgcccagtggtagtgagggagagtgtctctgttcttttgctcagcctgctgggccctttgtgtttgaggatgcttaatgattccagcctctcactgtgccttatgcattaaaatttctttgttacgagca

SEQ ID NO: 25261 - DNA, 1314 bp, Homo sapiens
  source 1..1314: mol_type = unassigned DNA
tatgagtcacctcccaggcctggagttgaggagggaagcgccgcctctccttgggccccttctctccccctttcccctccctgctggttcctggcatcgccagatgctgcgcagcagtctccgattccccatcaccaattcggctggggcgccctgcaaggccgcaggcaggatgaacattctggcacccgtgcggagggatcgcgtcctggcggagctgccccagtgcctgaggaaggaggccgctttgcacgggcacaaagacttccacccccgcgtcacctgcgcctgccaggagcaccggacaggcaccgtgggatttaagatctccaaggtcattgtggtgggggacctgtcggtggggaagacttgcctcattaataggttctgcaaagacacctttgataagaattacaaggccaccattggagtggacttcgagatggaacgatttgaggtgctgggcattcccttcagtttgcagctttgggataccgctgggcaggagaggttcaaatgcattgcatcaacctactatagaggagctcaagccatcatcattgtcttcaacctgaatgatgtggcatctctggaacataccaagcagtggctggccgatgccctgaaggagaatgacccttccagtgtgcttctcttccttgtaggttccaagaaggatctgagtacccctgctcagtatgcgctgatggagaaagacgccctccaggtggcccaggagatgaaggctgagtactgggcagtctcatctctcactggtgagaatgtccgagaattcttcttccgtgtggcagcactgacctttgaggccaatgtgctggctgagctggagaaatcgggggctcgacgcattggggatgttgtccgcatcaacagtgatgacagcaacctctacctaactgccagcaagaagaagcccacatgttgcccatgagggctgaggagactgttcagagactgcccagccctagggcactgtgccaccctcattcctccagagcttgacccctggacatttgcactgactttatccagaccaaagagctgcctcttggtggcagtattcccacagaggggtagctgggatcatgctagtcacttcctgcccccaggcaccgtgccaaagactggatgccccctactcctcaggggactgtccagggcgcccagtggtagtgagggagagtgtctctgttcttttgctcagcctgctgggccctttgtgtttgaggatgcttaatgattccagcctctcactgtgccttatgcattaaaatttctttgttacgagcactt

SEQ ID NO: 25262 - DNA, 1183 bp, Homo sapiens
  source 1..1183: mol_type = unassigned DNA
atgctgcgcagcagtctccgattccccatcaccaattcggctggggcgccctgcaaggccgcaggcaggatgaacattctggcacccgtgcggagggatcgcgtcctggcggagctgccccagtgcctgaggaaggaggccgctttgcacgggcacaaagacttccacccccgcgtcacctgcgcctgccaggagcaccggacaggcaccgtgggatttaagatctccaaggtcattgtggtgggggacctgtcggtggggaagacttgcctcattaataggttctgcaaagacacctttgataagaattacaaggccaccattggagtggacttcgagatggaacgatttgaggtgctgggcattcccttcagtttgcagctttgggataccgctgggcaggagaggttcaaatgcattgcatcaacctactatagaggagctcaagccatcatcattgtcttcaacctgaatgatgtggcatctctggaacataccaagcagtggctggccgatgccctgaaggagaatgacccttccagtgtgcttctcttccttacccctgctcagtatgcgctgatggagaaagacgccctccaggtggcccaggagatgaaggctgagtactgggcagtctcatctctcactggtgagaatgtccgagaattcttcttccgtgtggcagcactgacctttgaggccaatgtgctggctgagctggagaaatcgggggctcgacgcattggggatgttgtccgcatcaacagtgatgacagcaacctctacctaactgccagcaagaagaagcccacatgttgcccatgagggctgaggagactgttcagagactgcccagccctagggcactgtgccaccctcattcctccagagcttgacccctggacatttgcactgactttatccagaccaaagagctgcctcttggtggcagtattcccacagaggggtagctgggatcatgctagtcacttcctgcccccaggcaccgtgccaaagactggatgccccctactcctcaggggactgtccagggcgcccagtggtagtgagggagagtgtctctgttcttttgctcagcctgctgggccctttgtgtttgaggatgcttaatgattccagcctctcactgtgccttatgcattaaaatttctttgttacgagc

SEQ ID NO: 25263 - DNA, 1099 bp, Homo sapiens
  source 1..1099: mol_type = unassigned DNA
tatgagtcacctcccaggcctggagttgaggagggaagcgccgcctctccttgggccccttctctccccctttcccctccctgctggttcctggcatcgccagatgctgcgcagcagtctccgattccccatcaccaattcggctggggcgccctgcaaggccgcaggcaggatgaacattctggcacccgtgcggagggatcgcgtcctggcggagctgccccagtgcctgaggaaggaggccgctttgcacgggcacaaagacttccacccccgcgtcacctgcgcctgccaggagcaccggacaggcaccgtgggcagatttaagatctccaaggtcattgtggtgggggacctgtcggtggggaagacttgcctcattaataggttctgcaaagacacctttgataagaattacaaggccaccattggagtggacttcgagatggaacgatttgaggtgctgggcattcccttcagtttgcagctttgggataccgctgggcaggagaggttcaaatgcattgcatcaacctactatagaggagctcaagccatcatcattgtcttcaacctgaatgatgtggcatctctggaacataccaagcagtggctggccgatgccctgaaggagaatgacccttccagtgtgcttctcttccttgtaggttccaagaaggatctgagtacccctgctcagtatgcgctgatggagaaagacgccctccaggtggcccaggagatgaagactgttcagagactgcccagccctagggcactgtgccaccctcattcctccagagcttgacccctggacatttgcactgactttatccagaccaaagagctgcctcttggtggcagtattcccacagaggggtagctgggatcatgctagtcacttcctgcccccaggcaccgtgccaaagactggatgccccctactcctcaggggactgtccagggcgcccagtggtagtgagggagagtgtctctgttcttttgctcagcctgctgggccctttgtgtttgaggatgcttaatgattccagcctctcactgtgccttatgcattaaaatttctttgttacgagcactt

SEQ ID NO: 25264 - DNA, 3828 bp, Homo sapiens
  source 1..3828: mol_type = unassigned DNA
ctgccagccccgcccagactccaggcaggttctcgttgctatggtgatcgccggtgcaagctggatgcttggacgcgccgctgccagtccaacgcagaccccgcccacgacgtcgacgattcgtgtagcccgcaggtcccgcgtggctctcgttgccatggtgatcgccgccgctggctcaggcggaccaggccgcgcggagccccagctttcacagccatcgctggactgtggaagaatgaggtcctccctgacacctttggggccccctgtgagccgcgaccgtgtcatcgccagcttccctaagtggtacacgccggaagcctgtttgcagctcagggagcacttccacgggcaggtcagcgctgcctgccaacgcaggaacacggggactgtcgggctcaaactctccaaggtggtggtggttggcgatctctacgtggggaagaccagcctcatccacaggttttgcaagaatgtttttgatcgagactacaaggccaccattggggtggactttgaaattgagcgctttgagattgctgggattccctatagcctccagatctgggacacagctgggcaggagaagttcaagtgcatcgcatctgcctactaccggggtgcccaggtgatcatcacggcctttgacctcactgacgtgcagaccctggagcataccaggcagtggttggaggatgctctgagggagaacgaggcaggctcctgcttcatcttcctcgtgggaaccaagaaggaccttctgtcaggggccgcatgtgagcaggccgaagcagacgctgtgcacctggccagggagatgcaggccgagtactggtcagtgtcggccaagactggcgagaacgtgaaggcattcttcagccgcgtagccgccctggcattcgagcagtcggtgctgcaggacctggagaggcagagcagtgcccggctccaggtcggcaatggagacctaatccaaatggaagggagtccgcccgagacccaggagagcaagaggccctccagcctgggctgctgctaactggggcctgcgtggaaggcctccgctccctgcacacacacggacaggaatttccgtgactgtggtgtggagactggagcccaagctctgcagcgtgtcgccctcaagctgtaggcccatgttccagtccctccacccacccaccgggctcagctccagggcacagtcacttgtccgttgcaggttgggcactagaaaaggcccccactggctgcctgggagccccacaccaccgggccagtgcaggcactgtggtgatcccataaaaggccagtccatttgcagggtcatcagacagtcacctttggcctcaagaggcctcagaactgcaaactcctgcgtcggtctatactactcggccatggcccacatcagcagtcaaccctgcactctttcccagcgatcttggatgtgtccccaggatccgtcacagtgttccaggcaacctggacttgtcaaagtcagcacctgaaggagaggccacctgccattccccctgggagttttctgttgtcagcaggacttatggttctgggtctcagagcttcaggcctcactgtccttctgccacggatgctcaaggttcctgggcagaccagcacctctggaggacaatggacaaaatgtctcttagacctgttctggctgaagggctatctctggcacctctgagatccctaggtcctgccctcctggtccgtgggccaggatgtgcagaacaaccactcaggcctttctggcccacctggacagtgcatttacctgtgtgctgcgggaggcagactgcacagctgtcctagggtaactcactctgcagcccttgaacatggcactgccctcctctggcactcatgctgggcctgtgcccactgctgcctctccatccctctctcattggcctatacatctcttaggacctttgtaatggtgtccatgcacctttagaggacttcagaggccctgccaagtctagcatgttcctgtctccaacaccgcctcctgcacatgcagagcagacagaaataccccacacattccccagcctctctgcccagtatgctcatccacagggttttctcactgctatgaaccagccccacagccccaggcccctgtcacctggctatgcccactcatcccacccgtctcgtgctgttgcttcccgtagatggcgagcaccttgcaggcagccttctgatcagtactgctctcctagggcctggcacactgcagctgccctgtaaatgttcagctcagcgattgccaaataccagttagggaagaacactggcatctttttctattcattcccccttcaacatattttttgtagttttttatataaatgacttttttttttttttgagatggagtttcacccttgttgcccaggctggagtgcaatggcgtaatctcggctcagtgcaacctctgcctcccaggttgaagcgattctcctgcctcagcctcccaagtagctgggattacaggcatgcaccaccatgcctggctaattttgtatttttagtagagatggggtttctccatgttggtcaggctgctctcggactcctgatctcaggtgacctgcccacctcggcctcccgaagtgctgggattacaagggtgagccaccatgcccggccataaatgattttattcatttttatgttttcttttgggcggcgggatggagtctctgtcacccaggctggcgtgcaatggcacgatcttggctcactgcaagcttccccttccgggttcatgccattctcctgcctcagcctcccgagtagctgggactacaggcacgtgtgaccatgccgggctaattttttatatttttagtagagagaggtttcaccgtgttagccaggatggtctcgatgatctgacctcgtgatctgcccgcctcggcctcccaaagtgctgggattacaggcctgagccaccgcgtccggcctccataaatgacttttaaaggggttgtatgtttagtgtgaacaaagacagtacaaagcatataaaatacaaggtgaaagccccccccccgccacattagctgcgcccctgaagtgtctccagcagaagagatggatgaatggaaggacacacagatggacagagagcaggaaagactgttagctctgctaacagtcaggactattccttctggactctgtgcctttgcctgcacagctagtgttgatggcttgtttgttgttttcaccagagtgagctccttctggacatactgcctggcagcctgccttcctagggagctggcgccaaggcctctccctgatggcacacaaggagcctccttcctgtagcagcgcccagttttcatgtggatggattgtagttcatttgaccctccccatccgcgggccatccggcttgtgtccagcttttagctcttgccaatggtgctgcagtggccattcttgtagttatagctttgcgtactcaggaaggcccttctcccgactgcggcccccagcctggtccactaaatgcagcctgtggtcgggcagacagcattggggtccattaggaagaccaggtttgctgggcataagcttcacaggacgggagaacctgcccatggtggactgtcgttctccacagctcccttcccttgccccttcgggcctccaggatatgtttgcgggggtgggtgtggtgtccagctgttaccagcttctgagctagagctgtactgcctcacgtacacccccacctctgtaaatggtccttgattaaatcgtcctcatattacctcc

SEQ ID NO: 25265 - DNA, 936 bp, Homo sapiens
  source 1..936: mol_type = unassigned DNA
atggtgatcgccggtgcaagctggatgcttggacgcgccgctgccagtccaacgcagaccccgcccacgacgtcgacgattcgtgtagcccgcaggtcccgcgtggctctcgttgccatggtgatcgccgccgctggctcaggcggaccaggccgcgcggagccccagctttcacagccatcgctggactgtggaagaatgaggtcctccctgacacctttggggccccctgtgagccgcgaccgtgtcatcgccagcttccctaagtggtacacgccggaagcctgtttgcagctcagggagcacttccacgggcaggtcagcgctgcctgccaacgcaggaacacggggactgtcgggttttgcaagaatgtttttgatcgagactacaaggccaccattggggtggactttgaaattgagcgctttgagattgctgggattccctatagcctccagatctgggacacagctgggcaggagaagttcaagtgcatcgcatctgcctactaccggggtgcccaggtgatcatcacggcctttgacctcactgacgtgcagaccctggagcataccaggcagtggttggaggatgctctgagggagaacgaggcaggctcctgcttcatcttcctcgtgggaaccaagaaggaccttctgtcaggggccgcatgtgagcaggccgaagcagacgctgtgcacctggccagggagatgcaggccgagtactggtcagtgtcggccaagactggcgagaacgtgaaggcattcttcagccgcgtagccgccctggcattcgagcagtcggtgctgcaggacctggagaggcagagcagtgcccggctccaggtcggcaatggagacctaatccaaatggaagggagtccgcccgagacccaggagagcaagaggccctccagcctgggctgctgctaa

SEQ ID NO: 25266 - DNA, 1317 bp, Homo sapiens
  source 1..1317: mol_type = unassigned DNA
gttgccatggtgatcgccgccgctggctcaggcggaccaggccgcgcggagccccagctttcacagccatcgctggactgtggaagaatgaggtcctccctgacacctttggggccccctgtgagccgcgaccgtgtcatcgccagcttccctaagtggtacacgccggaagcctgtttgcagctcagggagcacttccacgggcaggtcagcgctgcctgccaacgcaggaacacggggactgtcgggctcaaactctccaaggtggtggtggttggcgatctctacgtggggaagaccagcctctctgcccagtatgctcatccacagggttttctcactgctatgaaccagccccacagccccaggcccctgtcacctggctatgcccactcatcccacccgtctcgtgctgttgcttcccgtagatggcgagcaccttgcaggcagccttctgatcagtactgctctcctagggcctggcacactgcagctgccctgtaaatgttcagctcagcgattgccaaataccagttagggaagaacactggcatctttttctattcattcccccttcaacatattttttgtagttttttatataaatgacttttttttttttttgagatggagtttcacccttgttgcccaggctggagtgcaatggcgtaatctcggctcagtgcaacctctgcctcccaggttgaagcgattctcctgcctcagcctcccaagtagctgggattacaggcatgcaccaccatgcctggctaattttgtatttttagtagagatggggtttctccatgttggtcaggctgctctcggactcctgatctcaggtgacctgcccacctcggcctcccgaagtgctgggattacaagggtgagccaccatgcccggccataaatgattttattcatttttatgttttcttttgggcggcgggatggagtctctgtcacccaggctggcgtgcaatggcacgatcttggctcactgcaagcttccccttccgggttcatgccattctcctgcctccataaatgacttttaaaggggttgtatgtttagtgtgaacaaagacagtacaaagcatataaaatacaaggtgaaagccccccccccgccacattagctgcgcccctgaagtgtctccagcagaagagatggatgaatggaaggacacacagatggacagagagcaggaaagactgttagctctgctaacagtcaggactattccttctggactctgtgcctttgcctgcacagctagtgttgatggcttgtttgttgttttcaccagagtgagc

SEQ ID NO: 25267 - DNA, 3805 bp, Homo sapiens
  source 1..3805: mol_type = unassigned DNA
ttcatcccctgccaggagagcatagtagctcacatttattgagttcttagtacacgctgggcactgttctaggctttttacatgaattaactcattaaatactcagaacaaaaccatgaggcaggtactattataatattatctccattttgtggacacttaggaaagattaatttgcccgagtttgcacgactaataattttcagaatcgagatttgaatcctggagcctgtgctcctaaccaaaccaccatctgcctctcctgagcccattgtccttaacttcttgcggtcatgtgtgctggagagaatgtgatcaaagccctggaccttctccctaggaaaacgcaggtaaacagaattttgcatatttcagggactttggggacacctaagacccatctactgtcgacctcagacttagaagctctatttatctcatacatcctggagagaattgtccagggacaaaaacagaagcgccgccagcgccgcaggacttcgcctctgcaaacgtgtgaggagagctgcgctgcgctgagctgcgtggtgacggagatgcccgttcgctcgggatcaggaacggtgagctcctgggaccgcaatgccctgagaacgcagccgggtgctgagcctccggagtccggtagctgaatgaaatacgcagggatcaccagccggacccaaatcttgcgtccctgccagcatcctggagtcctaagaggcagggattggagcggacaggatctcagaactctggtcccgggcgcacaacggcggagtcgctgttcctggtgctgaaacgctcagtcctggaagaacgtggccgcctgcccgcctggtaccgcgccgcggccgctgcggggaactgtccagtgctgaaaacggatgcggcccggcccgcagagctcagacccaagcctgccgcacccagcggagctcgaaccgagctcctggaagcgctgacgcagagcgcagggagagccggagcggcgagctccaagcctggcatggacctgcagagacccgattcctaccagggaggagctggccctgacttcaacgaccacgtcctgcataagaccatcctggtgggtgacagtggtgtgggaaagacgtctctgctggttcagttcgatcagggcaagttcatccccggctccttctcggccactgtgggcatcggattcacgaacaaggtggtgactgtggatggcgtgagagtgaagctgcagatctgggacaccgctgggcaggaacggttccgaagcgtcacccatgcttattacagagatgctcaggccttgcttctgctgtatgacatcaccaacaaatcttctttcgacaacatcagggcctggctcactgagattcatgagtatgcccagagggacgtggtgatcatgctgctaggcaacaaggcggatatgagcagcgaaagagtgatccgttccgaagacggagagaccttggccagggagtacggtgttcccttcctggagaccagcgccaagactggcatgaatgtggagttagcctttctggccatcgccaagtgagagctgggcagggaagggaagtgtgcggggcagggcggcacactccaggaatccagtagggcccggcccctggcccagcccctggacacacctgcattctgcaggctgaggtccatttgctctgggagcactgggccactgggagaggggagggggcggctcagctcctcaccccagcccagcccagcccagcccagcccattgtctcttcttcaagggaactgaaataccgggccgggcatcaggcggatgagcccagcttccagatccgagactatgtagagtcccagaagaagcgctccagctgctgctccttcatgtgaatcccagggggcagagaggaggctctggaggcacacaggatgcagccttccccctcccaggcctggcttattccaagaggctgagccaatggggagaaagatggaggactcactgcacagccgcttcctagcagggagctatactccaactcctacttgagttcctgcggtctccccgcatccacagggagggtaaaacacttagcttttattttaatagtacataatttaataccaaaaaaggcgcctggatccccaaaaaaccgaggctgggagctagtggcccttttgctttctaggacttggggggccggccctccctcctaagcataacaaaggtggtgttgctccagctcagccccaggggacacagatgcactttgggggtgagggcaggtaatgactccatcgcaccctcagttcagctggacagaggctcaggtgaccccagccttcactgtctcccgctctccaggagcttatcttcgccccatctcccaaataagtgggcccttgtgctgtgaggaagaccaaagcctcagggaagataagagatatggagatgggagggggaggacaaggggcagagagtagggtctagctggctatctctggccttactaacacccccctggaggcatgccccttttctccagcacacaagcacattggggcacctggaaatattggttccaggctcctgttctctggacttcagatcctgggggagcccctcccccccctgaatccctggcttagctaccttcctgcctgtgcacctaaaaacctcaggtcagaactaggaaaagagttttgtttttatttttttgaaatggagtctcgttctgtcgcccaggctgaggtgcagtagtgcaatctccgctcactacaacctccactccctggggctcaagcgatcctcccacctcagccgccgaagtagctgggactataggtgtgtaccatcacacctggctaatttttgtattttttgtagacacagggtttcgccatgttgcccaggctggtcttgaattcctgagctcaagcaacctgccggcctcggcctcccaaagtactgggattacacgcagaaggcaccatgcccaggctagatgtgtcttatcccaatcctttggcaggcatgcagctccacaggcgatttcttcaagcagctgaagtgtttagccctcctgggttaagagccagataaggagaaatccctttcctaggtttggaatgtgttgtgaaaaaaaagagaaatccctggctcctggagctggtgggagacaagattaagcaaacctcccctgacatgtatccctttgaccccaagctctgcctcctccctgaccacccatgccctttcctttaacttctcaaacagataccagggcctaaactgctttacctcccctcctactgagtcaggttaggtggtgggaggtcacccatttccgagttaaaccaatgcaatatgagtaaaacaaagtcatgtgggtatgtctggggtagagagaggggtagcaagttcatgtgtcctccttggtcacatatctcccaaagctccgatccctgccatgggaagtggacaggaaacatgaggtcatgacctgcaggcatctttactgcagctctgccggcctggagggggagagggggaggaagaagtatgcgctgcacatttctgaggctactgcatttgctttcaaggcagaaatcttgctctgagcagtcagcggctccagtttgggcccgataaggaagttctccgtggcctccctcaggcagagcagggaggaggctgacattgccagtctcttctggggcccaaggcaggttgcaggagatccaatcccatagacagctctgggcctcttgcatttgagtttttcagaattaaactgcagtattttggaaagca

SEQ ID NO: 25268 - DNA, 2858 bp, Homo sapiens
  source 1..2858: mol_type = unassigned DNA
ttcgcctgcgggccggcactgctcacctctcgtccagggacatgacgggcacgccaggcgccgttgccacccgggatggcgaggcccccgagcgctccccgccctgcagtccgagctacgacctcacgggcaaggtgatgcttctgggagacacaggcgtcggcaaaacatgtttcctgatccaattcaaagacggggccttcctgtccggaaccttcatagccaccgtcggcatagacttcaggaacaaggtggtgactgtggatggcgtgagagtgaagctgcagatctgggacaccgctgggcaggaacggttccgaagcgtcacccatgcttattacagagatgctcaggccttgcttctgctgtatgacatcaccaacaaatcttctttcgacaacatcagggcctggctcactgagattcatgagtatgcccagagggacgtggtgatcatgctgctaggcaacaaggcggatatgagcagcgaaagagtgatccgttccgaagacggagagaccttggccagggagtacggtgttcccttcctggagaccagcgccaagactggcatgaatgtggagttagcctttctggccatcgccaagtgagagctgggcagggaagggaagtgtgcggggcagggcggcacactccaggaatccagtagggcccggcccctggcccagcccctggacacacctgcattctgcaggctgaggtccatttgctctgggagcactgggccactgggagaggggagggggcggctcagctcctcaccccagcccagcccagcccagcccagcccattgtctcttcttcaagggaactgaaataccgggccgggcatcaggcggatgagcccagcttccagatccgagactatgtagagtcccagaagaagcgctccagctgctgctccttcatgtgaatcccagggggcagagaggaggctctggaggcacacaggatgcagccttccccctcccaggcctggcttattccaagaggctgagccaatggggagaaagatggaggactcactgcacagccgcttcctagcagggagctatactccaactcctacttgagttcctgcggtctccccgcatccacagggagggtaaaacacttagcttttattttaatagtacataatttaataccaaaaaaggcgcctggatccccaaaaaaccgaggctgggagctagtggcccttttgctttctaggacttggggggccggccctccctcctaagcataacaaaggtggtgttgctccagctcagccccaggggacacagatgcactttgggggtgagggcaggtaatgactccatcgcaccctcagttcagctggacagaggctcaggtgaccccagccttcactgtctcccgctctccaggagcttatcttcgccccatctcccaaataagtgggcccttgtgctgtgaggaagaccaaagcctcagggaagataagagatatggagatgggagggggaggacaaggggcagagagtagggtctagctggctatctctggccttactaacacccccctggaggcatgccccttttctccagcacacaagcacattggggcacctggaaatattggttccaggctcctgttctctggacttcagatcctgggggagcccctcccccccctgaatccctggcttagctaccttcctgcctgtgcacctaaaaacctcaggtcagaactaggaaaagagttttgtttttatttttttgaaatggagtctcgttctgtcgcccaggctgaggtgcagtagtgcaatctccgctcactacaacctccactccctggggctcaagcgatcctcccacctcagccgccgaagtagctgggactataggtgtgtaccatcacacctggctaatttttgtattttttgtagacacagggtttcgccatgttgcccaggctggtcttgaattcctgagctcaagcaacctgccggcctcggcctcccaaagtactgggattacacgcagaaggcaccatgcccaggctagatgtgtcttatcccaatcctttggcaggcatgcagctccacaggcgatttcttcaagcagctgaagtgtttagccctcctgggttaagagccagataaggagaaatccctttcctaggtttggaatgtgttgtgaaaaaaaagagaaatccctggctcctggagctggtgggagacaagattaagcaaacctcccctgacatgtatccctttgaccccaagctctgcctcctccctgaccacccatgccctttcctttaacttctcaaacagataccagggcctaaactgctttacctcccctcctactgagtcaggttaggtggtgggaggtcacccatttccgagttaaaccaatgcaatatgagtaaaacaaagtcatgtgggtatgtctggggtagagagaggggtagcaagttcatgtgtcctccttggtcacatatctcccaaagctccgatccctgccatgggaagtggacaggaaacatgaggtcatgacctgcaggcatctttactgcagctctgccggcctggagggggagagggggaggaagaagtatgcgctgcacatttctgaggctactgcatttgctttcaaggcagaaatcttgctctgagcagtcagcggctccagtttgggcccgataaggaagttctccgtggcctccctcaggcagagcagggaggaggctgacattgccagtctcttctggggcccaaggcaggttgcaggagatccaatcccatagacagctctgggcctcttgcatttgagtttttcagaattaaactgcagtattttggaaagca

SEQ ID NO: 25269 - DNA, 2528 bp, Homo sapiens
  source 1..2528: mol_type = unassigned DNA
ccttcgcctgcgggccggcactgctcacctctcgtccagggacatgacgggcacgccaggcgccgttgccacccgggatggcgaggcccccgagcgctccccgccctgcagtccgagctacgacctcacgggcaagaacaaggtggtgactgtggatggcgtgagagtgaagctgcagatctgggacaccgctgggcaggaacggttccgaagcgtcacccatgcttattacagagatgctcaggccttgcttctgctgtatgacatcaccaacaaatcttctttcgacaacatcagggcctggctcactgagattcatgagtatgcccagagggacgtggtgatcatgctgctaggcaacaaggcggatatgagcagcgaaagagtgatccgttccgaagacggagagaccttggccagggagtacggtgttcccttcctggagaccagcgccaagactggcatgaatgtggagttagcctttctggccatcgccaaggaactgaaataccgggccgggcatcaggcggatgagcccagcttccagatccgagactatgtagagtcccagaagaagcgctccagctgctgctccttcatgtgaatcccagggggcagagaggaggctctggaggcacacaggatgcagccttccccctcccaggcctggcttattccaagaggctgagccaatggggagaaagatggaggactcactgcacagccgcttcctagcagggagctatactccaactcctacttgagttcctgcggtctccccgcatccacagggagggtaaaacacttagcttttattttaatagtacataatttaataccaaaaaaggcgcctggatccccaaaaaaccgaggctgggagctagtggcccttttgctttctaggacttggggggccggccctccctcctaagcataacaaaggtggtgttgctccagctcagccccaggggacacagatgcactttgggggtgagggcaggtaatgactccatcgcaccctcagttcagctggacagaggctcaggtgaccccagccttcactgtctcccgctctccaggagcttatcttcgccccatctcccaaataagtgggcccttgtgctgtgaggaagaccaaagcctcagggaagataagagatatggagatgggagggggaggacaaggggcagagagtagggtctagctggctatctctggccttactaacacccccctggaggcatgccccttttctccagcacacaagcacattggggcacctggaaatattggttccaggctcctgttctctggacttcagatcctgggggagcccctcccccccctgaatccctggcttagctaccttcctgcctgtgcacctaaaaacctcaggtcagaactaggaaaagagttttgtttttatttttttgaaatggagtctcgttctgtcgcccaggctgaggtgcagtagtgcaatctccgctcactacaacctccactccctggggctcaagcgatcctcccacctcagccgccgaagtagctgggactataggtgtgtaccatcacacctggctaatttttgtattttttgtagacacagggtttcgccatgttgcccaggctggtcttgaattcctgagctcaagcaacctgccggcctcggcctcccaaagtactgggattacacgcagaaggcaccatgcccaggctagatgtgtcttatcccaatcctttggcaggcatgcagctccacaggcgatttcttcaagcagctgaagtgtttagccctcctgggttaagagccagataaggagaaatccctttcctaggtttggaatgtgttgtgaaaaaaaagagaaatccctggctcctggagctggtgggagacaagattaagcaaacctcccctgacatgtatccctttgaccccaagctctgcctcctccctgaccacccatgccctttcctttaacttctcaaacagataccagggcctaaactgctttacctcccctcctactgagtcaggttaggtggtgggaggtcacccatttccgagttaaaccaatgcaatatgagtaaaacaaagtcatgtgggtatgtctggggtagagagaggggtagcaagttcatgtgtcctccttggtcacatatctcccaaagctccgatccctgccatgggaagtggacaggaaacatgaggtcatgacctgcaggcatctttactgcagctctgccggcctggagggggagagggggaggaagaagtatgcgctgcacatttctgaggctactgcatttgctttcaaggcagaaatcttgctctgagcagtcagcggctccagtttgggcccgataaggaagttctccgtggcctccctcaggcagagcagggaggaggctgacattgccagtctcttctggggcccaaggcaggttgcaggagatccaatcccatagacagctctgggcctcttgcatttgagtttttcagaattaaactgcagtattttggaaagca

SEQ ID NO: 25270 - DNA, 2617 bp, Homo sapiens
  source 1..2617: mol_type = unassigned DNA
gttcctgcgctctccttcgcctgcgggccggcactgctcacctctcgtccagggacatgacgggcacgccaggcgccgttgccacccgggatggcgaggcccccgagcgctccccgccctgcagtccgagctacgacctcacgggcaaggtgatgcttctgggagacacaggcgtcggcaaaacatgtttcctgatccaattcaaagacggggccttcctgtccggaaccttcatagccaccgtcggcatagacttcaggaacaaggtggtgactgtggatggcgtgagagtgaagctgcagatctgggacaccgctgggcaggaacggttccgaagcgtcacccatgcttattacagagatgctcaggccttgcttctgctgtatgacatcaccaacaaatcttctttcgacaacatcagggcctggctcactgagattcatgagtatgcccagagggacgtggtgatcatgctgctaggcaacaaggcggatatgagcagcgaaagagtgatccgttccgaagacggagagaccttggccagggagtacggtgttcccttcctggagaccagcgccaagactggcatgaatgtggagttagcctttctggccatcgccaaggaactgaaataccgggccgggcatcaggcggatgagcccagcttccagatccgagactatgtagagtcccagaagaagcgctccagctgctgctccttcatgtgaatcccagggggcagagaggaggctctggaggcacacaggatgcagccttccccctcccaggcctggcttattccaagaggctgagccaatggggagaaagatggaggactcactgcacagccgcttcctagcagggagctatactccaactcctacttgagttcctgcggtctccccgcatccacagggagggtaaaacacttagcttttattttaatagtacataatttaataccaaaaaaggcgcctggatccccaaaaaaccgaggctgggagctagtggcccttttgctttctaggacttggggggccggccctccctcctaagcataacaaaggtggtgttgctccagctcagccccaggggacacagatgcactttgggggtgagggcaggtaatgactccatcgcaccctcagttcagctggacagaggctcaggtgaccccagccttcactgtctcccgctctccaggagcttatcttcgccccatctcccaaataagtgggcccttgtgctgtgaggaagaccaaagcctcagggaagataagagatatggagatgggagggggaggacaaggggcagagagtagggtctagctggctatctctggccttactaacacccccctggaggcatgccccttttctccagcacacaagcacattggggcacctggaaatattggttccaggctcctgttctctggacttcagatcctgggggagcccctcccccccctgaatccctggcttagctaccttcctgcctgtgcacctaaaaacctcaggtcagaactaggaaaagagttttgtttttatttttttgaaatggagtctcgttctgtcgcccaggctgaggtgcagtagtgcaatctccgctcactacaacctccactccctggggctcaagcgatcctcccacctcagccgccgaagtagctgggactataggtgtgtaccatcacacctggctaatttttgtattttttgtagacacagggtttcgccatgttgcccaggctggtcttgaattcctgagctcaagcaacctgccggcctcggcctcccaaagtactgggattacacgcagaaggcaccatgcccaggctagatgtgtcttatcccaatcctttggcaggcatgcagctccacaggcgatttcttcaagcagctgaagtgtttagccctcctgggttaagagccagataaggagaaatccctttcctaggtttggaatgtgttgtgaaaaaaaagagaaatccctggctcctggagctggtgggagacaagattaagcaaacctcccctgacatgtatccctttgaccccaagctctgcctcctccctgaccacccatgccctttcctttaacttctcaaacagataccagggcctaaactgctttacctcccctcctactgagtcaggttaggtggtgggaggtcacccatttccgagttaaaccaatgcaatatgagtaaaacaaagtcatgtgggtatgtctggggtagagagaggggtagcaagttcatgtgtcctccttggtcacatatctcccaaagctccgatccctgccatgggaagtggacaggaaacatgaggtcatgacctgcaggcatctttactgcagctctgccggcctggagggggagagggggaggaagaagtatgcgctgcacatttctgaggctactgcatttgctttcaaggcagaaatcttgctctgagcagtcagcggctccagtttgggcccgataaggaagttctccgtggcctccctcaggcagagcagggaggaggctgacattgccagtctcttctggggcccaaggcaggttgcaggagatccaatcccatagacagctctgggcctcttgcatttgag

SEQ ID NO: 25271 - DNA, 2704 bp, Homo sapiens
  source 1..2704: mol_type = unassigned DNA
gactacgggaactcttccgcagcagacggggtccccgcggcccgctcccccaggggcaagcaagcgaccacaggggaccggtcccggggctggatgtggctcatgtccgaagcgcacggagccgagccggtgttgctcagggaggctgcccgccccttcacgcagaccctgcggctctgcgtgccctcagggaacagcaaggtgatgcttctgggagacacaggcgtcggcaaaacatgtttcctgatccaattcaaagacggggccttcctgtccggaaccttcatagccaccgtcggcatagacttcaggaacaaggtggtgactgtggatggcgtgagagtgaagctgcagatctgggacaccgctgggcaggaacggttccgaagcgtcacccatgcttattacagagatgctcaggccttgcttctgctgtatgacatcaccaacaaatcttctttcgacaacatcagggcctggctcactgagattcatgagtatgcccagagggacgtggtgatcatgctgctaggcaacaaggcggatatgagcagcgaaagagtgatccgttccgaagacggagagaccttggccagggagtacggtgttcccttcctggagaccagcgccaagactggcatgaatgtggagttagcctttctggccatcgccaaggaactgaaataccgggccgggcatcaggcggatgagcccagcttccagatccgagactatgtagagtcccagaagaagcgctccagctgctgctccttcatgtgaatcccagggggcagagaggaggctctggaggcacacaggatgcagccttccccctcccaggcctggcttattccaagaggctgagccaatggggagaaagatggaggactcactgcacagccgcttcctagcagggagctatactccaactcctacttgagttcctgcggtctccccgcatccacagggagggtaaaacacttagcttttattttaatagtacataatttaataccaaaaaaggcgcctggatccccaaaaaaccgaggctgggagctagtggcccttttgctttctaggacttggggggccggccctccctcctaagcataacaaaggtggtgttgctccagctcagccccaggggacacagatgcactttgggggtgagggcaggtaatgactccatcgcaccctcagttcagctggacagaggctcaggtgaccccagccttcactgtctcccgctctccaggagcttatcttcgccccatctcccaaataagtgggcccttgtgctgtgaggaagaccaaagcctcagggaagataagagatatggagatgggagggggaggacaaggggcagagagtagggtctagctggctatctctggccttactaacacccccctggaggcatgccccttttctccagcacacaagcacattggggcacctggaaatattggttccaggctcctgttctctggacttcagatcctgggggagcccctcccccccctgaatccctggcttagctaccttcctgcctgtgcacctaaaaacctcaggtcagaactaggaaaagagttttgtttttatttttttgaaatggagtctcgttctgtcgcccaggctgaggtgcagtagtgcaatctccgctcactacaacctccactccctggggctcaagcgatcctcccacctcagccgccgaagtagctgggactataggtgtgtaccatcacacctggctaatttttgtattttttgtagacacagggtttcgccatgttgcccaggctggtcttgaattcctgagctcaagcaacctgccggcctcggcctcccaaagtactgggattacacgcagaaggcaccatgcccaggctagatgtgtcttatcccaatcctttggcaggcatgcagctccacaggcgatttcttcaagcagctgaagtgtttagccctcctgggttaagagccagataaggagaaatccctttcctaggtttggaatgtgttgtgaaaaaaaagagaaatccctggctcctggagctggtgggagacaagattaagcaaacctcccctgacatgtatccctttgaccccaagctctgcctcctccctgaccacccatgccctttcctttaacttctcaaacagataccagggcctaaactgctttacctcccctcctactgagtcaggttaggtggtgggaggtcacccatttccgagttaaaccaatgcaatatgagtaaaacaaagtcatgtgggtatgtctggggtagagagaggggtagcaagttcatgtgtcctccttggtcacatatctcccaaagctccgatccctgccatgggaagtggacaggaaacatgaggtcatgacctgcaggcatctttactgcagctctgccggcctggagggggagagggggaggaagaagtatgcgctgcacatttctgaggctactgcatttgctttcaaggcagaaatcttgctctgagcagtcagcggctccagtttgggcccgataaggaagttctccgtggcctccctcaggcagagcagggaggaggctgacattgccagtctcttctggggcccaaggcaggttgcaggagatccaatcccatagacagctctgggcctcttgcatttgagtttttcagaattaaactgcagtattttggaaagca

SEQ ID NO: 25272 - DNA, 2690 bp, Homo sapiens
  source 1..2690: mol_type = unassigned DNA
ggaggcgcagcccaggggtccccagctccccgcctcgccacctggggacagcccacggcccggggctcgggcgccgcctgctgtcgcggtgcgcagcgactacgggaactcttccgcagcagacggggtccccgcggcccgctcccccaggggcaagcaagcgaccacaggggaccggtcccggggctggatgtggctcatgtccgaagcgcacggagccgagccggtgttgctcagggaggctgcccgccccttcacgcagaccctgcggctctgcgtgccctcagggaacagcaagaacaaggtggtgactgtggatggcgtgagagtgaagctgcagatctgggacaccgctgggcaggaacggttccgaagcgtcacccatgcttattacagagatgctcaggccttgcttctgctgtatgacatcaccaacaaatcttctttcgacaacatcagggcctggctcactgagattcatgagtatgcccagagggacgtggtgatcatgctgctaggcaacaaggcggatatgagcagcgaaagagtgatccgttccgaagacggagagaccttggccagggagtacggtgttcccttcctggagaccagcgccaagactggcatgaatgtggagttagcctttctggccatcgccaaggaactgaaataccgggccgggcatcaggcggatgagcccagcttccagatccgagactatgtagagtcccagaagaagcgctccagctgctgctccttcatgtgaatcccagggggcagagaggaggctctggaggcacacaggatgcagccttccccctcccaggcctggcttattccaagaggctgagccaatggggagaaagatggaggactcactgcacagccgcttcctagcagggagctatactccaactcctacttgagttcctgcggtctccccgcatccacagggagggtaaaacacttagcttttattttaatagtacataatttaataccaaaaaaggcgcctggatccccaaaaaaccgaggctgggagctagtggcccttttgctttctaggacttggggggccggccctccctcctaagcataacaaaggtggtgttgctccagctcagccccaggggacacagatgcactttgggggtgagggcaggtaatgactccatcgcaccctcagttcagctggacagaggctcaggtgaccccagccttcactgtctcccgctctccaggagcttatcttcgccccatctcccaaataagtgggcccttgtgctgtgaggaagaccaaagcctcagggaagataagagatatggagatgggagggggaggacaaggggcagagagtagggtctagctggctatctctggccttactaacacccccctggaggcatgccccttttctccagcacacaagcacattggggcacctggaaatattggttccaggctcctgttctctggacttcagatcctgggggagcccctcccccccctgaatccctggcttagctaccttcctgcctgtgcacctaaaaacctcaggtcagaactaggaaaagagttttgtttttatttttttgaaatggagtctcgttctgtcgcccaggctgaggtgcagtagtgcaatctccgctcactacaacctccactccctggggctcaagcgatcctcccacctcagccgccgaagtagctgggactataggtgtgtaccatcacacctggctaatttttgtattttttgtagacacagggtttcgccatgttgcccaggctggtcttgaattcctgagctcaagcaacctgccggcctcggcctcccaaagtactgggattacacgcagaaggcaccatgcccaggctagatgtgtcttatcccaatcctttggcaggcatgcagctccacaggcgatttcttcaagcagctgaagtgtttagccctcctgggttaagagccagataaggagaaatccctttcctaggtttggaatgtgttgtgaaaaaaaagagaaatccctggctcctggagctggtgggagacaagattaagcaaacctcccctgacatgtatccctttgaccccaagctctgcctcctccctgaccacccatgccctttcctttaacttctcaaacagataccagggcctaaactgctttacctcccctcctactgagtcaggttaggtggtgggaggtcacccatttccgagttaaaccaatgcaatatgagtaaaacaaagtcatgtgggtatgtctggggtagagagaggggtagcaagttcatgtgtcctccttggtcacatatctcccaaagctccgatccctgccatgggaagtggacaggaaacatgaggtcatgacctgcaggcatctttactgcagctctgccggcctggagggggagagggggaggaagaagtatgcgctgcacatttctgaggctactgcatttgctttcaaggcagaaatcttgctctgagcagtcagcggctccagtttgggcccgataaggaagttctccgtggcctccctcaggcagagcagggaggaggctgacattgccagtctcttctggggcccaaggcaggttgcaggagatccaatcccatagacagctctgggcctcttgcatttgagtttttcagaattaaactgcagtattttggaaagca

SEQ ID NO: 25273 - DNA, 3780 bp, Homo sapiens
  source 1..3780: mol_type = unassigned DNA
aatgccctgagaacgcagccgggtgctgagcctccggagtccggtagctgaatgaaatacgcagggatcaccagccggacccaaatcttgcgtccctgccagcatcctggagtcctaagaggcagggattggagcggacaggatctcagaactctggtcccgggcgcacaacggcggagtcgctgttcctggtgctgaaacgctcagtcctggaagaacgtggccgcctgcccgcctggtaccgcgccgcggccgctgcggggaactgtccagtgctgaaaacggatgcggcccggcccgcagagctcagacccaagcctgccgcacccagcggagctcgaaccgagctcctggaagcgctgacgcagagcgcagggagagccggagcggcgagctccaagcctggcatggacctgcagagacccgattcctaccagggaggagctggccctgacttcaacgaccacgtcctgcataagaccatcctggtgggtgacagtggtgtgggaaagacgtctctgctggttcagttcgatcagggcaagttcatccccggctccttctcggccactgtgggcatcggattcacgaacaaggtggtgactgtggatggcgtgagagtgaagctgcagatctgggacaccgctgggcaggaacggttccgaagcgtcacccatgcttattacagagatgctcaggccttgcttctgctgtatgacatcaccaacaaatcttctttcgacaacatcagggcctggctcactgagattcatgagtatgcccagagggacgtggtgatcatgctgctaggcaacaaggtgagtggctccggggcagggtcagcccagccctgcacttcctcagccctagccggccccataaccacccaagaacagttatctaggcatccttcctgaaaaggactctgcagcctccagctcaggggtcagacatatctggaggcttctgcccatcccatctgccccttccagggaaagtccaagttgttgcctgagaaatcaaggggtgcccagttctcagcccccattagagcagagtgaacagggtcccaggtcaggggctaagagtgcaaagggttagccccaactgctgtcctattccaagaccctttaccaaaggtgagatcccagagctgggagctacactgggcagaaaccctggccccaggccaatcacacctgcctgcagtcccttgggccaccagcagagggcaggcaacgcctgcttctggggcaaaatatgggcccgctggggcggaggcctccttccccagagtgacccatttgggcttgacaggcggatatgagcagcgaaagagtgatccgttccgaagacggagagaccttggccagggtaagtgattgtctgtgggacagggtgaagggtgggggcaacccgacgctggccctgaggacactctctcccgggcaggagtacggtgttcccttcctggagaccagcgccaagactggcatgaatgtggagttagcctttctggccatcgccaagtgagagctgggcagggaagggaagtgtgcggggcagggcggcacactccaggaatccagtagggcccggcccctggcccagcccctggacacacctgcattctgcaggctgaggtccatttgctctgggagcactgggccactgggagaggggagggggcggctcagctcctcaccccagcccagcccagcccagcccagcccattgtctcttcttcaagggaactgaaataccgggccgggcatcaggcggatgagcccagcttccagatccgagactatgtagagtcccagaagaagcgctccagctgctgctccttcatgtgaatcccagggggcagagaggaggctctggaggcacacaggatgcagccttccccctcccaggcctggcttattccaagaggctgagccaatggggagaaagatggaggactcactgcacagccgcttcctagcagggagctatactccaactcctacttgagttcctgcggtctccccgcatccacagggagggtaaaacacttagcttttattttaatagtacataatttaataccaaaaaaggcgcctggatccccaaaaaaccgaggctgggagctagtggcccttttgctttctaggacttggggggccggccctccctcctaagcataacaaaggtggtgttgctccagctcagccccaggggacacagatgcactttgggggtgagggcaggtaatgactccatcgcaccctcagttcagctggacagaggctcaggtgaccccagccttcactgtctcccgctctccaggagcttatcttcgccccatctcccaaataagtgggcccttgtgctgtgaggaagaccaaagcctcagggaagataagagatatggagatgggagggggaggacaaggggcagagagtagggtctagctggctatctctggccttactaacacccccctggaggcatgccccttttctccagcacacaagcacattggggcacctggaaatattggttccaggctcctgttctctggacttcagatcctgggggagcccctcccccccctgaatccctggcttagctaccttcctgcctgtgcacctaaaaacctcaggtcagaactaggaaaagagttttgtttttatttttttgaaatggagtctcgttctgtcgcccaggctgaggtgcagtagtgcaatctccgctcactacaacctccactccctggggctcaagcgatcctcccacctcagccgccgaagtagctgggactataggtgtgtaccatcacacctggctaatttttgtattttttgtagacacagggtttcgccatgttgcccaggctggtcttgaattcctgagctcaagcaacctgccggcctcggcctcccaaagtactgggattacacgcagaaggcaccatgcccaggctagatgtgtcttatcccaatcctttggcaggcatgcagctccacaggcgatttcttcaagcagctgaagtgtttagccctcctgggttaagagccagataaggagaaatccctttcctaggtttggaatgtgttgtgaaaaaaaagagaaatccctggctcctggagctggtgggagacaagattaagcaaacctcccctgacatgtatccctttgaccccaagctctgcctcctccctgaccacccatgccctttcctttaacttctcaaacagataccagggcctaaactgctttacctcccctcctactgagtcaggttaggtggtgggaggtcacccatttccgagttaaaccaatgcaatatgagtaaaacaaagtcatgtgggtatgtctggggtagagagaggggtagcaagttcatgtgtcctccttggtcacatatctcccaaagctccgatccctgccatgggaagtggacaggaaacatgaggtcatgacctgcaggcatctttactgcagctctgccggcctggagggggagagggggaggaagaagtatgcgctgcacatttctgaggctactgcatttgctttcaaggcagaaatcttgctctgagcagtcagcggctccagtttgggcccgataaggaagttctccgtggcctccctcaggcagagcagggaggaggctgacattgccagtctcttctggggcccaaggcaggttgcaggagatccaatcccatagacagctctgggcctcttgcatttgagtttttcagaattaaactgcagtattttggaaagca

SEQ ID NO: 25274 - DNA, 3044 bp, Homo sapiens
  source 1..3044: mol_type = unassigned DNA
agctgcgtggtgacggagatgcccgttcgctcgggatcaggaacggtgagctcctgggaccgcaatgccctgagaacgcagccgggtgctgagcctccggagtccggtagctgaatgaaatacgcagggatcaccagccggacccaaatcttgcgtccctgccagcatcctggagtcctaagaggcagggattggagcggacaggatctcagaactctggtcccgggcgcacaacggcggagtcgctgttcctggtgctgaaacgctcagtcctggaagaacgtggccgcctgcccgcctggtaccgcgccgcggccgctgcggggaactgtccagtgctgaaaacggatgcggcccggcccgcagagctcagacccaagcctgccgcacccagcggagctcgaaccgagctcctggaagcgctgacgcagagcgcagggagagccggagcggcgagctccaagcctggcatggacctgcagagacccgattcctaccagggaggagctggccctgacttcaacgaccacgtcctgcataagaccatcctggtgggtgacagtggtgtgggaaagacgtctctgctggttcagttcgatcagggcaagttcatccccggctccttctcggccactgtgggcatcggattcacgaacaaggtggtgactgtggatggcgtgagagtgaagctgcagatctgggacaccgctgggcaggaacggttccgaagcgtcacccatgcttattacagagatgctcaggccttgcttctgctgtatgacatcaccaacaaatcttctttcgacaacatcagggcctggctcactgagattcatgagtatgcccagagggacgtggtgatcatgctgctaggcaacaaggcggatatgagcagcgaaagagtgatccgttccgaagacggagagaccttggccagggagtacggtgttcccttcctggagaccagcgccaagactggcatgaatgtggagttagcctttctggccatcgccaaggaactgaaataccgggccgggcatcaggcggatgagcccagcttccagatccgagactatgtagagtcccagaagaagcgctccagctgctgctccttcatgtgaatcccagggggcagagaggaggctctggaggcacacaggatgcagccttccccctcccaggcctggcttattccaagaggctgagccaatggggagaaagatggaggactcactgcacagccgcttcctagcagggagctatactccaactcctacttgagttcctgcggtctccccgcatccacagggagggtaaaacacttagcttttattttaatagtacataatttaataccaaaaaaggcgcctggatccccaaaaaaccgaggctgggagctagtggcccttttgctttctaggacttggggggccggccctccctcctaagcataacaaaggtggtgttgctccagctcagccccaggggacacagatgcactttgggggtgagggcaggtaatgactccatcgcaccctcagttcagctggacagaggctcaggtgaccccagccttcactgtctcccgctctccaggagcttatcttcgccccatctcccaaataagtgggcccttgtgctgtgaggaagaccaaagcctcagggaagataagagatatggagatgggagggggaggacaaggggcagagagtagggtctagctggctatctctggccttactaacacccccctggaggcatgccccttttctccagcacacaagcacattggggcacctggaaatattggttccaggctcctgttctctggacttcagatcctgggggagcccctcccccccctgaatccctggcttagctaccttcctgcctgtgcacctaaaaacctcaggtcagaactaggaaaagagttttgtttttatttttttgaaatggagtctcgttctgtcgcccaggctgaggtgcagtagtgcaatctccgctcactacaacctccactccctggggctcaagcgatcctcccacctcagccgccgaagtagctgggactataggtgtgtaccatcacacctggctaatttttgtattttttgtagacacagggtttcgccatgttgcccaggctggtcttgaattcctgagctcaagcaacctgccggcctcggcctcccaaagtactgggattacacgcagaaggcaccatgcccaggctagatgtgtcttatcccaatcctttggcaggcatgcagctccacaggcgatttcttcaagcagctgaagtgtttagccctcctgggttaagagccagataaggagaaatccctttcctaggtttggaatgtgttgtgaaaaaaaagagaaatccctggctcctggagctggtgggagacaagattaagcaaacctcccctgacatgtatccctttgaccccaagctctgcctcctccctgaccacccatgccctttcctttaacttctcaaacagataccagggcctaaactgctttacctcccctcctactgagtcaggttaggtggtgggaggtcacccatttccgagttaaaccaatgcaatatgagtaaaacaaagtcatgtgggtatgtctggggtagagagaggggtagcaagttcatgtgtcctccttggtcacatatctcccaaagctccgatccctgccatgggaagtggacaggaaacatgaggtcatgacctgcaggcatctttactgcagctctgccggcctggagggggagagggggaggaagaagtatgcgctgcacatttctgaggctactgcatttgctttcaaggcagaaatcttgctctgagcagtcagcggctccagtttgggcccgataaggaagttctccgtggcctccctcaggcagagcagggaggaggctgacattgccagtctcttctggggcccaaggcaggttgcaggagatccaatcccatagacagctctgggcctcttgcatttgagtttttcagaattaaactgcagtattttggaaagc

SEQ ID NO: 25275 - DNA, 1730 bp, Homo sapiens
  source 1..1730: mol_type = unassigned DNA
ggagatgcccgttcgctcgggatcaggaacggtgagctcctgggaccgcaatgccctgagaacgcagccgggtgctgagcctccggagtccggtagctgaatgaaatacgcagggatcaccagccggacccaaatcttgcgtccctgccagcatcctggagtcctaagaggcagggattggagcggacaggatctcagaactctggtcccgggcgcacaacggcggagtcgctgttcctggtgctgaaacgctcagtcctggaagaacgtggccgcctgcccgcctggtaccgcgccgcggccgctgcggggaactgtccagtgctgaaaacggatgcggcccggcccgcagagctcagacccaagcctgccgcacccagcggagctcgaaccgagctcctggaagcgctgacgcagagcgcagggagagccggagcggcgagctccaagcctggcatggacctgcagagacccgattcctaccagggaggagctggccctgacttcaacgaccacgtcctgcataagaccatcctggtgggtgacagtggtgtgggaaagacgtctctgctggttcagttcgatcagggcaagttcatccccggctccttctcggccactgtgggcatcggattcacgaacaaggtggtgactgtggatggcgtgagagtgaagctgcagatctgggacaccgctgggcaggaacggttccgaagcgtcacccatgcttattacagagatgctcaggccttgcttctgctgtatgacatcaccaacaaatcttctttcgacaacatcagggcctggctcactgagattcatgagtatgcccagagggacgtggtgatcatgctgctaggcaacaaggcggatatgagcagcgaaagagtgatccgttccgaagacggagagaccttggccagggagtacggtgttcccttcctggagaccagcgccaagactggcatgaatgtggagttagcctttctggccatcgccaaggaactgaaataccgggccgggcatcaggcggatgagcccagcttccagatccgagactatgtagagtcccagaagaagcgctccagctgctgctccttcatgtgaatcccagggggcagagaggaggctctggaggcacacaggatgcagccttcccccacccatgccctttcctttaacttctcaaacagataccagggcctaaactgctttacctcccctcctactgagtcaggttaggtggtgggaggtcacccatttccgagttaaaccaatgcaatatgagtaaaacaaagtcatgtgggtatgtctggggtagagagaggggtagcaagttcatgtgtcctccttggtcacatatctcccaaagctccgatccctgccatgggaagtggacaggaaacatgaggtcatgacctgcaggcatctttactgcagctctgccggcctggagggggagagggggaggaagaagtatgcgctgcacatttctgaggctactgcatttgctttcaaggcagaaatcttgctctgagcagtcagcggctccagtttgggcccgataaggaagttctccgtggcctccctcaggcagagcagggaggaggctgacattgccagtctcttctggggcccaaggcaggttgcaggagatccaatcccatagacagctctgggcctcttgcatttgagtttttcagaattaaactgcagtattttggaaagca

SEQ ID NO: 25276 - DNA, 1654 bp, Homo sapiens
  source 1..1654: mol_type = unassigned DNA
acatgacgggcacgccaggcgccgttgccacccgggatggcgaggcccccgagcgctccccgccctgcagtccgagctacgacctcacgggcaaggtgatgcttctgggagacacaggcgtcggcaaaacatgtttcctgatccaattcaaagacggggccttcctgtccggaaccttcatagccaccgtcggcatagacttcaggaacaaggtggtgactgtggatggcgtgagagtgaagctgcagatctgggacaccgctgggcaggaacggttccgaagcgtcacccatgcttattacagagatgctcaggccttgcttctgctgtatgacatcaccaacaaatcttctttcgacaacatcagggcctggctcactgagattcatgagtatgcccagagggacgtggtgatcatgctgctaggcaacaaggcggatatgagcagcgaaagagtgatccgttccgaagacggagagaccttggccagggagtacggtgttcccttcctggagaccagcgccaagactggcatgaatgtggagttagcctttctggccatcgccaaggaactgaaataccgggccgggcatcaggcggatgagcccagcttccagatccgagactatgtagagtcccagaagaagcgctccagctgctgctccttcatgtgaatcccagggggcagagaggaggctctggaggcacacaggatgcagccttccccctcccaggcctggcttattccaagaggctggtcttgaattcctgagctcaagcaacctgccggcctcggcctcccaaagtactgggattacacgcagaaggcaccatgcccaggctagatgtgtcttatcccaatcctttggcaggcatgcagctccacaggcgatttcttcaagcagctgaagtgtttagccctcctgggttaagagccagataaggagaaatccctttcctaggtttggaatgtgttgtgaaaaaaaagagaaatccctggctcctggagctggtgggagacaagattaagcaaacctcccctgacatgtatccctttgaccccaagctctgcctcctccctgaccacccatgccctttcctttaacttctcaaacagataccagggcctaaactgctttacctcccctcctactgagtcaggttaggtggtgggaggtcacccatttccgagttaaaccaatgcaatatgagtaaaacaaagtcatgtgggtatgtctggggtagagagaggggtagcaagttcatgtgtcctccttggtcacatatctcccaaagctccgatccctgccatgggaagtggacaggaaacatgaggtcatgacctgcaggcatctttactgcagctctgccggcctggagggggagagggggaggaagaagtatgcgctgcacatttctgaggctactgcatttgctttcaaggcagaaatcttgctctgagcagtcagcggctccagtttgggcccgataaggaagttctccgtggcctccctcaggcagagcagggaggaggctgacattgccagtctcttctggggcccaaggcaggttgcaggagatccaatcccatagacagctctgggcctcttgcatttgagtttttcagaattaaactgcagtattttggaaagca

SEQ ID NO: 25277 - DNA, 1494 bp, Homo sapiens
  source 1..1494: mol_type = unassigned DNA
aaagctctcccctggtgggacattctgggcacaaccaacaggccgggggaaatgagaggtgatccatactaaagggtcaaagtccccgcaccaggcagaggccccaaaacaccgcagcgtacatgtgctgcaaggtgatgcttctgggagacacaggcgtcggcaaaacatgtttcctgatccaattcaaagacggggccttcctgtccggaaccttcatagccaccgtcggcatagacttcaggaacaaggtggtgactgtggatggcgtgagagtgaagctgcagatctgggacaccgctgggcaggaacggttccgaagcgtcacccatgcttattacagagatgctcaggccttgcttctgctgtatgacatcaccaacaaatcttctttcgacaacatcagggcctggctcactgagattcatgagtatgcccagagggacgtggtgatcatgctgctaggcaacaaggcggatatgagcagcgaaagagtgatccgttccgaagacggagagaccttggccagggagtacggtgttcccttcctggagaccagcgccaagactggcatgaatgtggagttagcctttctggccatcgccaaggaactgaaataccgggccgggcatcaggcggatgagcccagcttccagatccgagactatgtagagtcccagaagaagcgctccagctgctgctccttcatgtgaatcccagggggcagagaggaggctctggaggcacacaggatgcagccttccccctcccaggcctggcttattccaagaggctgagccaatggggagaaagatggaggactcactgcacagccgcttcctagcagggagctatactccaactcctacttgagttcctgcggtctccccgcatccacagggagggtaaaacacttagcttttattttaatagtacataatttaataccaaaaaaggcgcctggatccccaaaaaaccgaggctgggagctagtggcccttttgctttctaggacttggggggccggccctccctcctaagcataacaaaggtggtgttgctccagctcagccccaggggacacagatgcactttgggggtgagggcaggtaatgactccatcgcaccctcagttcagctggacagaggctcaggtgaccccagccttcactgtctcccgctctccaggagcttatcttcgccccatctcccaaataagtgggcccttgtgctgtgaggaagaccaaagcctcagggaagataagagatatggagatgggagggggaggacaaggggcagagagtagggtctagctggctatctctggccttactaacacccccctggaggcatgccccttttctccagcacacaagcacattggggcacctggaaatattggttccaggctcctgttctctggacttcagatcctgggggagcccctcccccccctgaatccctggcttagctaccttcctgcctgtgcacct

SEQ ID NO: 25278 - DNA, 1444 bp, Homo sapiens
  source 1..1444: mol_type = unassigned DNA
ttgcgctccccaagtctctctcgtgcgcagagcccaggctgcgcttccctggtcaggcacggcacgtctggccggccgccaggatgcaggccccgcacaaggagcacctgtacaagttgctggtgattggcgacctgggcgtggggaagaccagtatcatcaagcgctacgtgcaccagaacttctcttcgcactaccgggccacaatcggcgtggacttcgcgctcaaggtgctccactgggacccggagactgtggtgcgcctgcagctctgggatatcgcaggtcaagaaagatttggaaacatgacgagggtctattaccgagaagctatgggtgcatttattgtcttcgatgtcaccaggccagccacatttgaagcagtggcaaagtggaaaaatgatttggactccaagttaagtctccctaatggcaaaccggtttcagtggttttgttggccaacaaatgtgaccaggggaaggatgtgctcatgaacaatggcctcaagatggaccagttctgcaaggagcacggtttcgtaggatggtttgaaacatcagcaaaggaaaatataaacattgatgaagcctccagatgcctggtgaaacacatacttgcaaatgagtgtgacctaatggagtctattgagccggacgtcgtgaagccccatctcacatcaaccaaggttgccagctgctctggctgtgccaaatcctagtaggcacctttgctggtgtctggtaggaatgacctcattgttccacaaattgtgcctctatttttaccattttgggtaaacgtcaggatagagataccacatgtggcaagccaaagatctatgcctctgttttttcagtgagagagaaatagcaaatgttctttctatgctttcctcaccatcatcacagtgtttacaaacttttgaaaatatttagtctgttacaaacttctgtcatgtagctgaccaaaatcctgcagggccacagtcggcactgttatttgcttcttttaatcagcaaaggcctcaagtcttaaaataaaaggggagaagaacaaactagctgtcaagtcaaggactggctttcaccttgccctggtgtctttttccagatttcagtatattctctgatggcctgacaggcctattaagtagatgtgatattttctcccaagatgacctccattctcggcagacctaagagttgcctctgagttagctctttggaatcgtgaacacaggtgtgctatattgtccttgtcctaactgtcacttgccatggcctgaatgttggcttaactgaatattgtatgaaaagacatgcctccatatgtgcctttctgttagctttctctgactcaagctgtggggctcctctatacatgctatacatgtaatatatattatatatatttttgcaagtgaacaataaaacattaaaagat

SEQ ID NO: 25279 - DNA, 3505 bp, Homo sapiens
  source 1..3505: mol_type = unassigned DNA
ctcttacagatagtgcggcggcccaggcgtcgcgtctacgcgggggattacagtaacccggttgtcagtgatgagtcagagtgcgtggtgctgatgctgctgccatttcatcacctttgcgagcgcagcatccatccctccgctctcccggcgcctgggcctacccagcttcgggctcccaggccagcgatgcgctcgcggctgagctagatcctgccgagccgcgctctctgaggcgtcggcggggcgccccctcccgccgtccccggtccgggccaaggagacctgcagagccgcggccatggaggccatctggctgtaccagttccggctcattgtcatcggggattccacagtgggcaagtcctgcctgatccgccgcttcaccgagggtcgctttgcccaggtttctgaccccaccgtgggggtggattttttctcccgcttggtggagatcgagccaggaaaacgcatcaagctccagatctgggataccgcgggtcaagagaggttcagatccatcactcgcgcctactacaggaactcagtaggtggtcttctcttatttgacattaccaaccgcaggtccttccagaatgtccatgagtggttagaagagaccaaagtacacgttcagccctaccaaattgtatttgttctggtgggtcacaagtgtgacctggatacacagaggcaagtgactcgccacgaggccgagaaactggctgctgcatacggcatgaagtacattgaaacgtcagcccgagatgccattaatgtggagaaagccttcacagacctgacaagagacatatatgagctggttaaaaggggggagattacaatccaggagggctgggaaggggtgaagagtggatttgtaccaaatgtggttcactcttcagaagaggttgtcaaatcagagaggagatgtttgtgctagtcagttcttttatttccaaaacatgctctcctacttgaactgaaaagtaagagaaataaatagaatctttgtgtaactgatgagaactcaacctccatttggataccaagtgagcctccctctcagggggactctgacagactcgtgtgcgggtggatgggggtgcctgagtgctgtgaccaagggactgaattgctgacatgggccaggccaggcactgttttgtggcccatgctaggcagtggctgctccatgagccctttgtggaccacatgttaaaggcctggggtttaggaagctaagtcccaggaaaacatacctacagacaggacaactgttccttggtatttgagctcacttataggccatgaacataaagaaatacataaaggggaaaaaagtttcacaatggggacaattagcataactaaacaaagattatgagctctacttattccgtgagaataccctgcaccaaaggtgtttgctgggtttggttaaaaggtaccaattagcttttaacagctttctgtaaaatgaggaacacagaccaaaaggtctggtgttcaagtaaaaatgatgtgactatggaaaggaaggcaatcgacacagttattagcacatttcagaaaatgaacacccttgtgatagaattaccagctgtatgaaacaaattgtcccatgcaaattaccctataactaggaaagagacactataacccaaatgccataccccctttttcctttgaccatgcctggggtttcaatgccttggcacctgcaatctggaagtaaacagtctgcttgcttcttcaggcacgtgacagtgacaacacagtgactgcctctgaaaagagccctgaggcaaacactctctcctgctgaacaggaggcactgtaacccttacaaacagcttacagttacttgggctacttatttgatcatcataacaggcctacgaggtttttgccccattttacagaatagtaaactaagagccatgaaaatcacttggccagggtcaaggactcgtgactcctagctcttttcactgcatcatactgctgtcagatgaataaatgattatgaatttgtttacttgggaagagatatgactataaataaatgttctctacatgttaggatatgttttccttattgattacaactcagctataatcctgagggaacatgggaaggaatcaaaggtaaagcccattcaggcattattgacaagagggctttaaacaagtgaataattgcacaactaaaaagacattagaactgtgtgggctataagtgttcttatcactgagacacagtggatttttattgaaaggaaccacgtacagcaatgcggagtgggatagggataaaatacccaccccaaaatgaccttggccacctgtctgccatatacgtacactgagttcctgtctacccaagagagtcagcccttaattctcaggtgaacaaacagctaactgcatcagcaaattggaatggctggcttgaagtttccattattttcttgaagagaggtgatgctttaaattactttttggattgtagccagttcagctaggcaaaagccatacttttcacaattaaaaaaaaaaactattctgactagagtcaggtttctcatatccatcgtgataggaaggcctaagaatggcaaatcgctttgagatataatattgaacttcagtatgaatgtgaccgaatctgaaactttgggaatttgctttagccagaataaagaaaccaaatcatgaaaattatggaagactattctgccacctgtgccccaagttggatgagcaaaccactttggatcagttcacagcattaactacaagtgaactgatcatcttctctatattcatttcacaagagctggcttaggtggggtaattaaattgccaccttcgtggttgtaaaagacaaacaaaacatggcaaatttcattaacacaaaatttcatcaactgctatactgaattatgtttagaagattctgaaagcaagattatccagtgggtaaatgagagtcgactggattctgtcagttcaaaaaaggaaagaaacaaaacttccctacaattttcttcactaaaatttattatatgtacagtattcccactcctggcattttctggcaggtttaaaaatattcagcataaatccagcagaggtggctgagcttaattgcttaaataagttctagaaaatttaaaaatcattttagtagaattcagtaccattgtcactgcaataagtgggttttagaaaataagtgtgaaaagaatcaggtgttaatataatactaaggataaagctttagaagctattttactacataggtaaagaaaagataaactaacttgtaacaaagaccacaactgcatgttggattagattgtctcatatttcagaataaaatgtactgtatacttttcctcactttgttgtgcactgtaatgaaatgtgaaaaatgctttatttagctgtatgtgaatgaaaatatgcttgtatttagtaaaatgattgattatgtga

SEQ ID NO: 25280 - DNA, 1483 bp, Homo sapiens
  source 1..1483: mol_type = unassigned DNA
gaggactgcaggggcctgagccgctgctgccgccgccgccgcgcagccccacatcaacgcaccggggtcctgtcaccgccaccgccaaaaaagtcaccgccgctagggtcgccgttgcatcggtgcagggcaagatggcatccgccacagactcgcgctatgggcagaaggagtcctcggatcagaacttcgactacatgttcaagattctcatcatcggcaacagcagcgtgggcaagacgtccttcctcttccgctatgctgacgactcgttcacgcctgccttcgtcagcaccgtgggcatcgacttcaaggtcaagaccatctatcgcaacgacaagaggatcaagctgcagatctgggacacagcagggcaagagcggtaccggaccatcaccaccgcatactaccggggcgctatgggcttcatcctcatgtatgacatcaccaacgaggaatccttcaatgcagtgcaggactggtccacccagatcaagacctactcatgggacaatgcccaggtgctgctggtaggaaacaagtgtgacatggaggatgagcgggtggtgtcatcagaacgtggccggcagctagctgaccaccttgggttcgagttctttgaggcaagcgccaaggacaacattaacgtcaagcagacctttgagcgcctggtggatgtcatctgcgagaagatgtccgagtcgttggacacggcggaccctgcggtcacaggcgccaagcagggcccacagctcagtgaccagcaggtgccaccgcaccaggactgcgcctgctgagagccatcccactccctttcccctcttccctgtcttccccaccttcccccaactacccgggcctgacccggcccctaccagccacgggcacaagacccctgctcctgacttagcccgtcacccttatttattattgtagctatttatttatttattgaagatgtcccccaggggcccaggctcccctgcccgccccaagccctgcccctcctgtacatatagccctttccccactcagctgtggtgtctcgtggccccgtgaactcaccgctcaccctcctgaaccccccccccccgcctttttttaaaattcacccccatccacagttgtcagttgtgaagaggggccagatgacaccctaaagcaggctgatcgggcaatgggaggtggccaggcctgccagcccctcggctctgccgcggtgggccgaggccgctgttgggggtttccctgtgtggaccatggggatcagagtctggcctgccaggctcctctccccgttttctcttttggtgggggggtgtgctgtgggtattcaccaccctgggaccccccccccccccgcccaccagacctgttctgacctcatgagtgtcaaacgtgccccccagttccttaggagatgtcatgacaacactacacgcacccaataaagcgaatggaccatccatgtgtgtccctgtga

SEQ ID NO: 25281 - DNA, 12844 bp, Homo sapiens
  source 1..12844: mol_type = unassigned DNA
agactccgcccttgggcggggcctggatgcggccggagcggagcagtgctggagcgggagcctcagccctcaggcgccactgtgaggacctgaccggaccagaccatcccgcagcgccccgccccggccccctccgcgccctcccgacgccaggtcctgccgtcccgccgaccgtccgggagcgaacccgtcgtcccgcactcggagtccgcgatggcttcagtgacagatggtaaaactggagtcaaagatgcctctgaccagaattttgactacatgtttaaactgcttatcattggcaacagcagtgttggcaagacctccttcctcttccgctatgctgatgacacgttcaccccagccttcgttagcaccgtgggcatcgacttcaaggtgaagacagtctaccgtcacgagaagcgggtgaaactgcagatctgggacacagctgggcaggagcggtaccggaccatcacaacagcctattaccgtggggccatgggcttcattctgatgtatgacatcaccaatgaagagtccttcaatgctgtccaagactgggctactcagatcaagacctactcctgggacaatgcacaagttattctggtggggaacaagtgtgacatggaggaagagagggttgttcccactgagaagggccagctccttgcagagcagcttgggtttgatttctttgaagccagtgcaaaggagaacatcagtgtaaggcaggcctttgagcgcctggtggatgccatttgtgacaagatgtctgattcgctggacacagacccgtcgatgctgggctcctccaagaacacgcgtctctcggacaccccaccgctgctgcagcagaactgctcatgctaggcaaggcccaccttcctgacctcccctcattgtggccccacacccagtctgcttctccctgttacacactgtccgctctcagcccactctccctgttacacactgcccacactcagagcaagatgagttgctgctattctttgcctgcccctggggttctctgcagatggtcccagtaatagatactcagcactagactaacataacaggtcactacacgggtgcagaatcactttacaaaagaagactctgttttacgaaggggattcactacagggacttagagaacagtctcttttctgcctttaaaatgagagttcctccatttaccaaaatttgacacgcacacattcttcaggggcatgccaattgcgtaaagtgaggctcgcctgcatagctaatcctgttaaagacaacttctcaaagcacaacgtgcttgtttcctatcgggctccctgcggggctttctctcactacaagtcaagcttgggctctcaaagccctgcgcctgttaccacggatgcccacagggcctgggcagttgctgtggcgacaggaagagctaatcttcagagagctcagactctctaatgatgctgaaggagcaaaggctgagtcagaaacacacttaagagaaaaggattggccgggcgcggtggctcacgcctgtaatcccagcactttgggaggccgaggcgggtggatcatgaggtcaggagatcgagaccatcctggctaacaaggtgaaaccccgtctctactaaaaatacaaaaaattagccgggcgcggtggcgggcgcctgtagtcccagctactcgggaggctgaggcaggagaatggcgtgaacccgggaagcggagcttgcagtgagccgagattgcgccactgcagtccgcagtccggcctgggcgacagagcgagactccgtctcaaaaaaaaaaaaaaaaaaaaaaagagaaaaggattatcccctacaaaatgtcagaggttcctgctatatgaaagagcaagtaggtatgctcaagaaagacaaacagagaaaaagagaaacaggcaagatcaagaaacagatcatgagtttctgattttgctgctttccagttggttcttaactgtgggaacttagtgaaattggttattagttcttagactcctagaacctgaggattttagatttgacgggatgcccaaatttacctagtctgactagtcagttctaaccttcctttttctgacaagtgactgtcaagcctaacaatcaaatctctttcttttaaagcacaccttctaggcagggacaggagctcattttccacaccatctttgtcaactctcatagaaagttttccttgtatcgagctcaaatctgcctcctggaaattcttcttcttcttccctccctgttggtaccagctctgctgtcagagacttcacagtctgtgctccctctgccctgtgacgtcttcagactatttgagaacaggaatcatgactcctgggacttgccttttctctaggtcaaatacctctataattccatctgctgttcttcatagggtcttctccctatcctgcccttttcctccaatccatcttttaactgctcttgagcagtctaactgagaagtatgattcaaagcaaaataaatcttaaggtggcatgactctgaaaaaattgagaaaattgaactcagagatcccgatcccaacccctttctcctgggagtgaaaccttagtttctaccagagagtgtgggaaaccacttctggtggaagccccttaattaaatacctgaggaaaaaaataaaagaaactcagagaccagaataaattagctcattattctagcttgcttggccacagggacatattttgttttggctgaaataatgacatggaactggcagtgattccagaaaacctttcttctctatcatggcctgaatcctcagccacctcaaaagtcagcgggcaggaggagtctctcgccagttttcttttcatttcaaatgaggctcattgtcctagaaaagtaattaactagcaaccagtccaatgactaaataaaaggaccatccagctgtggctcacacctgtaatcccagcactttggaaagccaaggcaggaggaacacttgaggccaggagtttgagaccagcctgggcaatgtggtcaaattctatccctacaaaaaaaaaaattagccagatgtgatggtgcatgcctgtagtcccagctacttgggaggctgaggcaggaggattgcttgagcccaagaatttgaggttgcagtgagctgtaattatgccactgcattccagtctgggtgacagagtaagaataagaccctgtctctctgtctctctttctctctttttttttttaaaggagtcagctctacaaagatgttgctttctttgatgcaatgcagagagcagagctttggacttggaatcaggagacccggactctgtcattaaatcaactgtgactctgggccagttactttccacttttgagtcttgatttcctacttataaaatgagggagcttatttggatgatctttaaggtctcttttggcactaataactcggtgtctcttttttttcaccttcaccatttcagttgatccaccaaacaaacctgagagatcaggattggcatccaagagttgtctcggccaactctgatgtcatgcttactctgtactagacattgttccaagcattttacgtgcattaactcatttatcttcccaacatcttgtgagggaggcactatagtgagcctcatttgaagatgaggaaacaaaggtacaaagaggttctagctggacctctaaagtcacataataagtaagtggtagagctggagttcacatccaggcagtaggctccaaggtctgtgctcttaaccacattctgggctgcatcttttatagacaaactatgatccagagagattacgagacttggatcacataccaagagagtgttaaagccacattaggattcaattccagggccatcagattccaagtccactggagaaaagatgtatatctctaatctgttaacaaattgctcaactactcagactaatcccaggtgatggatgtctaatgctcaggaaaggcgagtcagtctctgaggcaacagatcccatgggcctgggtagaaaatgcccagtgcttcccagtcccaagtgctggctttccctgtatctgcctctgccaggcaacacttatcaggctcccaatcagcaggagcctccatgctccactttgaacagcctctatgctccagcaatggggcatttgtgaagagtgacttgattaacttttctgaccatgggtataatacagttgcttcagagggcagtggttctgggtgtgatttttacactgtaacattgtatacagtgtcatggataattactatttttttctggtcattaacactcacctactctagtactaggatttcagaccaaggtcctcatgacgcctggatattttagtatctatatccaataatcttttctctcctactgaatatccaggcaaagatgaaatcgttttctttaaaactgtcaaattctgtaaaactcaggagccagttcaagggaacaagcatcttcacaatagatggaatcaagagttaaatgttatagtggcaagcttgtctactgggcaacagacaaccagacctgcttgtgagatggcagctccccagccctgctctgtgacctcatttctgtcaaatgaaaggcagcagcttccagctgattgcagcatagtgttcatcaatcacagtaatagcgcaattagccaccaaggttcaagctgtgtaatatgtgttagtggcaacttgtcctggatttaatcttcctcaacaatccaaataaaatatttaaaaactcttgacttctggctgggcgcagcagctcatgcctgtaatcccagcactttgggaggccgaggtgggcagatcacctgaggtcaggagttcaagaccagcctgggcaacatggtgaaacccccatctctactaaaaatacaaaaattagccaggcgtggtggtgggcacctgaaatccctactcaggaggctgaggcagagaatcgcttgaacctgggaggcagaggttgcagtgagccgagatcgtgccactgcacttcagcctgggtgacagagcgagactccatctcaaaacaaaacaagcaaacaaacaacaacaacaaaaaacacctcttgacttctaaagacgcaaaagtggccaaaagtgcaatacagtattgtgtttatttacatctattttaaatgcatgtgtatctgtaaatacaaagtgattcgtgactcattgtctcctcagtctatagcattattaacttctaggagcagcagtggagtagagtgtactgaatggtcacagactcatcgattatcagatctggaaaggagcttagagaagatctgttccaggctcctattttatagaagggaaggttgacatccaaagaatggaaggaaatctcctaattattctgagagtatcacagtgatggagccaggactaggtcctggatcacctctaagaagacacttagctatttgactatcgactagggcctagcattattaagcactagataaatacagatgaaaaaaaaaatgatccctgcctgcaaggtcctatgatctaatggagatgctgtttctaaaatattattatcccaatttggcagtcaaggaaacagccctggaaaagttaacatgctcaagtcacccactagcatcatttgaaccctcctctgtctgactcatgctctttcaaatttttttcttcagattgtcttagcagaagggtagatgggatataccctctggtagtaccaggctcccaaggattcttagagttaaataacctcagttaattaaatagccacaattgcttggtgaccgaagccttataacatccacagaataagaccattctccagacctgactccccaactcatatcacctgctcctgccggccactaagctccttgcttggatatcgagttttctggagtatcctgaggaatgtttgtttgactttgtttgccaacagtttaggggaaggggaaagaactacaataaccagtgtcctgggatctcattgatttcagattccctgccccaagcctacacccaattacctgccatagttggggaatcaagtagcatcctgtggctggaagtaaatgcaaaacactagtccgtgagatataaatactgttaaatgatggttttttaaggtcctgatccattatatgaagtagacaaaattcaaatttatttattcatttattttctcaacaaatgaatatatattatgtgccaggatacaagtagtggcaaattagacacagttcttgctttcatgaaacgtatagcttcatgatttagtatagacattgtcaaatcatcacccaaatataattacaaagtactctaaaggaaaggcacgtgatgctgtgagaacactcaactgggaaaccggaatcacctttgagaaactgtttcaggggctcttggaagagtctactgctcccaaatatctctgctacccactggccattgctttacattcctcaactaagctttcaccttttagtactaacctttgatgactgatcaaatacaaatgccccaagaagactgaggataggagaaagaatatctctacctgtgaaacattgttagactgcctggctaggagttcattgttgttttctgaaggacgtaaccaaccactccaaaacttacaggcttaaaacaacaaacatgtatcatttcttatgattctgtgggttggctgggtggttcttctggctgaggcaggatggtctaggatagctacatccacatgtctggggtcccagctgagatgactggggctgttgaggcctttctccctgtggtgtcatcctccagaaggctgcccagatttgtccatatggtagcaggagtttcctcgaagcaagagagggcaagatccaacacagaagcacttttcaagctctgtttccatcacatttgccaatgtctcactgatgaacacaagttccatggccaagtccagttttaagaaatggagaaatagggcttggctcagtggctcatgtctgtaatcccagcactttgggaggccaaggcatgcggatcatttgaggtcaggagttccagaccagcctggccaacatggtgaaaacccatctctactaaaaatacaaaaattagctgggtgtggtggcgggcatctgtaatcccagctatttgggaggctgaagcacaagaattgcttgaacccaggaggaggaggttgcaatgagcctaaatcgcaccactgcacttcagcctgggcgatagagccagactcagtctcaaaaaaaaaaaaggggagggggaaatagatgccatctctttatgggaggagctacaaaatatggtgaccaatttttcaatctaccacaggaagcaccctcagtcctctgaaactaagtctggtagatgtcctggggtcttaaaacatggctccgatgatatcaccaaagacaagtggcaaaactgtatagggcagggcagtcttatcatttgtttaatagtgatccaaaggatttactttggaggaatcaagacactcgagatgaagaagttttgatgcttgttaaacagtccatttggatacctcttagctatccccgagggatgaatctgacttctcatttcacaggattcaccgtagataatggttgtaattcctaccggaagttcctggccagaagcccagcagaaagattcagtatatatagaaaagatggctccaagaacagttgggccttctgttctaactgtacttccttctttgatgtactcgtctagtcccgaggctttagatgccaagtctttgataataacgtgtatctaagtgcctactggacattttcatgtctcaaacttaacatgtccaaattgaaactcttgattctgcccccaaacttgtttgaaccccagtcttcacagaaaactcatccttaattctttgatttttctctttttctcagcctccttgtctaatctagcagcagatcctagggttttacttctaaatatatctcaaatctgatcatttttctccattttcattggcatgaccttggtccaggccaccattgttttctgccctagagagctaccacagagttcctaacatttccctacttacgtaattactccactctagtccattctgtctcacaggagtaacattttttatatatatatatatatatatatatatatatatatatatatatatatttttttttttttaatagagacggtcttgctatgttgcccaagctggtttcaaattctggcctcaagcgatcctcttgccttggcctcctgagtcactaggattgtacgtatgagccaccgcatccagcctcaatggcaatctcttaaaaatctaaataaatgaacggctcagtaacactgaggtttacttcacacaaaaacaatccaaaccttggcaagacggtgaaaccctgtctctacaaaaaatacaaaaaattaactgggcaaagtagcctgcacctatagtcccagctacttgggaggctgaggtgggaggatcgattgagccctggaggtcaagaatacagtgagccatagccatgattgtacactgtgccactccagcctgggtgacagagcaagaccctgtccccctctcaaaaaaaaaaaaaaaagaaagaaagaaagaaaaaaaagaagaaaaggaaagaaatgaagagaattcagagacttccattattattaatacctattttattgattctgtttctagccctgagtccgctcctaacttgctataggatctctggtaaatcatttcctgtaataagcagctgtcacctctctccttgtttcttccagaaatagtaatctcttctttagtagtactactactccctaacccaaaccaggtgattctagtgaagactgtcaataaacggagcatgtgatcaagcagggcccatcagaatccttccctaagatttttataaaaagctggacctattctttttccatttgagtggcaaatatttgaagatatgaggtctaaagctgtgatggcttattctccatccctgtgtaaattctggtctatagtaagcgaaaacaaggccattaggcagagggcagcagagacataaggtgagaaagagtgtggtctctggttttctagaccctgattctggtttggaggcttggctgatcacctcttcctttgattctgatagaaagctcaatgtatctttctaataaaacccccctttgctttgcttgttggagttaggttcttatcccttgcaaccaaaaatatattgtctcttcttttgttctcagttttctcatttatatatccttctagctccaaagcacagaaattctaaaacaaacaaacaaacaaacaaaaacaaacaaaaaaaacctgggtcattcagaaaatcccactgatatagactttctgatccagaatgtataatctgaaaagaagcctaccctcgtctccatcctctcttcttgtacctgaaggaacgaagaagagggatttctcaaggtgagaagcagttctccatggacactgatgacagcacaggcaaagtttcctatgactagggatcactgtccacacagagtctggcttcccaggtatccagcaggtagacaaaacagctaactccactgccactcctttctccacatccgttcctatttctcagccatctcagtgacatccgccatcttgagagtcaactactgactggactgagttgtgtggtatatgcttctgtttacttctcttctgtcttttttaagtggccaaatagcaaacgcttaaataggaaatctctgggagacttgaataaaagactttgcttggtagaaaatcatgtcacagaaaggctaatagacagcaaagtaaatcagcaagtccctgagcagtaggattaggattcctgtctcctttcagattcaaatgcatctgtttctggggttaacagtggactgttaagaggctgtgcagcttgggttaagtcattcttatctctgggcttcaggagcttagaccagatagtttctacaggctctcttggtgctgatgccttgggattctgtggctgttttctgtaagatctgcaagggggaaacaggattttggcagcaatcctttcattactaaagcttcctttcttttcgggtacagtgaaaagagccaaggctgtgtgaccccctcatcacttagccaggcgtatggtcctggtttctgaggctgccagaaagcatcttagcaatttgtgtttggatggtccatgcctgactattctaggctggaggttcctaaagagtaacaagaggaagagaaacaagaatctctgacacttgttgagaatagagcacagtcccatttgtttgaaaagagacaccaggcagccatgtttatgtgccagaaatgcattccacctcaaggaggacttaatttatggacccgtgtgtgccaggctgagctgggcaagatctttctcaggacaaactctgccatgcagctaaaagcctggaaactaaaggatttcatgtagtaaactatcttccaacccctgtagacatcagaccacaggatgaggtttcagaaggtcataaggcagaatagttaagcctacagggcttacagtctgacagacctgggttcagttcttgggtcttcatcactagttttgtgacttcgggaagatgactcccggagcctcagtgagcctcagttacttcatatgtaaatgaagtaatactatctacttcacaaggctgttgaaaggattaaatggagaatgggtgtaaaacccttagtgcagtgccgtgcacacacagtagatgccgaacgtgtgatgttggcactacacaatgtgtaatcccaatcaggcagagctaggcaggcaaatctaatccaggatctttgtaaggggactgagaaccagagactggagaaagccagtgtaaacaccatgagcaaaggagcaagagaaggggcattgtgtaagtaggagatggagcttgaacttactaagtggatcagggtagaagaatccagtcaggaccaagggaggagagtccaggaaaatgccatgagcagctctgtagcatgaccttgttgggctgggttaaagtagggtctgccaccagtcatgtgacagaaaggtacctcatgcacttcctccttcccccagaaatcagcctccaggagtgaggaatgagcccagaatgagagtttagagtgctccagagcctttgttagaggtgccctccgacattcagaaaaccaggattccagagacctgggtttgagtcctgactttgcagcatactaactgtgtgatcttgaaccaacatattttcacctaatgaggctgacaatcttccctacttcacaaaatagttatgagagtcaaataaaagtacattttagaaagtgaaatgctgtggacatttaaggtggagccactgtgagagtctagggggatagatggtattcgtctcagaatgaaacgaatacacccctctcagagccctttccaaggatcccctccttctttcagctccttccctccacctcaatacacactcctgtcccaggaacctaacctcatctagaaataccagggccagcatgccttacacctagaggtttggttggcttcagagaaacttctggaggctaaaagcagccaagaagaatcagccactacatgctgggcctggatgaacagagcagtgagctgtgatggggctggggctggggcccaggaggagcaggcaggagagtttgtatgcaccgtgattcaaatattataacaaaaatcatcgatcatgtgttaggcactttacagttcccaaagcactttcccatccatgccctgatgatctttgacacaacactgtgatgtgggttttattatttccagtacagatgaggaagactgaggcctgcatcagtgaagcaacctatccaagactacatagagaaggcagtaaatggcagggttagtctcagaacaggggagggtctgttccccccgcagtgggcagtcctaattctgaacttcacctatctgggggtgatagaggggaacaagaggaagcctgctgaagagaaaacctaaacatctgttttgtctacgtatgacttcctctgcttgtgggagagaaggaaggaaaggaacacattgttgtcagccccacaaccccaacagaattaaaccctggagcaggttgaacagcagaggcttccctcagatcaaggagccaggagcagatgatctatctctgtggccacacagagagatgtcaccttatgcaatttgcatatcatattcaattcccccaactgctctttctaatttattcaactggggaccaggctggtctcatgccaacctaggagatgtaccatagcagtatgagcagaattcctcaggaggaacaattagcaaaaactgcagttgcctctcgataggcctgagcagagagaggaacaatagctctcacgtctctcctcatcagattctaactaagcagatgttctcatgcttttttcttcttcctatgttctgtatactgacacctcttctcagtggcatatgaaatatgaaatgtcatgtgttgtgagtttgtataaatataaaggaatatatatacacagtagcaaaagagaagatctcatttacaaatatctatggtgtttccttgttctgtgttgatctgttttattgatacaaactgaattttcttaatgtatcttctatctctattatagtggcaatgatggtatatgcattaaagttcttctgaattgtg

SEQ ID NO: 25282 - DNA, 1283 bp, Homo sapiens
  source 1..1283: mol_type = unassigned DNA
cctggatgcggccggagcggagcagtgctggagcgggagcctcagccctcaggcgccactgtgaggacctgaccggaccagaccatcccgcagcgccccgccccggccccctccgcgccctcccgacgccaggtcctgccgtcccgccgaccgtccgggagcgaacccgtcgtcccgcactcggagtccgcgatggcttcagtgacagatggtaaaactggagtcaaagatgcctctgaccagaattttgactacatgtttaaactgcttatcattggcaacagcagtgttggcaagacctccttcctcttccgctatgctgatgacacgttcaccccagccttcgttagcaccgtgggcatcgacttcaaggtgaagacagtctaccgtcacgagaagcgggtgaaactgcagatctgggacacagctgggcaggagcggtaccggaccatcacaacagcctattaccgtggggccatgggcttcattctgatgtatgacatcaccaatgaagagtccttcaatgctgtccaagactgggctactcagatcaagacctactcctgggacaatgcacaagttattctggtggggaacaagtgtgacatggaggaagagagggttgttcccactgagaagggccagctccttgcagagcagcttgggtttgatttctttgaagccagtgcaaaggagaacatcagtgtaaggcaggcctttgagcgcctggtggatgccatttgtgacaagatgtctgattcgctggacacagacccgtcgatgctgggctcctccaagaacacgcgtctctcggacaccccaccgctgctgcagcagaactgctcatgctaggcaaggcccaccttcctgacctcccctcattgtggccccacacccagtctgcttctccctgttacacactgtccgctctcagcccactctccctgttacacactgcccacactcagagcagagctttggacttggaatcaggagacccggactctgtcattaaatcaactgtgactctgggccagttactttccacttttgagtcttgatttcctacttataaaatgagggagcttatttggatgatctttaaggtctcttttggcactaataactcggtgtctcttttttttcaccttcaccatttcagttgatccaccaaacaaacctgagagatcaggattggcatccaagagttgtctcggccaactctgatgtcatgcttactctgtactagacattgttccaagcattttacgtgcattaactca

SEQ ID NO: 25283 - DNA, 8888 bp, Homo sapiens
  source 1..8888: mol_type = unassigned DNA
agtacgcgtgtgcggcgccaggagaggacagctccagtgctgatgttggagccggttagcgaaccccaagagtgcagagtgtggagcgtggagcgccgggactgtgcacgcttgaccggaagcccagaccagtgcggtcctagccagagagaaaggacatttgccaacaatgagacacgaagcgcccatgcagatggcctctgcccaagatgccaggtacggccagaaagactcctctgatcagaactttgactacatgttcaaattactcatcatcggcaatagcagtgtggggaaaacatcttttctattccgttatgcagatgactcctttacatctgcattcgtcagcacagttgggatcgatttcaaagtaaaaactgtattcaaaaatgaaaagagaatcaagcttcagatttgggacacagcaggccaggaaagatacaggactatcaccacagcctattatcgtggagccatgggctttattttaatgtatgacattacaaatgaagaatccttcaatgcagtacaagattggtcaactcaaatcaaaacatactcttgggacaatgcccaagttattctggttgggaacaagtgtgacatggaagacgagcgggtcatctcaactgagcgaggtcaacatttaggagaacagcttgggtttgagttttttgaaacaagtgccaaggacaacattaatgtcaagcagacatttgagcgccttgtggatatcatctgcgacaaaatgtcagagagtttggagactgatcctgccatcactgctgcaaagcagaacacgagactcaaggaaactcctcctccaccgcagcccaactgtgcctgctagtgtccccgtgcacacaggcagctccagggggctctggttgccaacaaacagcatttgtaaatggtctattagccttcatttatactgcctaacaattatttgaaggaataaattgatgtcaatggctcgtacgcattcaattcttgggagctttcctgtttaatatgtggcaaatatgtgatcttaaatttataaggactatccatctataaacatctggtacctgcatgtgacttgttatttatttgtctgctaggctctttttgtttcaaatttgttctcagactacttctgggacatcagactataatctcactacaactggcttttgtcccattgattcaaattatgctattcacttgtaggaatgatgaccaaggaattgcttgtgtgtgtgtgtgtgtgtgtgtgtgtgcacgcatgcccgcatgcgtgcagaggaagaagtcacaagacttcatttgctttactcttagttgaaaatcaaatggaagtttttctcatgattagggacgctgtcacgagtctggtcagtttactgttgggaactgtgtctttatttcactgttattaataactgagatcattggcctataaagaaattgaaatgttgtttttaaggtccttgcaattttcctaagtcattaatattacctgactggggctatttaacaataatcttcgtttacacatttaaataagcaagtatctacccaggactgctttttccactgatccttcccaattctgtgaatattcaacatcattgaacagattgagacatatctactgaatgccagttatgcaacaagcattttaaccaagaagggtatgagtagctatggaattccaaggtccaagcccccttatttttcaatgacttgccttccccaacccccataatgcacaccaccaccaccatcactttctggaaccatcaccaactcttggactagagcttatgttgaagcttgttagggctcctctttccgtaggatgtagacttgcctccccaaacacggccatcttctcaaacctcagctaagttcttttacctgtttagatgctatttaaatcagatttcaaagggtccccagttgagaaaaaggaaaattttaatctttaatcatctttttaagtccagatgttcataaattctaaagcatattcctattacgtgaatgcttaagttacacaggaaacattctataactgtagtatttcaatttcagaaatatttaggatccatagcaatttaaaagagggaggaaaccactggagcattctaattttgtatcacaaacttcctaaaggacctatatgaataaagagaaaacaacaaatcctaccagctgtacagagagcaacagggaaatttggcctctgtatcactgtccagcattatttaaagctaggatttaggaaggaagcaggaattatttggcagatttggaaggatagtttcgttaagtgaactttctacttttttggtggttatgtcaaagaatttttttcctcttctcaaaaatagagaggcttcccatgaaagtattggatgcaaatgaaacaggcatacatctaaagatatctttggagaataaatccttacaagtcacagaactaggtcacacacattagtaagtcaaaagttggaaattaggggagagagcatttggaatgctttaagcatttccatgttatttctcaccttcctagttgaagatccactaatcagtagtacatttctactttggtgccctacaaagcaaaccttagcatagtaaagacaagaaaacattaatgttttattagtttttaatggggcaaccaacttcaaaatcacaggaattacagtgacgggagagaaagaagcaggaggcataaaaacagatttgtttgtagcagtagtctgtttgtacaatgttataatatttctgtaacttgggccagaatgtggccatgttaaatgatatagctattaagctcacttttacaatctaaaaggaactaataaagccaggaaacccttctcatcctccttcacagccctcatcccacacatagatgtaaaaagcttagaaagaatattctgatggctttttcagaaggaaggaccttgatgtgtgtattgtggtaaaatgaaaagcaaaatgagacagtatttaaaagtgaaagagcagagttttgctctgctgaaaaccccttccctgaagaactgattgctgttgaagttaattggcccttagatgggaagccctaagccaagctcccacttacacagtgtcaaacatcccgaagtggaaacattttatgccagtcaggggagagacaggcaacaatagcccaaatgtcattgccaagaaacatctgatactttctaatttctaaaccccaatggaagtgaggcctttttcattgattctcagttctgaaactcccaccctgttaggatttccattccaaataattcaatgagaggtttccagagaaacagtcacagagctcaagagaaagaacacttaaatgctcctgctgtaattgcatcaaaaaatccgggttttaacatcaaatttggcaaatggtgggaccaacccaaggttaactaagtgggctttcattggcattgagctatgttacttataaattataacactatagttccaaggtttttcagccttttggccaacacacacacacacacacacacacacacacacacacactataccatcatctatcaatagtctaaatacataaataaatgcaggtcatttttatcaatggcctaactaaatttatatttaaaagaacaagacttttaaaaagtacatactcctgttggtttgtaagttatacacatttatctcttgtctttgatttaattaaattagtgttttaagtatgaatttattttcctttgctactcattacctgaccactttcactcctctagatacccttaggaataaacctgaactgttccaaatcgattcttccaagagctttggtgttggtaccttcctttcttttcctaatgcaactgaaaaattagactgaaaattatttgacttaaatagccatcctcagagtgaatcagcatttcagtttttggagatggggatggaagtagaaggtgcacaaagcgtcctaagatggcagtttgaatgttagcatcgcatctacatgctcataagaggaattgcttcaggacaatgaatcagttcattgttgctgcccccagtgaacagctccaactgccttgatgaacttctaatgactgtgaaagctaggaggttcttctagttcctccttagggtcacttgaagttcagtatttttttgctgcctggtaactaagtgctaagatttttacttggaaagaaaactatgacaatgccttcagttgtagcagaaagttgtggcattgtgataataaacaaaatctacaaagttacaacccaaattatacaagacatcaaaacactcagtaaacaaatatatatatttcacctacttaaatcttattcatattaattataggccttttgtttagtacactggttattttttaaggaaccaatttaaactttcaattttaaatacatctatgctgacgatagactttcgggtatatacaaccttcttcttctcttttaaaagttaaatacattccactattaactgaacttccatgaagcaacattaattttagagcatggtagtccataatcagtggttcattgtgatgtgctttatccaacatgtatcttagtgcatggttgaggatgtactatgtgatattttagttaacagtgtggcatttgtgggactatattaaaagcatatccaaactaccaagctataccaagctgaggtaggtaacacctgcatgtgaaaaactgtgatatgaatcttatttataaaaaagtcataactaaaacccttctagaccaaaaagttactgtgtgtttgttaataatcttcatagtactactggaatgctcaatcagttatttttggtgtggcatacttcagagctggcctgtccgtctgaagaaccctttctctcacaattacagtttgcatgactagaacccggaactctgttcctttgcgtgtatagtcacttagtgtgctgtccgggtgccacatgagcaactacacccatgtggcctttctgtcactccctggaaaatgcaacctctacagctctgctcagctctgcctgtgtgcattgattaccttcgctttagtagtttgcctgtaaaatggtgaagtctttctgatatgctgaacctttgagccagcttttgggagttcttcatattttaggtgaatttttgaccaaagtcaattaaagacataaacctgttttatatcatggaatttactgggccaaattaagtaaaagatgaagtttatgaccagaataaaaaagcctttacccctgcacagcactgtatctaaagggctctaggttgtagaaatatagtaccccctaacagggaaaaaccaagttgggggatttatctaaaatgtatctacctattgttactggtatttcacaaataatttttttcttaaaaatatttacagaaatgcttgacactccggtcaaataatatttccctttgatagattgaaatatttgcttttagattacacatacagtgctgcccttctcaacagtcactcacacgctcactcgcctgtacaaaggtatcaggcaaacactgatacttttttttaagaaggcaaaattccatctatggtgctttctcagtgctagggaaaagggagcttttactatgttccagctataactcacatcttacttataaggtccataaaatcggttcttcacactgatttcgtttgattagtctgtgcatgtaattaatttcctccaaacagagagagtggaggggaaataaattttgcaagcattctagataacagaaatgagtcattttaaaacctcactcagagctcgagtgttaagatcagaccatctagctagtggacaaattgaactttctatttgcagttctcttttactttctgactttcttttaaattactgcagtttttcaaaacactatcctcatggaatgacaggaccaagaatagaaaatgagactcaaatttcaccatttacttcccatcagcaaccattactggtggagtttcaaacagtcattacttgctgaaatgaggtttgaggttacctgtgtatttcattcacctgtgttaatatttccttcatcgtggacaagtgagagttggctgtggctttatttcttgaggcaaattattttgcattcatgttatttggggctaggtattgcttaggttcgtgaatgctgttcttacagacacagatggtacctgagcccctcagacacctgccctttcagggacgtgagcatgacttacatctgtcaagtggttccatacttcttgtaaaagtaaagtttgggtattgtttgctgtatcaatatgatggctttccatgcattgtctcattatccctaggatacgtgctaaaggaaaactgtcctgtaattcctgttaatatattgttaatgtcagacgtgatgtgataccgttagactgtccaaatgtacaacaatttaatggtgtttgtagaactgatatgtcttaaatgttgcatgaaatatgttataaaaatagatttgttttctattttcaacacctcagaattgagggttcatgggccaataagtgcaatatttaatgactcactcagtgtatataaactagtatgaaagagtgaattataatgaatgtgtgagatgctttgatagctgtgtgacttattcaaatgattttcttgtagctgtatttgtctagtggtgcaatttatacagtaaatatcttattggtgtcatgtaaaacccctctgtgcctacttcaaaatacttttttcttataaaaccaaacatttagtatctggaaatatgtgtcaattttatctcttagaattgtggattttattgtcaagacagaatggctgttcatttattttataaaagcatctccttctataactcaaaattttctttaagtgtcatataaaagtgtacattttacttttaagcaactaatttagatacctaagaaaaactatgtgcattaggaaaagtcatgtttttcttctcagaaaggttgatcacatgacatgtctactaagaattttcacctctgtacttgtatgtatattttattgttactcaatcttgtattttatttacaaattcaacactgtcaaccctgggaattctaaaataccaatgtatttttaggttgtagctaatgttgtattcactttcaattctcagttgtccacactggtgatataagaggaacaaatcagaatcattaaatactttgtaatgccatcataaactcatatattcatcctcaaactcccttgtttaatgctaattggtggcctggaacttcactgagatgcaaaatcaagaactgaagcctagttgctagataacgaaaagctataaatgtttatgtatgtgaattttaaattagaataaccgtcttaaactcctacttgccatttctaaggcaaagcattcattttaatattgtactttgccttttcattcagttagtggagtaagtcatgaaacccttaggaagaaaaacaagttatgacttattcactaaaattgatgcaagacagttggttctagatgaccatggccatgtgttcatcatataaaaccttcagttctctctatggtgcttggctggagattgacatgtgaggatgtgccaatcatattaaatggatttggtctatgtgggtgatatgtggcctgaatgtaactgtgatagactgaaatttgttcttagctctcaaaatccactgaagaagtcaagtgaaggtgggtaaaatagggagattagtgacaactttgtgccaaattttttaaaaaatggaagcaggtagccaatattagaatgataatttaagggtgtggttgaattttagttagttgtcacatagttattgaacctcatatgctcagtgctgtgggaatcaaacatggaagaggtatggctcctgcccctaatgagaacaagggggaaaaatccagatataatctaaatgctaggttatgtcagggtataggaacacagagaatgggggacctgtaagaactggaagagtcagagagggctccattgaagaggtcaaacataattccggaaagaattaggtagtgaggagattgtgccaggaaaataagtgggaaaggccacagttatgtttcctttgaatggaagagagacaaagctatcagctatagatcattgttttcttaagacagccaaactggccctttgaaaccattcaaattaccccagtttagctccctaccttttagtctccgtgaggaagacaagctgttgcattatcatattcctctgtgctgagcagctcaagactcagccacaatatgcaaattgctttaatgccatattacggcagttgatttagacatttgccagtgcaccaaaccatgagagattgtccgacctaatgccacctggcagatgtgtacccagagatttttctgtagctccatgtttcccataaagggcattggaaatgcacagatgaagatcttcctttggaaccaggcacatttggccccttctcagtgactgcactgtggaactcttcttaagaaaatattgaaaacagcttaatgctttcatatagtgaccgacatttagttgaaaactactgctgcatagcaaatattgtgactcttcatgtgtccacaggagctcttgtgtgggtttaaagctatgaagtgtattcacattgtgaagttttaattatctttattgaaattaattgtgtaaaaatggtatgtgctctattaggtattcagtttgtatgtgaattctataaagaaagtggtttttgttctttgagtttgttttatttcttgaagattacaataaatatctaagagactata

SEQ ID NO: 25284 - DNA, 1029 bp, Homo sapiens
  source 1..1029: mol_type = unassigned DNA
cgcacaaccttgctggtctggcccaggcggggggcggggccagcacgatgagcgccccgggcagccccgaccaggcctacgacttcctgctcaagttcctgctggtgggcgacagggacgtaggcaagagtgagatcctggagagcctgcaggacggcacggccgagtccccgtacagtcacctggggggaatcgactacaagacgaccaccatcctgctggacggccagcgggtgaagctgaagctctgggatacgtcggggcagggaagattttgtaccatattccgctcctactctcgtggtgcacaaggagtgatcctggtctacgacattgcaaaccgctggtctttcgagggtatggatcgatggattaagaagattgaggaacatgcccctggtgtccctaaaatcctggtggggaatcgcctacatctggcattcaagaggcaggtgcccagggagcaggcccaggcctacgccgagcgcctgggcgtgaccttctttgaggtcagccctctgtgcaatttcaacatcatagagtctttcacggagctggccaggatagtgctgctgcggcacaggttgaactggctcgggaggccgagcaaggtactgagcttgcaagacctctgctgccgcaccatcgtgtcctgcacacctgtgcatctggtggacaagctcccgctccccattgccttaagaagccacctcaagtccttctccatggctaagggcctgaatgccaggatgatgcgaggcctctcctactccctcaccaccagctccactcacaaaaggagcagcctctgcaaagtgaagatcgtctgcccaccccagagcccacccaaaaactgcaccagaaacagctgcaaaatttcttaaggaaggcaccaaaaggaaacaagctggaatcgctccaggaaaaactctgaatggttacacctggaagagggaagatgcattctagattcaaagaaatacgttttcagtttctcatgggaacaatgctgcttgggaatgtgtgtga

SEQ ID NO: 25285 - DNA, 2966 bp, Homo sapiens
  source 1..2966: mol_type = unassigned DNA
gccggacggagggtggagggccctgcgcctgcgcggagctggagtccggctgggccgcagccgctgggagaccggcggttgccgtggggaccggtcgggcccctccctcctccggtcccccgccccaggtccttccccaccgagacgcgccggcggaccgcgggcgagtgcagccggtgacccggcgagaggcggcgccgctcccaagatgtcgcagacggccatgtccgaaacctacgattttttgtttaagttcttggttattggaaatgcaggaactggcaaatcttgcttacttcatcagtttattgaaaaaaaattcaaagatgactcaaatcatacaataggagtggaatttggttcaaagataataaatgttggtggtaaatatgtaaagttacaaatatgggatacagcaggacaagaacgattcaggtccgtgacgagaagttattaccgaggcgcggccggggctctcctcgtctatgatatcaccagccgagaaacctacaatgcgcttactaattggttaacagatgcccgaatgctagcgagccagaacattgtgatcatcctttgtggaaacaagaaggacctggatgcagatcgtgaagttaccttcttagaagcctccagatttgctcaagaaaatgagctgatgtttttggaaacaagtgcgctcacaggggagaatgtagaagaggcttttgtacagtgtgcaagaaaaatacttaacaaaatcgaatcaggtgagctggacccagaaagaatgggctcaggtattcagtacggagatgctgccttgagacagctgaggtcaccgcggcgcgcacaggccccgaacgctcaggagtgtggttgttaggagagcacacaggtgttcatacagtggcatttgggacacaatcgttggaacctgaagaatctgaagttttttttaccaccatctttttctactctgtatggaagtagatctttatggggaaaagagaatttggggtgttctgcaagccagtcaaagtggcacagcaaatcatataaatcgaattaaatggacaacaccgttagatgtgtatgtaaaaattttctgtttcatatttttcctttcactttcggtttaaaacatgctatatgtactgtatgtcctgtagcccagtgcggctccacagcatggaatctgatgtatgatatgatagaatgtggcactaaatgcagtttcagattttattttttttaatcatatgaactaaaattgtcaattgtgaggtgtgcttttctcatcatgttggttatattgcacaattggttatatttatgacctgatattcaaagactctggcattgatagccagtgtgttttcttatttaactccgtttactacattctacatggtgtttacgtgatccacacttgaaatactagatcagtagacattcactaatataccaaaataaaatgaaaaattgagtttttccgtgaactttatactgtccagctctgttgattttaaagcctcttcatccaggtcagttcaggaagtatatctggagtacctgctctgtttttggctgtgagactagcactaaggattctggtacctttacccaaacctactgggctactaatacttctctcagcagttgatcaaatacaatagaccatgtaagctggggccgctcatccacttccagtttgctggtctccctgctagaaaacacattgtactgtgctttttctggaattcagtataatggcatcactgcctgtttttcacatcttttgtttcctgttcattttaaggaaacctactaaatccagttaatattaaatggacaccactcattaagaaatttctttatggcttctgctgaatacttaaatgccttactacagttatccagttgacatgtttttaattcatataaggtatattgggtatattgaagtatatattgtattacaaagacttgttcttgtattttaaaatgtcagtgcaaaaaatatatggtggaacctttctttaaagttgaaatgcagtattatttaaatctgaaaggttaaaaagctttcttcaccttatatatgttcttccactgtgactttttagttgaagactagtaaattaacttttagttagaagatgcctactgcttttgttgtttattttaatcagcagagcacagagacacataaaaactctgggaaatgactaggataaaaatatcagtatgtatctgttttagatattttgagttttgctttttttatgccttgaatattttatttcaaaaagtatctgaagcaaattctcagactgaactacttcttagacctcactgtaagaatattttattcaatgtctcatttatgatagatttgcaagctgctcatttttgaacagctttttgcatgggataggagcatgtctattctaacacatcagcttattcaaaagcaagaattttaaaaataagataaatgtaaagttgttttataaacgatcctgttaattaaaccacagacaccatatatccttctgcatcctttggccaataaaagttgctggagaaccaaaccatggtggttcttaatcaggctttgcctttagggagaatgaggaggagagataattgggtattgttcaggctagtaataaatgtcatgtttctatttcccgcaactcattaagttttcaggaagctcttaatttagatttctaggaaagtaattattcagtcttcctagaaaaagattataaagaccatttaaactggagattgtaatttattcttttacagtccagcatttaagtgaaaatgagaacatcacaatttgggaatctgtaatggttttgttgaaaacattacttgtggcttgtataagagtggctgaattcaagaacattgattcttagcagatcaataatagtatttaaagaatctgatgctaaaattagaaacctaaa

SEQ ID NO: 25286 - DNA, 2536 bp, Homo sapiens
  source 1..2536: mol_type = unassigned DNA
gaagtgacgaagtggcgcagttcgctgcgtgcagcgacgtggcggcggggccggcaccgggcagcggaagtggctccggcggtgggacttgagtgtttgtgttttggttcgtgaaggagccggcggctggccttaggggaggaggcagagggaggaggaggaggaagaattagtcggaactccagcgccggcggcggcggcggcggcggaggaggagaaaggaaagaggaagggggagcggcgagaggcggagacggagcccgacaggggcggcaccacggcacgagccccgcacagtccagtgtgaggggagcggcgctaagagcaggcgacgccgccgccgccaccaccaccgccatagatacactctcatcctacgggccacgcctgggccttgctgccaggaagcttcggccccgcagctcggcttgctgcggtctcaggtttctttacctccagaaagaagaatattggccccttgaattctggaagttcattgaagagtctgaaattagggacttatttcaaatttggacatggctagtcgaggcgcaacaagacccaacgggccaaatacgggaaataaaatatgccagttcaaactagtacttctgggagagtccgctgttggcaaatcaagcctagtgcttcgttttgtgaaaggccaatttcatgaatttcaagagagtaccattggggctgcttttctaacccaaactgtatgtcttgatgacactacagtaaagtttgaaatatgggatacagctggtcaagaacgataccatagcctagcaccaatgtactacagaggagcacaagcagccatagttgtatatgatatcacaaatgaggagtcctttgcaagagcaaaaaattgggttaaagaacttcagaggcaagcaagtcctaacattgtaatagctttatcgggaaacaaggccgacctagcaaataaaagagcagtagatttccaggaagcacagtcctatgcagatgacaatagtttattattcatggagacatccgctaaaacatcaatgaatgtaaatgaaatattcatggcaatagctaaaaaattgccaaagaatgaaccacaaaatccaggagcaaattctgccagaggaagaggagtagaccttaccgaacccacacaaccaaccaggaatcagtgttgtagtaactaaacctctagtttgaactagctggaatagtcttctgcttcctaaatgttaataacaatggaattggagcatttaaccagcccagtatgacttccaaaagaagagacttatgatagagtcaagtttctaatacagaattattttaagtgttttgaacttaatttttaataacatgcatgggtccctctcactaatgtttcaacaatagggaaaaatgagaactatgtggacacttgtttcattggaaggttagggggaataatttctcatcactaggaatatagacaaatgactgtctgggcccacacagttaaccagcccatttctccacactggtacagtagtcacctgtgaaaaaaaaattggaacttactaatttgggcttttcaaaaacattctttgtttagaaggagattctaaagttatttatgatgcttagccatagtattcaggcaaatgttcatttctcctggtacctgtatttaaaatgtacattccacattttaataaattaaccacaagaaaataatcccacatatacaaggtcaggggtggggaagagtattaatggtatcttaattatacccagtctggttttttttttttaaatggggtaaaaatcaaatgcaaccccatcttgttttaggaattttgagaactaataaatgcaccttaatggtcagtgttcctttcaaacatgtgagttctttaacaaaaatgaaataaaccaggtgtctgtgatttctaattaatcaccgctggccattacacaggttttgttgtttggggtggggagggggcttttgttcccttttgacataatatagtcaatgcactaacaattatgtatattcaaacttgattattttaaattcgatcttcagctgtactgtaaatagggtactgcattgtagtctccatatctgtattacttttctgtaatatttaagagttgcttaaaagcatacaaaatgtactgttactaaaacagctaattatttctctctccccctttgacaggaaggggcttcagttgttcctccatggctagaaccataataaacaatgtacccgtaatttgtaacataaagtattgcaatatgttagtaacaatcttgcagccttcctttccaaagttcattttattttgatcagttcagtatattgcactaattattttaggtattttcattatatgaaagctaccatgtgtcagagatgatttaatctatttaagtgttggactgctaggagaacttgtacatttatgataatgcagaattaggaaaacggttcaccagtgtttagttttatattgaggtgctcaggttggaataaagtggtataaaaagcaa

SEQ ID NO: 25287 - DNA, 1443 bp, Homo sapiens
  source 1..1443: mol_type = unassigned DNA
aggcgacgccgccgccgccaccaccaccgccatagatacactctcatcctacgggccacgcctgggccttgctgccaggaagcttcggccccgcagctcggcttgctgcggtctcaggtttctttacctccagaaagaagaatattggccccttgaattctggaagttcattgaagagtctgaaattagggacttatttcaaatttggacatggctagtcgaggcgcaacaagacccaacgggccaaatacgggaaataaaatatgccagttcaaactagtacttctgggagagtccgctgttggcaaatcaagcctagtgcttcgttttgtgaaaggccaatttcatgaatttcaagagagtaccattggggtaaagtttgaaatatgggatacagctggtcaagaacgataccatagcctagcaccaatgtactacagaggagcacaagcagccatagttgtatatgatatcacaaatgaggagtcctttgcaagagcaaaaaattgggttaaagaacttcagaggcaagcaagtcctaacattgtaatagctttatcgggaaacaaggccgacctagcaaataaaagagcagtagatttccaggaagcacagtcctatgcagatgacaatagtttattattcatggagacatccgctaaaacatcaatgaatgtaaatgaaatattcatggcaatagctaaaaaattgccaaagaatgaaccacaaaatccaggagcaaattctgccagaggaagaggagtagaccttaccgaacccacacaaccaaccaggaatcagtgttgtagtaactaaacctctagtttgaactagctggaatagtcttctgcttcctaaatgttaataacaatggaattggagcatttaaccagcccagtatgacttccaaaagaagagacttatgatagagtcaagtttctaatacagaattattttaagtgttttgaacttaatttttaataacatgcatgggtccctctcactaatgtttcaacaatagggaaaaatgagaactatgtggacacttgtttcattggaaggttagggggaataatttctcatcactaggaatatagacaaatgactgtctgggcccacacagttaaccagcccatttctccacactggtacagtagtcacctgtgaaaaaaaaattggaacttactaatttgggcttttcaaaaacattctttgtttagaaggagattctaaagttatttatgatgcttagccatagtattcaggcaaatgttcatttctcctggtacctgtatttaaaatgtacattccacattttaataaattaaccacaagaaaataatcccacatatacaaggtcaggggtggggaagagtattaatggtatcttaattatacccagtctggttttttttttttaaatggggtaaaaatcaaatgcaa

SEQ ID NO: 25288 - DNA, 753 bp, Homo sapiens
  source 1..753: mol_type = unassigned DNA
agtcggaactccagcgccggcggcggcggcggcggcggaggaggagaaaggaaagaggaagggggagcggcgagaggcggagacggagcccgacaggggcggcaccacggcacgagccccgcacagtccagtgtgaggggagcggcgctaagagcaggcgacgccgccgccgccaccaccaccgccatagatacactctcatcctacgggccacgcctgggccttgctgccaggaagcttcggccccgcagctcggcttgctgcggtctcaggtaaccgaaccgcccctcctcctgcgcagcgggggcctggaccccaggttatccgcggtccccagcctgtccgcggccctgccggtactgagaccccccaccccttctccctcacgcgcagcagtgccctggaccagagaactatcgaacccggcgtcttgttctgccagccctggtgactcatcctccaggggctctggagaccgggatttggggactgactgagggagcgacgggtgtcaccctttcccttctcaagatggcgccgtggaaagtgtactggaggccgcggttccgcctggtctccgtcctggcagtcctgggggtctcggtcaaagcaaggtttctttacctccagaaagaagaatattggccccttgaattctggaagttcattgaagagtctgaaattagggacttatttcaaatttggacatggctagtcgaggcgcaacaagacccaacgggccaaatacgggaa

SEQ ID NO: 25289 - DNA, 3362 bp, Homo sapiens
  source 1..3362: mol_type = unassigned DNA
aatcgagctattggctggagccccgccccagggcgaggaggagaaggaggggcaggagggtttggttgagctgcagctgtttgtctgttcgacacaggcttggggccgacgggggagacggagccccaggagtgttgaagcctggaaatcccctccccttccccctcccccctttacagtatccccctccctccaccctttcccattctgataatctggccatgactagcagaagcacagctaggcccaatgggcaaccccaggccagcaaaatttgccagttcaaattggtcctgctgggagaatctgcagtgggaaagtcaagcctggtattacgttttgtcaaagggcagttccatgagtaccaggagagcaccattggagcggccttcctcacccagtccgtttgtctagatgacacaacagtgaagtttgagatctgggacacagctgggcaggagcgatatcacagcttagcccccatgtactacaggggtgcccaagctgcaatcgtggtttacgacattactaatcaggaaacctttgcccgagcaaagacatgggtgaaggaactacagcgacaggccagtcctagcatcgttattgccctggcagggaacaaagctgacctggccaacaaacgtatggtggagtatgaagaggcccaggcatatgcagatgacaacagcttattgttcatggagacttcagccaagacagctatgaacgtgaatgatctcttcctggcaatagctaagaagttgccaaagagtgaaccccagaatctgggaggtgcagcaggccgaagccggggtgtggatctccatgaacagtcccagcagaacaagagccagtgttgtagcaactgagggggtggctagcagcaaacaagtatggagctagcacaagagctaagaaataacctccatccctacccctcagcacacaacccctacggtaacagcacactgagccctggctcccaagggctgcctcctgacagctccgtcatggcactttttaacgcttcagcaacaaacaccaggcagctgttgccactggcctcctaccccctactctggggcttgggggtcaactccccccaggacttaccttccaaaacaaactttcttcactttgtattataggtacaagacagcgacttacgtatcttttctcctcctccctagtgttcctccccattttttcagaaaacacttctgactcctgtcccttccccttctgcttttggtcagtccctgttcttgagcctcttttctcctctccccaggatgcagaaagtggtgaacccaggaactgaggaaggaggtttccagttcatttacattaagggccctgggggagaataaagctcagagcaggagggagtaaggaaacatttcctttttgtttttatttggttggagtttctcatatttgaaaacattgcggtatccatgatttggccttgtggagggtgttcctaggtagaggtgagaatggggaggcaagatctcaggcaccaggcaggaggtgccttgtaagctaactgggcggaggtggaggtgcagtgtcaactgtggctctgtaactcttcaaaggcccagtttcccctcacgcagcctcttaggtagcgtttcccctaatcgtgggggttggaccccagagtcttccaaagaattttcactggttgcctgcatctttggctctgctgtgatctgattggaggagggacagtttctggtacccatcctctgatttatacatatgcattttttcccctctggcctttagatggcctcagccccagccaccatatacccctgcagtttgcactttaattgatggtagttcagttggggtacttgttttatggaagttttgattgatttacttgccctcccaccttctttttaattcaatgaaatctgaggttaatgcgaggttcgaggagaggttatagataaaactaccagtggcagctactcaagtcctatctccactgttagcttcctccaactctaattattaacctatattcttgccaagctaactattgactataggtttgcctttcctggagaattaattgagcaattgaggagtgtctcaggatagcacaggccaaggtaggggagtaaaaaggaggtcaggcaaaagggaggagttttctgtcctttcccaggtttcacactcaatttgatatccattaccatgtcttttctacttccttgtaaataggtatgatctttattcccactgtacagtctgttctatcctctgcctcccatcaggccctgtttctttgttcctttgttaatatcttgaatttagtccctccatccttaatccccccatccctccccatcatgcaaccagtggtttaatccatgtaccaataggggctagtaccacagaggcctcctgtggtgccctcgtatcataccacctgttcctgtggagagggaatgaccggcactgaaggtaccttacaactggctcatattatcagaggaccttggtcctttctaaatctctagtctctcttcatatccttcatcaggtgttttaagatgtctctgagaagccatcaaggcaaaagagaactttaagttccttgttccagcccggagttttgggaaagaaagaaaggaaaggtcacagtgacctaggattggaaccttcctgcccttttggcttgcagactgccttctatcccagaacagctgagaaatctatgaagctgagattctgaaggacccagcttaggttcttccacttaggcctcaattcccttccttttccaggggcagccttagttcccatggccctgaaacacacacatttcccccttcctttcccagaagccactggccccccatagcacccagtgcatcctttttacaagtggaagaactaggatggctttccaaagtcttctagaaatgaagttctttctctgtgcagctttcccccttggagcaggagtgaagatgtttcattatcttgggcctgggaaaccacttccccaggcttctccctccccccacccccataggaacaggatttggccttagcttctgggcctatcggctgccttccctctacttcctaccacctcttctgccttcctttgagctctgttgggcttggggatcttagttttcttttgtttatttcccagctcatttttttcttctggtcagtttttttaagggggggtgttgtggttttttgtttttgttttgcttctgagaaagcatttgcctttcttcctctcccaacataacaatcgtggtaacagaatgcgactgctgatttaccgatgtatttaatgtaagtaaaaaaaggaaaaaaagaaa

SEQ ID NO: 25290 - DNA, 1530 bp, Homo sapiens
  source 1..1530: mol_type = unassigned DNA
gacacaggcttggggccgacgggggagacggagccccaggagtgttgaagcctggaaatcccctccccttccccctcccccctttacagtatccccctccctccaccctttcccattctgataatctggccatgactagcagaagcacagctaggcccaatgggcaaccccaggccagcaaaatttgccagttcaaattggtcctgctgggagaatctgcagtgggaaagtcaagcctggtattacgttttgtcaaagggcagttccatgagtaccaggagagcaccattggagcggccttcctcacccagtccgtttgtctagatgacacaacagtgaagtttgagatctgggacacagctgggcaggagcgatatcacagcttagcccccatgtactacaggggtgcccaagctgcaatcgtggtttacgacattactaatcaggaggcccaggcatatgcagatgacaacagcttattgttcatggagacttcagccaagacagctatgaacgtgaatgatctcttcctggcaatagctaagaagttgccaaagagtgaaccccagaatctgggaggtgcagcaggccgaagccggggtgtggatctccatgaacagtcccagcagaacaagagccagtgttgtagcaactgagggggtggctagcagcaaacaagtatggagctagcacaagagctaagaaataacctccatccctacccctcagcacacaacccctacggtaacagcacactgagccctggctcccaagggctgcctcctgacagctccgtcatggcactttttaacgcttcagcaacaaacaccaggcagctgttgccactggcctcctaccccctactctggggcttgggggtcaactccccccaggacttaccttccaaaacaaactttcttcactttgtattataggtacaagacagcgacttacgtatcttttctcctcctccctagtgttcctccccattttttcagaaaacacttctgactcctgtcccttccccttctgcttttggtcagtccctgttcttgagcctcttttctcctctccccaggatgcagaaagtggtgaacccaggaactgaggaaggaggtttccagttcatttacattaagggccctgggggagaataaagctcagagcaggagggagtaaggaaacatttcctttttgtttttatttggttggagtttctcatatttgaaaacattgcggtatccatgatttggccttgtggagggtgttcctaggtagaggtgagaatggggaggcaagatctcaggcaccaggcaggaggtgccttgtaagctaactgggcggaggtggaggtgcagtgtcaactgtggctctgtaactcttcaaaggcccagtttcccctcacgcagcctcttaggtagcgtttcccctaatcgtgggggttggaccccagagtcttccaaagaattttcactggttgcctgcatctttggctctgctgtgatctgattggaggagggacagtttctg

SEQ ID NO: 25291 - DNA, 596 bp, Homo sapiens
  source 1..596: mol_type = unassigned DNA
cagctgtttgtctgttcgacacaggcttggggccgacgggggagacggagccccaggtaacactggatcaacaaaatgaagagctgagccaagtggtagaactctcatttcaagattttggtgacttgggtttaaacagagttggagagggagatgaaggagtgttgaagcctggaaatcccctccccttccccctcccccctttacagtatccccctccctccaccctttcccattctgataatctggccatgactagcagaagcacagctaggcccaatgggcaaccccaggccagcaaaatttgccagttcaaattggtcctgctgggagaatctgcagtgggaaagtcaagcctggtattacgttttgtcaaagggcagttccatgagtaccaggagagcaccattggagcggccttcctcacccagtccgtttgtctagatgacacaacagtgaagtttgagatctgggacacagctgggcaggagcgatatcacagcttagcccccatgtactacaggggtgcccaagctgcaatcgtggtttacgacattactaatcaggaaacctttgcccgagcaaagacatgggtg

SEQ ID NO: 25292 - DNA, 569 bp, Homo sapiens
  source 1..569: mol_type = unassigned DNA
gacacaggcttggggccgacgggggagacggagccccaggtaacactggatcaacaaaatgaagagctgagccaagtggtagaactctcatttcaagattttggtgacttgggtttaaacagagttggagagggagatgaagtgcggatcttgaaatcaattccgatggtggagatgagtgttgaagcctggaaatcccctccccttccccctcccccctttacagtatccccctccctccaccctttcccattctgataatctggccatgactagcagaagcacagctaggcccaatgggcaaccccaggccagcaaaatttgccagttcaaattggtcctgctgggagaatctgcagtgggaaagtcaagcctggtattacgttttgtcaaagggcagttccatgagtaccaggagagcaccattggagcggccttcctcacccagtccgtttgtctagatgacacaacagtgaagtttgagatctgggacacagctgggcaggagcgatatcacagcttagcccccatgtactacaggggtgcccaagctgcaatcgtggtttacg

SEQ ID NO: 25293 - DNA, 3322 bp, Homo sapiens
  source 1..3322: mol_type = unassigned DNA
gctcgtacttgttggtgacagcgcccaaagagactcgcctttctccagaggattggtggatgagtgcacatatagcccaccctcgaaggagtgttgaagcctggaaatcccctccccttccccctcccccctttacagtatccccctccctccaccctttcccattctgataatctggccatgactagcagaagcacagctaggcccaatgggcaaccccaggccagcaaaatttgccagttcaaattggtcctgctgggagaatctgcagtgggaaagtcaagcctggtattacgttttgtcaaagggcagttccatgagtaccaggagagcaccattggagcggccttcctcacccagtccgtttgtctagatgacacaacagtgaagtttgagatctgggacacagctgggcaggagcgatatcacagcttagcccccatgtactacaggggtgcccaagctgcaatcgtggtttacgacattactaatcaggaaacctttgcccgagcaaagacatgggtgaaggaactacagcgacaggccagtcctagcatcgttattgccctggcagggaacaaagctgacctggccaacaaacgtatggtggagtatgaagaggcccaggcatatgcagatgacaacagcttattgttcatggagacttcagccaagacagctatgaacgtgaatgatctcttcctggcaatagctaagaagttgccaaagagtgaaccccagaatctgggaggtgcagcaggccgaagccggggtgtggatctccatgaacagtcccagcagaacaagagccagtgttgtagcaactgagggggtggctagcagcaaacaagtatggagctagcacaagagctaagaaataacctccatccctacccctcagcacacaacccctacggtaacagcacactgagccctggctcccaagggctgcctcctgacagctccgtcatggcactttttaacgcttcagcaacaaacaccaggcagctgttgccactggcctcctaccccctactctggggcttgggggtcaactccccccaggacttaccttccaaaacaaactttcttcactttgtattataggtacaagacagcgacttacgtatcttttctcctcctccctagtgttcctccccattttttcagaaaacacttctgactcctgtcccttccccttctgcttttggtcagtccctgttcttgagcctcttttctcctctccccaggatgcagaaagtggtgaacccaggaactgaggaaggaggtttccagttcatttacattaagggccctgggggagaataaagctcagagcaggagggagtaaggaaacatttcctttttgtttttatttggttggagtttctcatatttgaaaacattgcggtatccatgatttggccttgtggagggtgttcctaggtagaggtgagaatggggaggcaagatctcaggcaccaggcaggaggtgccttgtaagctaactgggcggaggtggaggtgcagtgtcaactgtggctctgtaactcttcaaaggcccagtttcccctcacgcagcctcttaggtagcgtttcccctaatcgtgggggttggaccccagagtcttccaaagaattttcactggttgcctgcatctttggctctgctgtgatctgattggaggagggacagtttctggtacccatcctctgatttatacatatgcattttttcccctctggcctttagatggcctcagccccagccaccatatacccctgcagtttgcactttaattgatggtagttcagttggggtacttgttttatggaagttttgattgatttacttgccctcccaccttctttttaattcaatgaaatctgaggttaatgcgaggttcgaggagaggttatagataaaactaccagtggcagctactcaagtcctatctccactgttagcttcctccaactctaattattaacctatattcttgccaagctaactattgactataggtttgcctttcctggagaattaattgagcaattgaggagtgtctcaggatagcacaggccaaggtaggggagtaaaaaggaggtcaggcaaaagggaggagttttctgtcctttcccaggtttcacactcaatttgatatccattaccatgtcttttctacttccttgtaaataggtatgatctttattcccactgtacagtctgttctatcctctgcctcccatcaggccctgtttctttgttcctttgttaatatcttgaatttagtccctccatccttaatccccccatccctccccatcatgcaaccagtggtttaatccatgtaccaataggggctagtaccacagaggcctcctgtggtgccctcgtatcataccacctgttcctgtggagagggaatgaccggcactgaaggtaccttacaactggctcatattatcagaggaccttggtcctttctaaatctctagtctctcttcatatccttcatcaggtgttttaagatgtctctgagaagccatcaaggcaaaagagaactttaagttccttgttccagcccggagttttgggaaagaaagaaaggaaaggtcacagtgacctaggattggaaccttcctgcccttttggcttgcagactgccttctatcccagaacagctgagaaatctatgaagctgagattctgaaggacccagcttaggttcttccacttaggcctcaattcccttccttttccaggggcagccttagttcccatggccctgaaacacacacatttcccccttcctttcccagaagccactggccccccatagcacccagtgcatcctttttacaagtggaagaactaggatggctttccaaagtcttctagaaatgaagttctttctctgtgcagctttcccccttggagcaggagtgaagatgtttcattatcttgggcctgggaaaccacttccccaggcttctccctccccccacccccataggaacaggatttggccttagcttctgggcctatcggctgccttccctctacttcctaccacctcttctgccttcctttgagctctgttgggcttggggatcttagttttcttttgtttatttcccagctcatttttttcttctggtcagtttttttaagggggggtgttgtggttttttgtttttgttttgcttctgagaaagcatttgcctttcttcctctcccaacataacaatcgtggtaacagaatgcgactgctgatttaccgatgtatttaatgtaagtaaaaaaaggaaaaaaagaaaa

SEQ ID NO: 25294 - DNA, 1671 bp, Homo sapiens
  source 1..1671: mol_type = unassigned DNA
agatccggatccggagcggctgaaaggcggaagtggaggccggagcctgggacaccgccggcggggagagaagcggatcccgtccgagccccggccccaagtaacgccgccgccccggagccgccttggaggtccccctccccactaagtgcctctttgcatagcaccagtccccacccgcacgctctctggaccactacagctggacgggcaatggcgggtcggggaggcgcagcacgacccaatggaccagctgctgggaacaagatctgtcaatttaagctggttctgctgggggagtctgcggtaggcaaatccagcctcgtcctccgctttgtcaagggacagtttcacgagtaccaggagagcacaattggagcggccttcctcacacagactgtctgcctggatgacacaacagtcaagtttgagatctgggacacagctggacaggagcggtatcacagcctggcccccatgtactatcggggggcccaggctgccatcgtggtctatgacatcaccaacacagatacatttgcacgggccaagaactgggtgaaggagctacagaggcaggccagccccaacatcgtcattgcactcgcgggtaacaaggcagacctggccagcaagagagccgtggaattccaggaagcacaagcctatgcagacgacaacagtttgctgttcatggagacatcagcaaagactgcaatgaacgtgaacgaaatcttcatggcaatagctaagaagcttcccaagaacgagccccagaatgcaactggtgctccaggccgaaaccgaggtgtggacctccaggagaacaacccagccagccggagccagtgctgcagcaactgagccccccttgcctgcccgctgcccccgcctcctccgcctgaatgacccgactggaatccactctaaccaatcgcacttaacgactcgggccaccactgggggggcagggggaggggtccaccatgatttctccatataattttgatcataggccggagtgagtcattccacctgcacctttctgtacaaatactaattcaattttaagtcttaagtcacttttttaatatatatgatcttctgctcttcccacttcctcccctttctactgctctcccattttcccttgctgggagtagccacatgctcttgccccccaacccttgtatatggggacagtggggtcagtgcagctaccctttctttccctcctgcggaacagcggacccagcaagagcatccacatcctcactttgttcggagtggtctttggtttgggcggtggggcagaccttgggaaggggcttaggaagggagaggcagctcttccttcagctggctctcatcaggctgcagccccctccccgctcccacctccctgctgggaaaccacagcattatcacagcattattgtgacagccacgaacccattgcccacaacccctccaccctcggtcaccccaacctctggctctgagccctgttctgaccaaatcatgatgatgagtatttgggggtgggtgggtaagggggggagtgggaggggacggaaccaactttttctgtattttgtattgtatgttttcttcaacatgtaaccaatcagtatcttgtcaatatagtcagccgatcgatcgacctcacaa

SEQ ID NO: 25295 - DNA, 1771 bp, Homo sapiens
  source 1..1771: mol_type = unassigned DNA
gagcggctgaaaggcggaagtggaggccggagcctgggacaccgccggcggggagagaagcggatcccgtccgagccccggccccaagtaacgccgccgccccggagccgccagtctcgctctctcgccaggccggagtgcagtggcactatctcagctcagtgcaacctctgcctcccgggttcaagcgattctcctgcctcagcctcccgagtagctgggactacagttggaggtccccctccccactaagtgcctctttgcatagcaccagtccccacccgcacgctctctggaccactacagctggacgggcaatggcgggtcggggaggcgcagcacgacccaatggaccagctgctgggaacaagatctgtcaatttaagctggttctgctgggggagtctgcggtaggcaaatccagcctcgtcctccgctttgtcaagggacagtttcacgagtaccaggagagcacaattggagcggccttcctcacacagactgtctgcctggatgacacaacagtcaagtttgagatctgggacacagctggacaggagcggtatcacagcctggcccccatgtactatcggggggcccaggctgccatcgtggtctatgacatcaccaacacagatacatttgcacgggccaagaactgggtgaaggagctacagaggcaggccagccccaacatcgtcattgcactcgcgggtaacaaggcagacctggccagcaagagagccgtggaattccaggaagcacaagcctatgcagacgacaacagtttgctgttcatggagacatcagcaaagactgcaatgaacgtgaacgaaatcttcatggcaatagctaagaagcttcccaagaacgagccccagaatgcaactggtgctccaggccgaaaccgaggtgtggacctccaggagaacaacccagccagccggagccagtgctgcagcaactgagccccccttgcctgcccgctgcccccgcctcctccgcctgaatgacccgactggaatccactctaaccaatcgcacttaacgactcgggccaccactgggggggcagggggaggggtccaccatgatttctccatataattttgatcataggccggagtgagtcattccacctgcacctttctgtacaaatactaattcaattttaagtcttaagtcacttttttaatatatatgatcttctgctcttcccacttcctcccctttctactgctctcccattttcccttgctgggagtagccacatgctcttgccccccaacccttgtatatggggacagtggggtcagtgcagctaccctttctttccctcctgcggaacagcggacccagcaagagcatccacatcctcactttgttcggagtggtctttggtttgggcggtggggcagaccttgggaaggggcttaggaagggagaggcagctcttccttcagctggctctcatcaggctgcagccccctccccgctcccacctccctgctgggaaaccacagcattatcacagcattattgtgacagccacgaacccattgcccacaacccctccaccctcggtcaccccaacctctggctctgagccctgttctgaccaaatcatgatgatgagtatttgggggtgggtgggtaagggggggagtgggaggggacggaaccaactttttctgtattttgtattgtatgttttcttcaacatgtaaccaatcagtatcttgtcaatatagtcagccgatcgatcgacctc

SEQ ID NO: 25296 - DNA, 1167 bp, Homo sapiens
  source 1..1167: mol_type = unassigned DNA
gaagtggaggccggagcctgggacaccgccggcggggagagaagcggatcccgtccgagccccggccccaagtaacgccgccgccccggagccgccaggcttctagagataggctcctcatgtgtctgcaattccaaaacttaacaaaaacaaaaagttgagcctctgaagctgtcactaaccaagtgattcagatgtcgggactggaacaccagctgttggggatgcaggacttggtctctgccctcccacacctcctgcctcttctttctctccatcgccccatctctgccagtagagaatggaactgagttggaggtccccctccccactaagtgcctctttgcatagcaccagtccccacccgcacgctctctggaccactacagctggacgggcaatggcgggtcggggaggcgcagcacgacccaatggaccagctgctgggaacaagatctgtcaatttaagctggttctgctgggggagtctgcggtaggcaaatccagcctcgtcctccgctttgtcaagggacagtttcacgagtaccaggagagcacaattggagcggccttcctcacacagactgtctgcctggatgacacaacagtcaagtttgagatctgggacacagctggacaggagcggtatcacagcctggcccccatgtactatcggggggcccaggctgccatcgtggtctatgacatcaccaacacagatacatttgcacgggccaagaactgggtgaaggagctacagaggcaggccagccccaacatcgtcattgcactcgcgggtaacaaggcagacctggccagcaagagagccgtggaattccaggaagcacaagcctatgcagacgacaacagtttgctgttcatggagacatcagcaaagactgcaatgaacgtgaacgaaatcttcatggcaatagctaagaagcttcccaagaacgagccccagaatgcaactggtgctccaggccgaaaccgaggtgtggacctccaggagaacaacccagccagccggagccagtgctgcagcaactgagccccccttgcctgcccgctgcccccgcctcctccgcctgaatgacccgactggaatccactctaaccaatcgcacttaacgactcgggccaccactgggggggcagggggagggg

SEQ ID NO: 25297 - DNA, 500 bp, Homo sapiens
  source 1..500: mol_type = unassigned DNA
accgccggcggggagagaagcggatcccgtccgagccccggccccaagtaacgccgccgccccggagccgccagtctcgctctctcgccaggccggagtgcagtggcactatctcagctcagtgcaacctctgcctcccgggttcaagcgattctcctgcctcagcctcccgagtagctgggactacagttggaggtccccctccccactaagtgcctctttgcatagcaccagtccccacccgcacgctctctggaccactacagctggacgggcaatggcgggtcggggaggcgcagcacgacccaatggaccagctgctgggaacaagatctgtcaatttaagctggttctgctgggggagtctgcggtaggcaaatccagcctcgtcctccgctttgtcaagggacagtttcacgagtaccaggagagcacaattggagcggccttcctcacacagactgtctgcctggatgacacaacagtcaagtttgagatct

SEQ ID NO: 25298 - DNA, 583 bp, Homo sapiens
  source 1..583: mol_type = unassigned DNA
aaacccggctcagcctcccaagtcctaacctgctagccacgctggggaaggttgtgggtacctcgtgtggatcgtggctggcgttgcttcagattcttctttcctctgggtctgcaaccagctagaagcctggatagtcctgctgtgagtctgtcctctgtttctgtgtgctggcagtggttttcccttttgaggaagagctgtgttcttgagcctatggttggaggtccccctccccactaagtgcctctttgcatagcaccagtccccacccgcacgctctctggaccactacagctggacgggcaatggcgggtcggggaggcgcagcacgacccaatggaccagctgctgggaacaagatctgtcaatttaagctggttctgctgggggagtctgcggtaggcaaatccagcctcgtcctccgctttgtcaagggacagtttcacgagtaccaggagagcacaattggagcggccttcctcacacagactgtctgcctggatgacacaacagtcaagtttgagatctgggacacagctggacaggagcggtatcacagcctggcccccatgtactatcg

SEQ ID NO: 25299 - DNA, 551 bp, Homo sapiens
  source 1..551: mol_type = unassigned DNA
gtgggtacctcgtgtggatcgtggctggcgttgcttcagattcttctttcctctgggtctgcaaccagctagaagcctggatagtcctgctttggaggtccccctccccactaagtgcctctttgcatagcaccagtccccacccgcacgctctctggaccactacagctggacgggcaatggcgggtcggggaggcgcagcacgacccaatggaccagctgctgggaacaagatctgtcaatttaagctggttctgctgggggagtctgcggtaggcaaatccagcctcgtcctccgctttgtcaagggacagtttcacgagtaccaggagagcacaattggagcggccttcctcacacagactgtctgcctggatgacacaacagtcaagtttgagatctgggacacagctggacaggagcggtatcacagcctggcccccatgtactatcggggggcccaggctgccatcgtggtctatgacatcaccaacacagatacatttgcacgggccaagaactgggtgaaggagctacagaggcaggccagc

SEQ ID NO: 25300 - DNA, 3134 bp, Homo sapiens
  source 1..3134: mol_type = unassigned DNA
agcggccggcggggccgcaggctcgcgcccgggctcgccccgcgccgctccagaggctcgcgcactcagcaggttgggctgcggcggcggcggcagctgtggaagctcaggcgctgcgcgtgagaggtcccagatacgtctgcggttccggctccgccaccctcagcttctcttccccaggtctgggagccgagtgcggaaggagggaacggccctagctttgggaagccagaggacacccctggctcctgccgacaccgccctccttcccttcccagccgcgggcctcgctcggtgctaggctactctgccgggaggcggcggcggctgccagtctgtggagagtcctgctgccctccagccgggctcctccaccgggccttgcaggggccgagagagctcggtgcccgcccttccgctcgcctttttcgtcagctggctggagcagcatcggtccgggaggtctctaggctgaggcggcggccgctcctctagttccacaatgtccacgggcggagacttcgggaatccgctgaggaaattcaagctggtgttcctgggggagcaaagcgttggaaagacatctttgatcaccagattcatgtatgacagttttgacaacacctatcaggcaacaattggcattgactttttatcaaaaactatgtacttggaggatcgaacaatcaggcttcagctgtgggatactgcgggtcaggaacgtttccgtagcctcattcccagttacatccgtgattctgctgcagctgtagtagtttacgatatcacaaatgttaactcattccagcaaactacaaagtggattgatgatgtcagaacagaaagaggaagtgatgttatcatcatgctagtaggaaataaaacagatcttgctgacaagaggcaagtgtcaattgaggagggagagaggaaagccaaagagctgaatgttatgtttattgaaactagtgcaaaagctggatacaatgtaaagcagctctttcgacgtgtagcagcagctttgccgggaatggaaagcacacaggacagaagcagagaagatatgattgacataaaactggaaaagcctcaggagcaaccagtcagtgaaggaggctgttcctgctaatctcccatgtcatcttcaaccttcttcagaagctcactgctttggcccccttactctttcattgactgcagtgtgaatattggcttgaaccttttcccttcagtaataacgtattgcaattcatcattgctgcctgtctcgtggagatgatctattagcttcacaagcacaacaaaagtcagtgtcttcattatttatattttacaaaaagccaaaatatttcagcatattccagtgataactttaaaaattagatacattttcttaacatttttttcttttttaatgttatgataatgtacttcaaaatgatggaaatctcaacagtatgagtatggcttggttaacgagcggtatgttcacagcctactttatctctccttgcttttctcacctctcacttacccccattccctattaccctattcttacctagcctcccccgacttcctcaaaacaaacaagagatggcaaagcagcagttctaccaagcccattggaattatcctttaattttacagataccacttgctgtaggctacggaccaagatgtccaaaattattcttgagcactgatataaattacggtcttctttgaggtcaaaattcagccatcatggtaggcagtgcttgaatgagaaaaggctcctggtgcatcttcaaaatgagtcctaaagaacatactgagtacttagaagtagaagaacataagatgtatttctgactaaaacaaatggctctttcacatgtgctttattagactctgggagagaaaattaaccaagtgcttcagaacaggtttttagtatttaattcttcacggtaagaaaatgaagttctaatgaactgtttctcccaaggttttaaaattgtcaagagttattctgtttgtttaaaaaataagaaacctctttaagcaatagattttgcttgggttttcttttttaaaaacataatactgtgcaggcaaggcactgtaaaagttttaattccttccagaagaaccagtggaagaatttaaatttggcgctacgatcaaaactactgaattagtagaaataatgatgtctaaagcttaccaacaaaagaaccctcagcagaataacaaaaactttgctcaggacatttgaggtcaaattgaagacggaaaccggaaaccgttttcttgtaagcccctagaggcagatcaggtaaagcatacatagtagagggaaaggagagaatggaaataaaactcaatattatgcagatttatgccttattttttagcattttttaaggttgggtctttcaggctggttttggtttgtattagatctgtatagtttaattaactggtgatttagttttatatttaagctacaattaatcttttttctttggtgatatttatttctttgccttttttttttttaacaactttcaatcttcagatgtttcgttgaatctatttagagcttcaccatggcaatatgtatttcccttaaaacactgcaaacaaatatactaggagtgtgcccttttaatctttactagttattgtgagattgctgtgtaagctaataaacacatttgtaaatacattgtttgcaggacgaaaacttctgagttacagctcaggaaaagcctgctgaatttatgttgtaagcattacttaacacagtataaagatgaaaagacaacaaaaatatcttcatacttcctcatcccctcattggaacaaaaccttaaactgggagaaccttagtcccctctctttcctcttcctcctccacttcccacttattgtcaccttgtaatattcagagagcacttggattatggatctgaatagagaaatgcttacagataatcattagcccacataccagtaacttatacttaaagatgggatggagttgtaaagtgcttttataatacaatataattgttaaaggcaagggttgactctttgttttattttgacatggcatgtcctgaaataaatattgattcaatatggca

SEQ ID NO: 25301 - DNA, 3085 bp, Homo sapiens
  source 1..3085: mol_type = unassigned DNA
gctccagaggctcgcgcactcagcaggttgggctgcggcggcggcggcagctgtggaagctcaggcgctgcgcgtgagaggtcccagatacgtctgcggttccggctccgccaccctcagcttctcttccccaggtctgggagccgagtgcggaaggagggaacggccctagctttgggaagccagaggacacccctggctcctgccgacaccgccctccttcccttcccagccgcgggcctcgctcggtgctaggctactctgccgggaggcggcggcggctgccagtctgtggagagtcctgctgccctccagccgggctcctccaccgggccttgcaggggccgagagagctcggtgcccgcccttccgctcgcctttttcgtcagctggctggagcagcatcggtccgggaggtctctaggctgaggcggcggccgctcctctagttccacaatgtccacgggcggagacttcgggaatccgctgaggaaattcaagctggtgttcctgggggagcaaagcgttggaaagacatctttgatcaccagattcatgtatgacagttttgacaacacctatcaggcaacaattggcattgactttttatcaaaaactatgtacttggaggatcgaacagtacgattgcaattatgggacacagcaggtcaagagcggttcaggagcttgattcctagctacattcgtgactccactgtggcagttgttgtttatgatatcacaaatgttaactcattccagcaaactacaaagtggattgatgatgtcagaacagaaagaggaagtgatgttatcatcatgctagtaggaaataaaacagatcttgctgacaagaggcaagtgtcaattgaggagggagagaggaaagccaaagagctgaatgttatgtttattgaaactagtgcaaaagctggatacaatgtaaagcagctctttcgacgtgtagcagcagctttgccgggaatggaaagcacacaggacagaagcagagaagatatgattgacataaaactggaaaagcctcaggagcaaccagtcagtgaaggaggctgttcctgctaatctcccatgtcatcttcaaccttcttcagaagctcactgctttggcccccttactctttcattgactgcagtgtgaatattggcttgaaccttttcccttcagtaataacgtattgcaattcatcattgctgcctgtctcgtggagatgatctattagcttcacaagcacaacaaaagtcagtgtcttcattatttatattttacaaaaagccaaaatatttcagcatattccagtgataactttaaaaattagatacattttcttaacatttttttcttttttaatgttatgataatgtacttcaaaatgatggaaatctcaacagtatgagtatggcttggttaacgagcggtatgttcacagcctactttatctctccttgcttttctcacctctcacttacccccattccctattaccctattcttacctagcctcccccgacttcctcaaaacaaacaagagatggcaaagcagcagttctaccaagcccattggaattatcctttaattttacagataccacttgctgtaggctacggaccaagatgtccaaaattattcttgagcactgatataaattacggtcttctttgaggtcaaaattcagccatcatggtaggcagtgcttgaatgagaaaaggctcctggtgcatcttcaaaatgagtcctaaagaacatactgagtacttagaagtagaagaacataagatgtatttctgactaaaacaaatggctctttcacatgtgctttattagactctgggagagaaaattaaccaagtgcttcagaacaggtttttagtatttaattcttcacggtaagaaaatgaagttctaatgaactgtttctcccaaggttttaaaattgtcaagagttattctgtttgtttaaaaaataagaaacctctttaagcaatagattttgcttgggttttcttttttaaaaacataatactgtgcaggcaaggcactgtaaaagttttaattccttccagaagaaccagtggaagaatttaaatttggcgctacgatcaaaactactgaattagtagaaataatgatgtctaaagcttaccaacaaaagaaccctcagcagaataacaaaaactttgctcaggacatttgaggtcaaattgaagacggaaaccggaaaccgttttcttgtaagcccctagaggcagatcaggtaaagcatacatagtagagggaaaggagagaatggaaataaaactcaatattatgcagatttatgccttattttttagcattttttaaggttgggtctttcaggctggttttggtttgtattagatctgtatagtttaattaactggtgatttagttttatatttaagctacaattaatcttttttctttggtgatatttatttctttgccttttttttttttaacaactttcaatcttcagatgtttcgttgaatctatttagagcttcaccatggcaatatgtatttcccttaaaacactgcaaacaaatatactaggagtgtgcccttttaatctttactagttattgtgagattgctgtgtaagctaataaacacatttgtaaatacattgtttgcaggacgaaaacttctgagttacagctcaggaaaagcctgctgaatttatgttgtaagcattacttaacacagtataaagatgaaaagacaacaaaaatatcttcatacttcctcatcccctcattggaacaaaaccttaaactgggagaaccttagtcccctctctttcctcttcctcctccacttcccacttattgtcaccttgtaatattcagagagcacttggattatggatctgaatagagaaatgcttacagataatcattagcccacataccagtaacttatacttaaagatgggatggagttgtaaagtgcttttataatacaatataattgttaaaggcaagggttgactctttgttttattttgacatggcatgtcctgaaataaatattgattcaatatg

SEQ ID NO: 25302 - DNA, 3089 bp, Homo sapiens
  source 1..3089: mol_type = unassigned DNA
gccggcggggccgcaggctcgcgcccgggctcgccccgcgccgctccagaggctcgcgcactcagcaggttgggctgcggcggcggcggcagctgtggaagctcaggcgctgcgcgtgagaggtcccagatacgtctgcggttccggctccgccaccctcagcttctcttccccagctttgggaagccagaggacacccctggctcctgccgacaccgccctccttcccttcccagccgcgggcctcgctcggtgctaggctactctgccgggaggcggcggcggctgccagtctgtggagagtcctgctgccctccagccgggctcctccaccgggccttgcaggggccgagagagctcggtgcccgcccttccgctcgcctttttcgtcagctggctggagcagcatcggtccgggaggtctctaggctgaggcggcggccgctcctctagttccacaatgtccacgggcggagacttcgggaatccgctgaggaaattcaagctggtgttcctgggggagcaaagcgttggaaagacatctttgatcaccagattcatgtatgacagttttgacaacacctatcaggcaacaattggcattgactttttatcaaaaactatgtacttggaggatcgaacaatcaggcttcagctgtgggatactgcgggtcaggaacgtttccgtagcctcattcccagttacatccgtgattctgctgcagctgtagtagtttacgatatcacaaatgttaactcattccagcaaactacaaagtggattgatgatgtcagaacagaaagaggaagtgatgttatcatcatgctagtaggaaataaaacagatcttgctgacaagaggcaagtgtcaattgaggagggagagaggaaagccaaagagctgaatgttatgtttattgaaactagtgcaaaagctggatacaatgtaaagcagctctttcgacgtgtagcagcagctttgccgggaatggaaagcacacaggacagaagcagagaagatatgattgacataaaactggaaaagcctcaggagcaaccagtcagtgaaggaggctgttcctgctaatctcccatgtcatcttcaaccttcttcagaagctcactgctttggcccccttactctttcattgactgcagtgtgaatattggcttgaaccttttcccttcagtaataacgtattgcaattcatcattgctgcctgtctcgtggagatgatctattagcttcacaagcacaacaaaagtcagtgtcttcattatttatattttacaaaaagccaaaatatttcagcatattccagtgataactttaaaaattagatacattttcttaacatttttttcttttttaatgttatgataatgtacttcaaaatgatggaaatctcaacagtatgagtatggcttggttaacgagcggtatgttcacagcctactttatctctccttgcttttctcacctctcacttacccccattccctattaccctattcttacctagcctcccccgacttcctcaaaacaaacaagagatggcaaagcagcagttctaccaagcccattggaattatcctttaattttacagataccacttgctgtaggctacggaccaagatgtccaaaattattcttgagcactgatataaattacggtcttctttgaggtcaaaattcagccatcatggtaggcagtgcttgaatgagaaaaggctcctggtgcatcttcaaaatgagtcctaaagaacatactgagtacttagaagtagaagaacataagatgtatttctgactaaaacaaatggctctttcacatgtgctttattagactctgggagagaaaattaaccaagtgcttcagaacaggtttttagtatttaattcttcacggtaagaaaatgaagttctaatgaactgtttctcccaaggttttaaaattgtcaagagttattctgtttgtttaaaaaataagaaacctctttaagcaatagattttgcttgggttttcttttttaaaaacataatactgtgcaggcaaggcactgtaaaagttttaattccttccagaagaaccagtggaagaatttaaatttggcgctacgatcaaaactactgaattagtagaaataatgatgtctaaagcttaccaacaaaagaaccctcagcagaataacaaaaactttgctcaggacatttgaggtcaaattgaagacggaaaccggaaaccgttttcttgtaagcccctagaggcagatcaggtaaagcatacatagtagagggaaaggagagaatggaaataaaactcaatattatgcagatttatgccttattttttagcattttttaaggttgggtctttcaggctggttttggtttgtattagatctgtatagtttaattaactggtgatttagttttatatttaagctacaattaatcttttttctttggtgatatttatttctttgccttttttttttttaacaactttcaatcttcagatgtttcgttgaatctatttagagcttcaccatggcaatatgtatttcccttaaaacactgcaaacaaatatactaggagtgtgcccttttaatctttactagttattgtgagattgctgtgtaagctaataaacacatttgtaaatacattgtttgcaggacgaaaacttctgagttacagctcaggaaaagcctgctgaatttatgttgtaagcattacttaacacagtataaagatgaaaagacaacaaaaatatcttcatacttcctcatcccctcattggaacaaaaccttaaactgggagaaccttagtcccctctctttcctcttcctcctccacttcccacttattgtcaccttgtaatattcagagagcacttggattatggatctgaatagagaaatgcttacagataatcattagcccacataccagtaacttatacttaaagatgggatggagttgtaaagtgcttttataatacaatataattgttaaaggcaagggttgactctttgttttattttgacatggcatgtcctgaaataaatattgattcaatatg

SEQ ID NO: 25303 - DNA, 522 bp, Homo sapiens
  source 1..522: mol_type = unassigned DNA
atccgctgaggaaattcaagctggtgttcctgggggagcaaagcgttggaaagacatctttgatcaccagattcatgtatgacagttttgacaacacctatcaggcaacaattggcattgactttttatcaaaaactatgtacttggaggatcgaacagtacgattgcaattatgggacacagcaggtcaagagcggttcaggagcttgattcctagctacattcgtgactccactgtggcagttgttgtttatgatatcacaaatgttaactcattccagcaaactacaaagtggattgatgatgtcagaacagaaagaggaagtgatgttatcatcatgctagtaggaaataaaacagatcttgctgacaagaggcaagtgtcaattgaggagggagagaggaaagccaaagagctgaatgttatgtttattgaaactagtgcaaaagctggatacaatgtaaagcagagaataggttcttgccatgttgcccaggctagtcttgaactcctagactcag

SEQ ID NO: 25304 - DNA, 577 bp, Homo sapiens
  source 1..577: mol_type = unassigned DNA
agcaggttgggctgcggcggcggcggcagctgtggaagctcaggcgctgcgcgtgagaggtcccagatacgtctgcggttccggctccgccaccctcagcttctcttccccaggtctgggagccgagtgcggaaggagggaacggccctagctttgggaagccagaggacacccctggctcctgccgacaccgccctccttcccttcccagccgcgggcctcgctcggtgctaggctactctgccgggagagctcggtgcccgcccttccgctcgcctttttcgtcagctggctggagcagcatcggtccgggaggtctctaggctgaggcggcggccgctcctctagttccacaatgtccacgggcggagacttcgggaatccgctgaggaaattcaagctggtgttcctgggggagcaaagcgttggaaagacatctttgatcaccagattcatgtatgacagttttgacaacacctatcaggcaacaattggcattgactttttatcaaaaactatgtacttggaggatcgaacagtacgattgcaattatgggacacagcaggtcaagagcgg

SEQ ID NO: 25305 - DNA, 1102 bp, Homo sapiens
  source 1..1102: mol_type = unassigned DNA
gttttccccagaggcttggccctgcgaagtgctgatgtcgtggaagttggaaagacatctttgatcaccagattcatgtatgacagttttgacaacacctatcaggcaacaattggcattgactttttatcaaaaactatgtacttggaggatcgaacaatcaggcttcagctgtgggatactgcgggtcaggaacgtttccgtagcctcattcccagttacatccgtgattctgctgcagctgtagtagtttacgatatcacaaatgttaactcattccagcaaactacaaagtggattgatgatgtcagaacagaaagaggaagtgatgttatcatcatgctagtaggaaataaaacagatcttgctgacaagaggcaagtgtcaattgaggagggagagaggaaagccaaagagctgaatgttatgtttattgaaactagtgcaaaagctggatacaatgtaaagcagctctttcgacgtgtagcagcagctttgccgggaatggaaagcacacaggacagaagcagagaagatatgattgacataaaactggaaaagcctcaggagcaaccagtcagtgaaggaggctgttcctgctaatctcccatgtcatcttcaaccttcttcagaagctcactgctttggcccccttactctttcattgactgcagtgtgaatattggcttgaaccttttcccttcagtaataacgtattgcaattcatcattgctgcctgtctcgtggagatgatctattagcttcacaagcacaacaaaagtcagtgtcttcattatttatattttacaaaaagccaaaatatttcagcatattccagtgataactttaaaaattagatacattttcttaacatttttttcttttttaatgttatgataatgtacttcaaaatgatggaaatctcaacagtatgagtatggcttggttaacgagcggtatgttcacagcctactttatctctccttgcttttctcacctctcacttacccccattccctattaccctattcttacctagcctcccccgacttcctcaaaacaaacaagagatggcaaagcagcagttctaccaagcccattg

SEQ ID NO: 25306 - DNA, 828 bp, Homo sapiens
  source 1..828: mol_type = unassigned DNA
ggccggcggggccgcaggctcgcgcccgggctcgccccgcgccgctccagaggctcgcgcactcagcaggttgggctgcggcggcggcggcagctgtggaagctcaggcgctgcgcgtgagaggtcccagatacgtctgcggttccggctccgccaccctcagcttctcttccccagccgcgggcctcgctcggtgctaggctactctgccgggaggcggcggcggctgccagtctgtggagagtcctgctgccctccagccgggctcctccaccgggccttgcaggggccgagagagctcggtgcccgcccttccgctcgcctttttcgtcagctggctggagcagcatcggtccgggaggtctctaggctgaggcggcggccgctcctctagttccacaatgtccacgggcggagacttcgggaatccgctgaggaaattcaagctggtgttcctgggggagcaaagcgttggaaagacatctttgatcaccagattcatgtatgacagttttgacaacacctatcaggcaacaattggcattgactttttatcaaaaactatgtacttggaggatcgaacaatcaggcttcagctgtgggatactgcgggtcaggaacgtttccgtagcctcattcccagttacatccgtgattctgctgcagctgtagtagtttacgatatcacaaatgttaactcattccagcaaactacaaagtggattgatgatgtcagaacagaaagaggaagtgatgttatcatcatgctagtaggaaataaaacagatcttgctgacaagaggcaagtgtcaattgaggagggagaga

SEQ ID NO: 25307 - DNA, 758 bp, Homo sapiens
  source 1..758: mol_type = unassigned DNA
actcagcaggttgggctgcggcggcggcggcagctgtggaagctcaggcgctgcgcgtgagaggtcccagatacgtctgcggttccggctccgccaccctcagcttctcttccccaggtctgggagccgagtgcggaaggagggaacggccctagctttgggaagccagaggacacccctggctcctgccgacaccgccctccttcccttcccagccgcgggcctcgctcggtgctaggctactctgccgggaggcggcggcggctgccagtctgtggagagtcctgctgccctccagccgggctcctccaccgggccttgcaggggccgagagagctcggtgcccgcccttccgctcgcctttttcgtcagctggctggagcagcatcggtccgggaggtctctaggctgaggcggcggccgctcctctagttccacaatgtccacgggcggagacttcgggaatccgctgaggaaattcaagctggtgttcctgggggagcaaagcgttggaaagacatctttgatcaccagattcatgtatgacagttttgacaacacctatcaggcaacaattggcattgactttttatcaaaaactatgtacttggaggatcgaacactctttcgacgtgtagcagcagctttgccgggaatggaaagcacacaggacagaagcagagaagatatgattgacataaaactggaaaagcctcaggagcaaccagtcagtgaaggaggctgttcctgctaatctc

SEQ ID NO: 25308 - DNA, 1104 bp, Homo sapiens
  source 1..1104: mol_type = unassigned DNA
ttgttttccccagaggcttggccctgcgaagtgctgatgtcgtggaagttggaaagacatctttgatcaccagattcatgtatgacagttttgacaacacctatcaggcaacaattggcattgactttttatcaaaaactatgtacttggaggatcgaacaatcaggcttcagctgtgggatactgcgggtcaggaacgtttccgtagcctcattcccagttacatccgtgattctgctgcagctgtagtagtttacgatatcacaaatgttaactcattccagcaaactacaaagtggattgatgatgtcagaacagaaagaggaagtgatgttatcatcatgctagtaggaaataaaacagatcttgctgacaagaggcaagtgtcaattgaggagggagagaggaaagccaaagagctgaatgttatgtttattgaaactagtgcaaaagctggatacaatgtaaagcagctctttcgacgtgtagcagcagctttgccgggaatggaaagcacacaggacagaagcagagaagatatgattgacataaaactggaaaagcctcaggagcaaccagtcagtgaaggaggctgttcctgctaatctcccatgtcatcttcaaccttcttcagaagctcactgctttggcccccttactctttcattgactgcagtgtgaatattggcttgaaccttttcccttcagtaataacgtattgcaattcatcattgctgcctgtctcgtggagatgatctattagcttcacaagcacaacaaaagtcagtgtcttcattatttatattttacaaaaagccaaaatatttcagcatattccagtgataactttaaaaattagatacattttcttaacatttttttcttttttaatgttatgataatgtacttcaaaatgatggaaatctcaacagtatgagtatggcttggttaacgagcggtatgttcacagcctactttatctctccttgcttttctcacctctcacttacccccattccctattaccctattcttacctagcctcccccgacttcctcaaaacaaacaagagatggcaaagcagcagttctaccaagcccattg

SEQ ID NO: 25309 - DNA, 569 bp, Homo sapiens
  source 1..569: mol_type = unassigned DNA
gcgccgctccagaggctcgcgcactcagcaggttgggctgcggcggcggcggcagctgtggaagctcaggcgctgcgcgtgagaggtcccagatacgtctgcggttccggctccgccaccctcagcttctcttccccaggtctgggagccgagtgcggaaggagggaacggccctagctttgggaagccagaggacacccctggctcctgccgacaccgccctccttcccttcccagccgcgggcctcgctcggtgctaggctactctgccgggaggcggcggcggctgccagtctgtggagagtcctgctgccctccagccgggctcctccaccgggccttgcaggggccgagagagctcggtgcccgcccttccgctcgcctttttcgtcagctggctgaggcggcggccgctcctctagttccacaatgtccacgggcggagacttcgggaatccgctgaggaaattcaagctggtgttcctgggggagcaaagcgttggaaagacatctttgatcaccagattcatgtatgacagttttgacaacacctatcaggcaacaattgg

SEQ ID NO: 25310 - DNA, 3077 bp, Homo sapiens
  source 1..3077: mol_type = unassigned DNA
gcgcactcagcaggttgggctgcggcggcggcggctggggaagccgaagcgccgcgcgtgagagatcccggatacatctgcggtttgggctccgccaccctccgtctctctcccgcaggtctctgagccgggtgcggaaggagggaacggccctagccttgggaagccaaagcacacccctggctcctgccgacaccgccctccttcccttcccagccgcgggcctcgctccgtgctcggctactctgccgggaggcggcggcggctgccagtctgtggcgagccctgctgccctccagccgggctcctccagccgggctcctccaccggcccttgcaggggcgcagagagctcggcgcccgcccttccgctcgcctttttcgtcagccggctggaggagcatcggtccgggaggtctctgggctgaggcggcgacagctcctctagttccaccatgtccgcgggcggagacttcgggaatccgctgaggaaattcaagctggtgttcctgggggagcaaagcgttgcaaagacatctttgatcaccagattcaggtatgacagttttgacaacacctatcaggcaataattggcattgactttttatcaaaaactatgtacttggaggatggaacaatcgggcttcggctgtgggatacggcgggtcaggaacgtctccgtagcctcattcccaggtacatccgtgattctgctgcagctgtagtagtttacgatatcacaaatgttaactcattccagcaaactacaaagtggattgatgatgtcagaacagaaagaggaagtgatgttatcatcacgctagtaggaaatagaacagatcttgctgacaagaggcaagtgtcagttgaggagggagagaggaaagccaaagggctgaatgttacgtttattgaaactagggcaaaagctggatacaatgtaaagcagctctttcgacgtgtagcagcagctttgccgggaatggaaagcacacaggacggaagcagagaagacatgagtgacataaaactggaaaagcctcaggagcaaacagtcagcgaagggggttgttcctgctactctcccatgtcatcttcaacccttcctcagaagcccccttactctttcattgactgcagtgtgaatattggcttgaaccttttcccttcattaataacgttttgcaattcatcattgctgcctgtctcgtggaggtgatctattagcttcacaagcacaaaaaaagtcagcgtcttcattatttatattttacaaaaagccaaattatttcagcatattccggtgataactttaaaaattagatacattttcttaacatttttttcttttttaatgttatgataatgtacttcaaaatgatggaaatctcaacagtatgagtatggcttggttaacgagcagtatgttcacagcctgctttatctctccttgctcttctcacctctcccttaccccgttccctatttccgtgttcttacctagcctccccccacttcctcaaaacaaacaagagatggcaaagcagcagtccgaccaagcccactggaattatcctttaattttacagataccacttgctgtaggctgtggaccaagatgtccagaattattcttgagcactgatgtaaattacttagatcttctttgaggtcagaattcagcgatcacggtaggcagtgcttgaatgagaaaagcctcctggtgcatcttcaaaatgagtcctaaagaacatactgagtacttataagtagcagaacataaaatgtatttctgactaacacaaatggtcctttcacatgtgctttattagactctgggagagaaaagtaaccaagtgcttcagaacaggtttttagtatttacttcttcatggtaagataatgaagttctaatgaactatttctcccaaggttttaaaattgtcaagagttattctgtttgtttaaaaagtaagaaacctctgtaagcaatagattttgcttgggttttctttcttaaaaaaataatactatgcaggcaagacaccataaaagtttaattccttacagaagaaccagtggaagaatttaaatttggcactacgatcaaaactactgaattagcagaaataacgatatctaaagcttaccagcaaaagaaccctcagcagaatagcaaaaactttgctcaggacatttgaggtcaaattgaagacggaagacggaagacggaaaccggaaaccgttttcttgtaagcccctagaggcagatcaggtaaagcatacatagtagagggaaaggagagaatggaaataaaactgaatattatgcagatttatgccttattttttagcattttttaaggttgggtctttcaggctggttttggtttgtattagatctgtatagtttaactagtgatttagttttatatttaagctacgattaatattttttctttggcgatatttctttgctttttttttttttaacaactttccatttttagatgtttcgttgaatctatttagagcttcaccatggcaatatgtatttcccttaaaacactgcaaacaaatatactaggagtgtgcccttttaatctttactagttattgtgagattgctgtgtaagctaataaacacatttgtaaatacattgtttgcaggaagaaaacttcgagttacaggtcaggaaaagcctgctgaatttatgttgtaaacgttacttaacacagtataaagatgaaaagacaacaaaagtatcttcatacttcctcatcccctcattgcaacaaaaccttaaactgggagaaccttagtcccctctctttcctcttcctcctccacttcccacttattgtcactttgtaatattcagagagcacttggattatggatctgaatagagaaatgcttacagataatcattagcccacataccagtaacttatacttaaagatgggatggagttataaagtgcttttataatacaatataattgctaaaggcaagggttgactctttgttttattttgacatggcatgtcctgaaataaatattgattcactatg

SEQ ID NO: 25311 - DNA, 1723 bp, Homo sapiens
  source 1..1723: mol_type = unassigned DNA
ggaggaaggggagagagaggcgcgcgggagggcgtctagggaatcgaggtgccggctgctccttcctcacaatttgcccagacaggcggtgggtgggaatgcctcacttcagtttgaagagggtccggatccaaaggggttaaaacgagcgacccccgatccccgaccacacttcccgcctccctaaaacgcacaccccgctagccatgggcagccgcgaccacctgttcaaagtgctggtggtgggggacgccgcagtgggcaagacgtcgctggtgcagcgatattcccaggacagcttcagcaaacactacaagtccacggtgggagtggattttgctctgaaggttctccagtggtctgactacgagatagtgcggcttcagctgtgggatattgcagggcaggagcgcttcacctctatgacacgattgtattatcgggatgcctctgcctgtgttattatgtttgacgttaccaatgccactaccttcagcaacagccagaggtggaaacaggacctagacagcaagctcacactacccaatggagagccggtgccctgcctgctcttggccaacaagtgtgatctgtccccttgggcagtgagccgggaccagattgaccggttcagtaaagagaacggtttcacaggttggacagaaacatcagtcaaggagaacaaaaatattaatgaggctatgagagtcctcattgaaaagatgatgagaaattccacagaagatatcatgtctttgtccacccaaggggactacatcaatctacaaaccaagtcctccagctggtcctgctgctagtagtgtttggcttattttccatcccagttctgggaggtcttttaagtctcttccctttggttgcccacctgacaattttattaagtacatttgaattgtctcctgactactgtccagtaaggaggcccattgtcacttagaaaagacacctggaacccatgtgcatttctgcatctcctggattagcctttcacatgttgctggctcacattagtgccagttagtgccttcggtgtaagatcttctcatcagccctcaatttgtgatccggaattttatgagaaggattagaaatcagcacctgcgttttagagatcataattctcacctacttctgagcttatttttccatttgatattcattgatatcatgacttccaattgagaggaaaatgagatcaaatgtcatttcccaaatttcttgtaggccgttgtttcagattctttctgtcttggaatgtaaacatctgattctggaatgcagaaggagggggtctgggcatctgtggatttttggctactagaagtgtcccagaagtcactgtatttttgaaacttctaacgtcataattaagtttctcttgtcttggcatcaagaatagtcaagttttttggccgggcatggtggctcatgcctgtaatcccagcacttggggaggccaaggcaggcggatcacatgaggccaggaattcgagaccaacctggtcagcatggcaaaaccccgtctctactaaaagtacaaaaattagccaggcgtgatggcacgtgtctgtaatcccagctactctggagactgaggtgggagaatcgcttgagactgggaggcagaggttgcagtgaaccgagatcatgccaccgcacttcagcctgggtgacagagaaggactccgtctcaaaaaaaaaa

SEQ ID NO: 25312 - DNA, 3272 bp, Homo sapiens
  source 1..3272: mol_type = unassigned DNA
ggaaggggagagagaggcgcgcgggagggcgtctagggaatcgaggtgccggctgctccttcctcacaatttggtttgtgctgcaaggggagggtccccatcatctggccccagtggtgtaaggagctgactgggattcagtcactgacttggagccgctcgggggaagtcccgcccagacaggcggtgggtgggaatgcctcacttcagtttgaagagggtccggatccaaaggggttaaaacgagcgacccccgatccccgaccacacttcccgcctccctaaaacgcacaccccgctagccatgggcagccgcgaccacctgttcaaagtgctggtggtgggggacgccgcagtgggcaagacgtcgctggtgcagcgatattcccaggacagcttcagcaaacactacaagtccacggtgggagtggattttgctctgaaggttctccagtggtctgactacgagatagtgcggcttcagctgtgggatattgcagggcaggagcgcttcacctctatgacacgattgtattatcgggatgcctctgcctgtgttattatgtttgacgttaccaatgccactaccttcagcaacagccagaggtggaaacaggacctagacagcaagctcacactacccaatggagagccggtgccctgcctgctcttggccaacaagtgtgatctgtccccttgggcagtgagccgggaccagattgaccggttcagtaaagagaacggtttcacaggttggacagaaacatcagtcaaggagaacaaaaatattaatgaggctatgagagtcctcattgaaaagatgatgagaaattccacagaagatatcatgtctttgtccacccaaggggactacatcaatctacaaaccaagtcctccagctggtcctgctgctagtagtgtttggcttattttccatcccagttctgggaggtcttttaagtctcttccctttggttgcccacctgacaattttattaagtacatttgaattgtctcctgactactgtccagtaaggaggcccattgtcacttagaaaagacacctggaacccatgtgcatttctgcatctcctggattagcctttcacatgttgctggctcacattagtgccagttagtgccttcggtgtaagatcttctcatcagccctcaatttgtgatccggaattttatgagaaggattagaaatcagcacctgcgttttagagatcataattctcacctacttctgagcttatttttccatttgatattcattgatatcatgacttccaattgagaggaaaatgagatcaaatgtcatttcccaaatttcttgtaggccgttgtttcagattctttctgtcttggaatgtaaacatctgattctggaatgcagaaggagggggtctgggcatctgtggatttttggctactagaagtgtcccagaagtcactgtatttttgaaacttctaacgtcataattaagtttctcttgtcttggcatcaagaatagtcaagttttttggccgggcatggtggctcatgcctgtaatcccagcacttggggaggccaaggcaggcggatcacatgaggccaggaattcgagaccaacctggtcagcatggcaaaaccccgtctctactaaaagtacaaaaattagccaggcgtgatggcacgtgtctgtaatcccagctactctggagactgaggtgggagaatcgcttgagactgggaggcagaggttgcagtgaaccgagatcatgccaccgcacttcagcctgggtgacagagaaggactccgtctcaaaaaaaaaagaaaaaagaatagtcatttttaaactacctatctcatgcaatgaaagcattttcttccacaaagagcttaatcctcatgataggattgcctagtgtctcccatttgcaggtttctgggttgatgtcttaatgcataatactgcaagtgacatcagctggctgtgatgcttcgaaataggtctgctcctcacagctttgggaatctgaatggaagaagaaaagagagaagttaacaacctccactggggcaactttgtgaacacgtaggcacttagtcataggaaacatattatgtgcaggtcctagcctgggggaggaaagtagatagacagaaaatcattaggtaatttaagtactaaattgggcagggctttttagtatcaaatcactactagaccatttaatttgttaaattatctctaggatggtgatttataacctacccaaagttatcgatattcttactaaactctgaggcctgaagttctgtgatagaccttaaataagtgtcctaagtcagtggttcccaaatctggctggtcgggaatacctgggaagtttgttaaaattttttaaaaatgttttaagatttttgggtcctgagccagccgtggtggctcacacctgtaatcccagcactttgggaggctgaggcaggtggatcgcctgaggtcaggagttcaagatcaacctggccaacatactgaaaccccgtctctactaaaaataagaaaaattagctgggcgtggtggcgggcacctgtaatcccagctacttgggagactgaggcaggagaatcgcttgaacctgggagttagaggttgcagtgagctgagatcacaccattgcgcttcagcctgggcaacaagagtgaaactccatctccaaaaaaaaaaaacaaaaagaaaaagatttttgggtcccgacctcaaacctactgaatcagaatttctagggatgaagcctaggaatgtgttgttgttttcagagcttccctggtgattgtgataagcctggtttggaaaccattgctggagaactttgtaaagatacagagacccagaccttttgtatttacatttaaatacaaatacaaatcctgggtttctatatattctgttagcttttcaggtgattctgctacacagacgttgaaaaccactgccctaagaaagagatcagaggccacatatcagagagaaaagggaccaaaccttcggtggtttgttgtgtgtcgttttaatgccaattattttaacttgcacagtcttctgaaaccttgtattaatagttctcttttgtattaccattttcaggtagggttttgatcactatgattctgaagataatagtgaaatagtgaatttcattgatatgaagagataattgattttcattcattggtttgaacacctgcaaaatcacaaataaatgagaactaagtcttgta

SEQ ID NO: 25313 - DNA, 1157 bp, Homo sapiens
  source 1..1157: mol_type = unassigned DNA
tgacgcttgcggaggaaggggagagagaggcgcgcgggagggcgtctagggaatcgaggtgccggctgctccttcctcacaatttggtttgtgctgcaaggggagggtccccatcatctggccccagtggtgtaaggagctgactgggattcagtcactgacttggagccgctcgggggaagtcccggtgggtgaggttccgcggcgcctggtccagtttctcggcagtcaggccaggagggggtggggaaggtgcgaacagccgggggctcggagctcgcgccctgcgccccacccaggttgcggccgcccggggaggaagcgcgtataggttgagtgcaaagtttccttttttgctttctcgtcagagcagcccagacaggcggtgggtgggaatgcctcacttcagtttgaagagggtccggatccaaaggggttaaaacgagcgacccccgatccccgaccacacttcccgcctccctaaaacgcacaccccgctagccatgggcagccgcgaccacctgttcaaagtgctggtggtgggggacgccgcagtgggcaagacgtcgctggtgcagcgatattcccaggacagcttcagcaaacactacaagtccacggtgggagtggattttgctctgaaggttctccagtggtctgactacgagatagtgcggcttcagctgtgggatattgcagggcaggagcgcttcacctctatgacacgattgtattatcgggatgcctctgcctgtgttattatgtttgacgttaccaatgccactaccttcagcaacagccagaggtggaaacaggacctagacagcaagctcacactacccaatggagagccggtgccctgcctgctcttggccaacaagtgtgatctgtccccttgggcagtgagccgggaccagattgaccggttcagtaaagagaacggtttcacaggttggacagaaacatcagtcaaggagaacaaaaatattaatgaggctatgagagtcctcattgaaaagatgatgagaaattccacagaagatatcatgtctttgtccacccaaggggactacatcaatctacaaaccaagtcctccagctggtcctgctgctagtagtgtttggcttattttccatcccagttctgggaggtcttt

SEQ ID NO: 25314 - DNA, 1306 bp, Homo sapiens
  source 1..1306: mol_type = unassigned DNA
gcggaggaaggggagagagaggcgcgcgggagggcgtctagggaatcgaggtgccggctgctccttcctcacaatttggtttgtgctgcaaggggagggtccccatcatctggccccagtggtgtaaggagctgactgggattcagtcactgacttggagccgctcgggggaagtcccgtggattttgctctgaaggttctccagtggtctgactacgagatagtgcggcttcagctgtgggatattgcagggcaggagcgcttcacctctatgacacgattgtattatcgggatgcctctgcctgtgttattatgtttgacgttaccaatgccactaccttcagcaacagccagaggtggaaacaggacctagacagcaagctcacactacccaatggagagccggtgccctgcctgctcttggccaacaagtgtgatctgtccccttgggcagtgagccgggaccagattgaccggttcagtaaagagaacggtttcacaggttggacagaaacatcagtcaaggagaacaaaaatattaatgaggctatgagagtcctcattgaaaagatgatgagaaattccacagaagatatcatgtctttgtccacccaaggggactacatcaatctacaaaccaagtcctccagctggtcctgctgctagtagtgtttggcttattttccatcccagttctgggaggtcttttaagtctcttccctttggttgcccacctgacaattttattaagtacatttgaattgtctcctgactactgtccagtaaggaggcccattgtcacttagaaaagacacctggaacccatgtgcatttctgcatctcctggattagcctttcacatgttgctggctcacattagtgccagttagtgccttcggtgtaagatcttctcatcagccctcaatttgtgatccggaattttatgagaaggattagaaatcagcacctgcgttttagagatcataattctcacctacttctgagcttatttttccatttgatattcattgatatcatgacttccaattgagaggaaaatgagatcaaatgtcatttcccaaatttcttgtaggccgttgtttcagattctttctgtcttggaatgtaaacatctgattctggaatgcagaaggagggggtctgggcatctgtggatttttggctactagaagtgtcccagaagtcactgtatttttgaaacttctaacgtcataattaagtttctcttgtcttggcatcaagaatagtcaagttttttggccgggcatggtggctcatgcctgt

SEQ ID NO: 25315 - DNA, 1441 bp, Homo sapiens
  source 1..1441: mol_type = unassigned DNA
agtcaggccaggagggggtggggaaggtgcgaacagccgggggctcggagctcgcgccctgcgccccacccaggttgcggccgcccggggaggaagcgcgtataggttgagtgcaaagtttccttttttgctttctcgtcagagcagcccagacaggcggtgggtgggaatgcctcacttcagtttgaagagggtccggatccaaaggggttaaaacgagcgacccccgatccccgaccacacttcccgcctccctaaaacgcacaccccgctagccatgggcagccgcgaccacctgttcaaagtgctggtggtgggggacgccgcagtgggcaagacgtcgctggtgcagcgatattcccaggacagcttcagcaaacactacaagtccacggtgggagggcaggagcgcttcacctctatgacacgattgtattatcgggatgcctctgcctgtgttattatgtttgacgttaccaatgccactaccttcagcaacagccagaggtggaaacaggacctagacagcaagctcacactacccaatggagagccggtgccctgcctgctcttggccaacaagtgtgatctgtccccttgggcagtgagccgggaccagattgaccggttcagtaaagagaacggtttcacaggttggacagaaacatcagtcaaggagaacaaaaatattaatgaggctatgagagtcctcattgaaaagatgatgagaaattccacagaagatatcatgtctttgtccacccaaggggactacatcaatctacaaaccaagtcctccagctggtcctgctgctagtagtgtttggcttattttccatcccagttctgggaggtcttttaagtctcttccctttggttgcccacctgacaattttattaagtacatttgaattgtctcctgactactgtccagtaaggaggcccattgtcacttagaaaagacacctggaacccatgtgcatttctgcatctcctggattagcctttcacatgttgctggctcacattagtgccagttagtgccttcggtgtaagatcttctcatcagccctcaatttgtgatccggaattttatgagaaggattagaaatcagcacctgcgttttagagatcataattctcacctacttctgagcttatttttccatttgatattcattgatatcatgacttccaattgagaggaaaatgagatcaaatgtcatttcccaaatttcttgtaggccgttgtttcagattctttctgtcttggaatgtaaacatctgattctggaatgcagaaggagggggtctgggcatctgtggatttttggctactagaagtgtcccagaagtcactgtatttttgaaacttctaacgtcataattaagtttctcttgtcttggcatcaagaatagtcaagttttttggccgggcatg

SEQ ID NO: 25316 - DNA, 2175 bp, Homo sapiens
  source 1..2175: mol_type = unassigned DNA
gtgccggccaatgggaggtgcgctcgggctgcttccggctccgcgctccgctcgccccctcccaaggtctccccgcgactggcgggacgcaggggcgggcgtcggccgcggtgacgcgcagcgggcctggagccaataaggggcgggctcggtgctgatggacggtgctggtggccagtggagaggcgctggccgcacttcccgtcggggagagagtgtaatatggcgaagacctacgattacctgttcaagctgctgctgatcggggactcgggggtggggaagacctgtgtcctgttccgcttctccgaggacgccttcaactccacttttatctccaccataggaattgactttaaaattaggaccatagagctcgatggcaagagaattaaactgcagatatgggacacagccggtcaggaacggtttcggacgatcacaacggcctactacaggggtgcaatgggcatcatgctggtctacgacatcaccaacgagaagtccttcgacaacatccggaactggattcgcaacattgaggagcacgcctctgcagacgtcgaaaagatgatactcgggaacaagtgtgatgtgaatgacaagagacaagtttccaaggaacggggagaaaagctggccctcgactatggaatcaagttcatggagaccagcgcgaaggccaacatcaatgtggaaaatgcatttttcactctcgccagagatatcaaagcaaaaatggacaaaaaattggaaggcaacagcccccaggggagcaaccagggagtcaaaatcacaccggaccagcagaagaggagcagctttttccgatgtgttcttctgtgaggaacaccgccttactctgagcctcgctcagcccagctgactgtgcctgttctgagtgagcccctcactcagccggggccctcccacctccaacgccccgcccacgccgcggccaccgggcccacggccaccagaatgcaattgagaaatcgtttattttagtaactgtctgatctttttcaactttggagatggaataagttaaaaatttgctatttttcctgtaacatctgctgaacgggcccacccacacgttgtatattcagagagagagagggagtcaaggtgtgaccgtcgaccacagccagtgtcaggcctctgcctctgggcctttgctttgtggcctcactgcaacacaaagctccaccaggaggctggttcacgtcccctaccacggaagcgaggtcccagaaggccagcggtggttccaggagcaacagctcccaaaccctgagcaaggcaaccgatcgccaggaccaggaagcatcacccaggagatttggcgcccacttccacctcttctctcagttttggacaagtgacaaaccattttgccccctcactcttcttttttaactgttaaaccaaaggaaagcacaaatgaaggaaatcctgtgtaaagcattgagaaggaaagaagcctggagcagcctctcctgtccacagccaggggttaggtctgcaggcccgtctgcggtccccatcgagcatcaaggggacgctgtgtgtgctgcaagtgaccccgaaaacaaccacagccgtcacatggtcctcctgaagttggggcaccctcctctcagcaccaaaatggcccccactccttcgtgtcctcccgctatctccaaatcggacgttctttctagctgagatttttatttttccacatctgtagtgccatgaagcgattctgtctttgacttccaatggcaaacctgggtgatcgggaacaagcacgttgtacccttggctggacatggccaagacacaaggcattccacggcggcaagctgaccgcacagcagtctggcttgattttcagccgtcatcattgggttctgttttgacagctctgctgtcccatagggactgcgactgggaccaggtcaaccacgccaggggggtgtcaccagccttttctttttttctttctttttttttttttcctccttaagctgctgtcaatccaaaccattggcatcatcgtttcttttgaattaaaaccaacatatcagcaatagtctgctctccccgggaatctctaacatgctctgtttacatcgataaatgcacttaaggaaaacaaacaaattaaagctcatcttaaagtcc

SEQ ID NO: 25317 - DNA, 3748 bp, Homo sapiens
  source 1..3748: mol_type = unassigned DNA
cgagcggcagctgtcaggccaccgaggtccaagccgcacttgctgccccattgaggacgaggaggcagcaggagcagtgacggtgactctaaggagccggattcccggcacgcagagctgacctgcctggcacccgcggccctctcctgtttccttcccattgtgttggcaccctaaaaagaaagaataaaacaacaacaggaaaaaaaggaaaatatttaaattgtgacaaaaacccactgggttctcttggttacaaactccttcccttctggtgctgcaaaaatgagtgggaaatccctgctcttaaaggtcattctcttgggtgatggtggagttgggaaaagttcgcttatgaaccgttacgtaaccaacaaatttgactcccaggcttttcacaccataggggtagagttcttaaatcgagatctggaggtagatggacgctttgtaaccctccagatctgggacactgcagggcaggaacgtttcaagagccttaggacacccttctacaggggagcagactgctgcctcttgaccttcagcgtggatgatcggcagagcttcgagaatcttggtaactggcagaaagaatttatttactatgcggatgtgaaggaccctgagcatttcccctttgtagttctgggtaacaaggtagacaaagaggataggcaagtgactactgaggaggcacaaacctggtgcatggagaatggggattacccttatttagaaactagtgccaaagatgatactaatgtgacagtggcctttgaagaagctgtcaggcaggtgctggctgtagaggaacagctggagcattgcatgttgggtcacaccattgacttgaacagtggctccaaagcagggtcttcgtgctgttaaagatagggagccttttaaaaatgtgccccaaattgatcagtcagtagtgtaagaataactgtgcccctctaagagtgcacacacacgcacacaagagggtaagagacaaggttctgattgtgaaacagagcctttcaaattgaagtgtagattgatttaaaaaaattaaaaattaaaaaaaatgaagctctatcaagccaagtgtattttgcgtgatttctgctatttccccttcttgtgtgtctcaggacatatcagaaaattttagtcctgagacagttaaatattttttaaatcacagtttaaacctagaacccagctgcatgaaggagttaaagagctacaactatttcttaaagtgttccattaatcaactaacaaatgtcactatcagactcttgccaagcagtttctgacatttctgccaaaggggaaaaaaatcagactttgagctgtattacaataaaaataataatgcaaataaggattcctaggcttgaattaaagaagttgtaatgattaggagtgcaaaagtataatgatatacactgacttgtttaaatccttatgtatggttcgctcccatctgagcttttcaaaaaatcccatctcaataagagatactctaatgacactggcaattgattatacttcttgtgtttgaagtcataggatactagtgaatggattatgcttaaatatgccaaccacctttgcaaataaatggttggtctgcttttaattcctaagtctacttttgctgcatagagatgttgcttctctgacaacctcttaccaatttagcaatgctgcttagtatatgaatttggatgcagtgctctctgctcatcatttagatggtcctttgatccaacatgctgggctcatggagaaggcttcataaaagattgggggataatgaacttttctcacaaggctccttaactcaaatatttattgcagaagaaggaactggtttcttatatgttgcactgtatgttcaactagcctaattaggacattgaaagtgacagaagagcagatcttaacccagtgttagaatgaatttcccataaacagagttgtccaacagtggaatggactgccttaatagtgagctccctgcctctgaaaatattcactggatgaccatctgttagaataccataaaaagattttctgtgctggctacatgttcaatataaagtcctttctggctctaagttctatgaatatataaactacatcagtgccatgctgtggttagatttatctgatgataacagctaagactatggagagggactttaaaaattctcaaaccattctgtgatcaatctttaacagcaactacatagctcttccttttgcttttgcactgtggcaggaaaaattcttgagctctgagtaatctttatgtgactgataaaaaacatcttaaagctcccatgttaaaatataaaaatggtttgacaatttttgattaccatgactgtcagttatatactatattatgaatatgcagtgtggttcttgttggttgatctgtttaccctgcatagattttaatctgtactttaaaacatctatgataaaaatagtgacagacagaaattaccccaaaaagagacctaggccaggaagggggtgggagctttcataggaatacagcctagaactctccattgtagccacgtatggaatcagccttacttacatgtaggacctttgtgctttaagagctctgggacatattggccaaatagaaaagaagaggacagtatttcaactcagtcatactcaatatttccaattaagatataatcctgacaccattgttcaattaactttgacgccagaagtcaaagccagaactgggaccccacagctcttaagtactggtccctatcctgcctatgcctatagccagccacactggtttccaagttctgtgatcattttgctacaatcatgttagggtgaaaatctgtacgtcagaactgttaaatgctaattatttttaagtgcatgagacctggggccttctctttctacttgcactctgcttatactagtttctatttgtagatctcaggccttcatcataaagacctctatcaactcacaaaagtatttgtctctattagagtggcatgtggtcatttgagtaaaaaaaaaaaaattacatgggtatcggattcataggcatcctgtccatctaagacaagtgttaattttattggcccatcagctggagcccctttcctcttagccataccattgttttctaccaaattaccactcaatatcttaatgaaagcactcaacattaagtgacataaacagtggcatttgggtaagcaacactcagtggggtgctgacatacagtttgggtaagattaaaaaacaccaaaggctgaaatctgtgagtaccaagaactgtgcatataggtttagaaattgactgtgtaccctagaatgtgcagtgtaatattttcaataggtgtttttttaaagaacactagatttttggaataatatatttctaattaggactatactgtttttcaatggtctgttaaaacatcatacagaatatttatttagtttattgtcatgtattggctaactttcaggggcctcagattccatatgtcttcagtggattgatgaatatcaggttaatttgtgcctgccccagccatctctactttattctgaggtattccacaatcctcttgttgcaggtgctgctaaaaaaaactcaaaattgtgtatcaaatattttctttcaactgtaaaaaatcatctgtgttaaagtgaataaaaagtgcattttgaataaccagcacacaa

SEQ ID NO: 25318 - DNA, 5387 bp, Homo sapiens
  source 1..5387: mol_type = unassigned DNA
gcgcactgcttatttcccgctgtcaggatgaggaggcggaggtcggcggtcgggtccgtctctgcccgcggctgtggcggcgccggcggatccagccttagcggtttctctctgggcggcggcggcggcggctcggttgacgcctcctccgccagctgagcccgcgggagcccaggacgccgcttccccgcccatccccgctccccgaggccggccgcctggtcatggcgcagccgggcccggcttcccagcctgacgtttctcttcagcaacgggtagcagaattggaaaaaattaatgcagaatttttacgtgcacaacagcagcttgaacaagaatttaatcaaaagagagcaaaatttaaggagttatatttggctaaagaggaggatctgaagaggcaaaatgcagtattacaagctgcacaagatgatttgggacaccttcgaacccagctgtgggaagctcaagcagagatggagaatattaaggcgattgccacagtctctgagaacaccaagcaagaagctatagatgaagtgaaaagacagtggagagaagaagttgcttcacttcaggctgttatgaaagaaacagttcgtgactatgagcaccagttccaccttaggctggagcaggagcgaacacagtgggcacagtatagagaatccgcagagagggaaatagctgatttaagaagaaggctgtctgaaggtcaagaggaggaaaatttagaaaatgaaatgaaaaaggcccaagaggatgctgagaaacttcggtccgttgtgatgccaatggaaaaggaaattgcagctttgaaggataaactgacagaggctgaagacaaaattaaagagctggaggcctcaaaggttaaagaactgaatcattatctggaagctgagaaatcttgtaggactgatctagagatgtatgtagctgttttgaatactcagaaatctgttctacaggaagatgctgagaaactgcggaaagaattgcatgaagtttgccatctcttggagcaagagcgacaacaacacaaccagttaaaacatacgtggcagaaggccaatgaccagtttctggaatctcagcgtttactgatgagagacatgcagcgaatggagattgtgctaacttcagaacagctccgacaagttgaagaactgaagaagaaagatcaggaggatgatgaacaacaaagactcaataagagaaaggatcacaaaaaagcagatgttgaggaagaaataaaaataccagtagtgtgtgctttaactcaagaagaatcttcagcccagttatcaaatgaagaggagcatttagacagcacccgtggctcagttcattccttagatgcaggcttgctgttgccatctggagatcctttcagtaaatcggacaatgacatgtttaaagatggactcaggagagcacagtctacagacagcttgggaacctcgggctcattgcaatccaaagctttaggctataactacaaagcaaaatctgctggaaacctggacgagtcagattttggaccactggtaggagcagattcagtgtctgagaactttgatactgcatcccttgggtcactccagatgccaagtgggtttatgttaaccaaagatcaggaaagagcaatcaaggcgatgacaccagaacaagaagagacagcgtccctcctctccagcgttacccagggcatggagagtgcctatgtgtcccctagtggttatcgtttagttagtgaaacagaatggaatctcttgcagaaagaggtacataatgctggaaataaacttggtagacgttgtgatatgtgttccaattacgaaaaacagttacaaggaattcagattcaggaggctgaaacgagagaccaggtgaaaaaactacagctgatgctaaggcaagctaatgaccagttagagaagacaatgaaagataagcaggagctggaagacttcataaagcaaagcagcgaagattcgagtcaccagatctctgcactcgtcctaagagcccaggcctccgagatcttacttgaagagttacagcaggggctttcccaggcaaagagggatgttcaggaacagatggcggtgctgatgcagtcacgggaacaggtttcagaagagctggtgaggttacagaaagataatgacagtctccagggaaagcacagcctgcatgtgtcattacagcaagcagaagacttcatcctcccagacactacagaggcactgcgggagttggtattaaaataccgtgaggacatcattaatgtgcggacagcagcagaccacgtagaagaaaagctgaaggctgagatacttttcctaaaagagcagatccaagcagaacagtgtttaaaagaaaatcttgaagaaactctgcaactagaaatagaaaactgcaaggaggaaatagcttctatttctagcctaaaagctgaattagaaagaataaaagtggaaaaaggacagttggagtccacattaagagagaagtctcaacagcttgagagtcttcaggaaataaagatcagtttggaagagcagttaaagaaagagactgctgctaaggctaccgttgaacaactaatgtttgaagagaagaataaagctcagagattacagacagaattagatgtcagtgagcaagtccagagggattttgtaaagctttcacagacccttcaggtgcagttagagcggatccggcaagctgactccttggagagaatccgggcaattctgaatgatactaaactgacagacattaaccagcttcctgagacatgacaccctcatggcaggattctagcctgcactttgggtttttaactcatctttagagcaacagtaattattatttaactcttaactgaagaaagagaagtcacaacaaaaggaagactggagaaatgcttacttctagagggagaagactgtgcggcacaggaaacagcaaacagtggggtgatctgcagcccagagaccttcaaatgcgaacactataaactccaggcttgattccaacaggcgtgggatcagatttggtgatggaaaaagcgctgtttccttgcctgctttctccaagacagattttcggaacacatttccctaccctaaagcgacatcccagtagtgtttggaattttctgttcatatagtgtttggaattttctgttcatagagctcatcagtaacagtattcagttagcagacagaagtgtagtatgctgtatgaatattttatattaaaatatgaaggtttgagagcaggccattggctactgactgtattttgttttccttttaccattttatcttatcttgctttggaggaccttaaatgctactgaaacttacctgagaaccataggactgtggcaaacaaaaccaattcatgaagtgaattaatgatgaggatctgaaaacttggctggggctatatatactggaagttgaaggttaaaggaaaagcacaagaaactttggaagcactttttctgcatacttagatgatcttcatgggcccacagggtaccaggataaagccgaactggtaccatctactcttttgaagtgttttagtctagttattggatcagtgaaaaacattagtatacgtttttaaataggctaatttttcaacttggatcattaggcttacgtactacttgtttcaaatgtgtcaaatacaaaaatggtaactaggttgacagatactttgtatttttcttttgaattcagacctggaatgtaagtaagtgacaatgcttatggaaagccagttagttagaattggaaatctgtcttgtcattttacaagcattagattcctttcctgtgtgaagaaagcctcagtgaaacaggtctttgccataactttatgaagtgctacagaaagcacaaagaattgattcatgttcatcaatacctgctgagagtactgtcccaggaatatccagtggatggattcatcatccaggaggttcaaaagtaagatggttttcaaatcatttttgagactggttgcataacagcagggtacctgaaagagccttctgggagttagtgaactaggtagattgttttgttcacataacgccaccatcaacttaaagtgaattgtctttgttataaatgaggtcactatggacttaccctaaagatcttctgtacttctctcttccataggacaaatgataagtactacatacctcatctcttgggttattattgtagtcttgcattcatggttatgaatttaaaaataaataccaattatggaaatagtactaaaggcttgccgcacatgaaacattattttaattggtttaaagtccctttataaagagtgctacatggtttagataaaggaaacatataactattgagttacaggggattttattaattataaaatgcaatcaatttaaattacgtaggtttaagactagtcccttggataagccccaagcgaatttgtcttcagattattaaaattagtgctgtaaatcagggtgggcaattcacagcctttctgaactgactgaactagagcttgcagtgaagtgttctgctgagactgagcaccttacagatatttttctccagaagatggtgctgggtaataaaatcatcacaattagggaatggttagtggtctctactgtggcaaatgccaactgttggaattcactttattgtagaaaaacccaaactgagactcttaagttttgtttagcaatgtgtttctggtatgaaacaaactactgtgtcactgtccaggtaggaaacaattctttcaactgggttttcagcataaatgggaactgatgtagaaggcaggatttagcccttctaggcaaaagaaaagctcagttgggtttcacgagtgttcctgtgcttatattcagtctgtgcctacatgttctcatgcatgtctaacctgatttacctcttacctgtaacctaccttatcatgtggcttttaattgacagtcactcagccatttctaagcagatatagtagtacctttcagaactcacattggcaagtgtaaaaagatgacttaaggtgaagtgaggacaaaatcacattctgcatactaacctatttttttctccctttaaggtgctaaacttgcacctcatgtccactcagtaacaagtattgggacgtagagcacagcctcactcagctctgaaaggtaatacagcttgtgaggaagtgagccagcagtggcctttgcaattgtggatcttgagctctgctctcagcagatttcaggtgtaaccatttgttaactgtactgaaggtgtgtcctcaagaagaaagtgttcaaattaaaaaagctgctgccaagt

SEQ ID NO: 25319 - DNA, 2905 bp, Homo sapiens
  source 1..2905: mol_type = unassigned DNA
atttcccgctgtcaggatgaggaggcggaggtcggcggtcgggtccgtctctgcccgcggctgtggcggcgccggcggatccagccttagcggtttctctctgggcggcggcggcggcggctcggttgacgcctcctccgccagctgagcccgcgggagcccaggacgccgcttccccgcccatccccgctccccgaggccggccgcctggtcatggcgcagccgggcccggcttcccagcctgacgtttctcttcagcaacgggtagcagaattggaaaaaattaatgcagaatttttacgtgcacaacagcagcttgaacaagaatttaatcaaaagagagcaaaatttaaggagttatatttggctaaagaggaggatctgaagaggcaaaatgcagtattacaagctgcacaagatgatttgggacaccttcgaacccagctgtgggaagctcaagcagagatggagaatattaaggcgattgccacagtctctgagaacaccaagcaagaagctatagatgaagtgaaaagacagtggagagaagaagttgcttcacttcaggctgttatgaaagaaacagttcgtgactatgagcaccagttccaccttaggctggagcaggagcgaacacagtgggcacagtatagagaatccgcagagagggaaatagctgatttaagaagaaggctgtctgaaggtcaagaggaggaaaatttagaaaatgaaatgaaaaaggcccaagaggatgctgagaaacttcggtccgttgtgatgccaatggaaaaggaaattgcagctttgaaggataaactgacagaggctgaagacaaaattaaagagctggaggcctcaaaggttaaagaactgaatcattatctggaagctgagaaatcttgtaggactgatctagagatgtatgtagctgttttgaatactcagaaatctgttctacaggaagatgctgagaaactgcggaaagaattgcatgaagtttgccatctcttggagcaagagcgacaacaacacaaccagttaaaacatacgtggcagaaggccaatgaccagtttctggaatctcagcgtttactgatgagagacatgcagcgaatggagattgtgctaacttcagaacagctccgacaagttgaagaactgaagaagaaagatcaggaggatgatgaacaacaaagactcaataagagaaaggatcacaaaaaagcagatgttgaggaagaaataaaaataccagtagtgtgtgctttaactcaagaagaatcttcagcccagttatcaaatgaagaggagcatttagacagcacccgtggctcagttcattccttagatgcaggcttgctgttgccatctggagatcctttcagtaaatcggacaatgacatgtttaaagatggactcaggagagcacagtctacagacagcttgggaacctcgggctcattgcaatccaaagctttaggctataactacaaagcaaaatctgctggaaacctggacgagtcagattttggaccactggtaggagcagattcagtgtctgagaactttgatactgcatcccttgggtcactccagatgccaagtgggtttatgttaaccaaagatcaggaaagagcaatcaaggcgatgacaccagaacaagaagagacagcgtccctcctctccagcgttacccagggcatggagagtgcctatgtgtcccctagtggttatcgtttagttagtgaaacagaatggaatctcttgcagaaagaggtacataatgctggaaataaacttggtagacgttgtgatatgtgttccaattacgaaaaacagttacaaggaattcagattcaggaggctgaaacgagagaccaggtgaaaaaactacagctgatgctaaggcaagctaatgaccagttagagaagacaatgaaagataagcaggagctggaagacttcataaagcaaagcagcgaagattcgagtcaccagatctctgcactcgtcctaagagcccaggcctccgagatcttacttgaagagttacagcaggggctttcccaggcaaagagggatgttcaggaacagatggcggtgctgatgcagtcacgggaacaggtttcagaagagctggtgaggttacagaaagataatgacagtctccagggaaagcacagcctgcatgtgtcattacagcaagcagaagacttcatcctcccagacactacagaggcactgcgggagttggtattaaaataccgtgaggacatcattaatgtgcggacagcagcagaccacgtagaagaaaagctgaaggctgagatacttttcctaaaagagcagatccaagcagaacagtgtttaaaagaaaatcttgaagaaactctgcaactagaaatagaaaactgcaaggaggaaatagcttctatttctagcctaaaagctgaattagaaagaataaaagtggaaaaaggacaggctaccgttgaacaactaatgtttgaagagaagaataaagctcagagattacagacagaattagatgtcagtgagcaagtccagagggattttgtaaagctttcacagacccttcaggtgcagttagagcggatccggcaagctgactccttggagagaatccgggcaattctgaatgatactaaactgacagacattaaccagcttcctgagacatgacaccctcatggcaggattctagcctgcactttgggtttttaactcatctttagagcaacagtaattattatttaactcttaactgaagaaagagaagtcacaacaaaaggaagactggagaaatgcttacttctagagggagaagactgtgcggcacaggaaacagcaaacagtggggtgatctgcagcccagagaccttca

SEQ ID NO: 25320 - DNA, 5288 bp, Homo sapiens
  source 1..5288: mol_type = unassigned DNA
gcgcactgcttatttcccgctgtcaggatgaggaggcggaggtcggcggtcgggtccgtctctgcccgcggctgtggcggcgccggcggatccagccttagcggtttctctctgggcggcggcggcggcggctcggttgacgcctcctccgccagctgagcccgcgggagcccaggacgccgcttccccgcccatccccgctccccgaggccggccgcctggtcatggcgcagccgggcccggcttcccagcctgacgtttctcttcagcaacgggtagcagaattggaaaaaattaatgcagaatttttacgtgcacaacagcagcttgaacaagaatttaatcaaaagagagcaaaatttaaggagttatatttggctaaagaggaggatctgaagaggcaaaatgcagtattacaagctgcacaagatgatttgggacaccttcgaacccagctgtgggaagctcaagcagagatggagaatattaaggcgattgccacagtctctgagaacaccaagcaagaagctatagatgaagtgaaaagacagtggagagaagaagttgcttcacttcaggctgttatgaaagaaacagttcgtgactatgagcaccagttccaccttaggctggagcaggagcgaacacagtgggcacagtatagagaatccgcagagagggaaatagctgatttaagaagaaggctgtctgaaggtcaagaggaggaaaatttagaaaatgaaatgaaaaaggcccaagaggatgctgagaaacttcggtccgttgtgatgccaatggaaaaggaaattgcagctttgaaggataaactgacagaggctgaagacaaaattaaagagctggaggcctcaaaggttaaagaactgaatcattatctggaagctgagaaatcttgtaggactgatctagagatgtatgtagctgttttgaatactcagaaatctgttctacaggaagatgctgagaaactgcggaaagaattgcatgaagtttgccatctcttggagcaagagcgacaacaacacaaccagttaaaacatacgtggcagaaggccaatgaccagtttctggaatctcagcgtttactgatgagagacatgcagcgaatggagattgtgctaacttcagaacagctccgacaagttgaagaactgaagaagaaagatcaggaggatgatgaacaacaaagactcaataagagaaaggatcacaaaaaagcagatgttgaggaagaaataaaaataccagtagtgtgtgctttaactcaagaagaatcttcagcccagttatcaaatgaagaggagcatttagacagcacccgtggctcagttcattccttagatgcaggcttgctgttgccatctggagatcctttcagtaaatcggacaatgacatgtttaaagatggactcaggagagcacagtctacagacagcttgggaacctcgggctcattgcaatccaaagctttaggctataactacaaagcaaaatctgctggaaacctggacgagtcagattttggaccactggtaggagcagattcagtgtctgagaactttgatactgcatcccttgggtcactccagatgccaagtgggtttatgttaaccaaagatcaggaaagagcaatcaaggcgatgacaccagaacaagaagagacagcgtccctcctctccagcgttacccagggcatggagagtgcctatgtgtcccctagtggttatcgtttagttagtgaaacagaatggaatctcttgcagaaagaggtacataatgctggaaataaacttggtagacgttgtgatatgtgttccaattacgaaaaacagttacaaggaattcagattcaggaggctgaaacgagagaccaggtgaaaaaactacagctgatgctaaggcaagctaatgaccagttagagaagacaatgaaagataagcaggagctggaagacttcataaagcaaagcagcgaagattcgagtcaccagatctctgcactcgtcctaagagcccaggcctccgagatcttacttgaagagttacagcaggggctttcccaggcaaagagggatgttcaggaacagatggcggtgctgatgcagtcacgggaacaggtttcagaagagctggtgaggttacagaaagataatgacagtctccagggaaagcacagcctgcatgtgtcattacagcaagcagaagacttcatcctcccagacactacagaggcactgcgggagttggtattaaaataccgtgaggacatcattaatgtgcggacagcagcagaccacgtagaagaaaagctgaaggctgagatacttttcctaaaagagcagatccaagcagaacagtgtttaaaagaaaatcttgaagaaactctgcaactagaaatagaaaactgcaaggaggaaatagcttctatttctagcctaaaagctgaattagaaagaataaaagtggaaaaaggacaggctaccgttgaacaactaatgtttgaagagaagaataaagctcagagattacagacagaattagatgtcagtgagcaagtccagagggattttgtaaagctttcacagacccttcaggtgcagttagagcggatccggcaagctgactccttggagagaatccgggcaattctgaatgatactaaactgacagacattaaccagcttcctgagacatgacaccctcatggcaggattctagcctgcactttgggtttttaactcatctttagagcaacagtaattattatttaactcttaactgaagaaagagaagtcacaacaaaaggaagactggagaaatgcttacttctagagggagaagactgtgcggcacaggaaacagcaaacagtggggtgatctgcagcccagagaccttcaaatgcgaacactataaactccaggcttgattccaacaggcgtgggatcagatttggtgatggaaaaagcgctgtttccttgcctgctttctccaagacagattttcggaacacatttccctaccctaaagcgacatcccagtagtgtttggaattttctgttcatatagtgtttggaattttctgttcatagagctcatcagtaacagtattcagttagcagacagaagtgtagtatgctgtatgaatattttatattaaaatatgaaggtttgagagcaggccattggctactgactgtattttgttttccttttaccattttatcttatcttgctttggaggaccttaaatgctactgaaacttacctgagaaccataggactgtggcaaacaaaaccaattcatgaagtgaattaatgatgaggatctgaaaacttggctggggctatatatactggaagttgaaggttaaaggaaaagcacaagaaactttggaagcactttttctgcatacttagatgatcttcatgggcccacagggtaccaggataaagccgaactggtaccatctactcttttgaagtgttttagtctagttattggatcagtgaaaaacattagtatacgtttttaaataggctaatttttcaacttggatcattaggcttacgtactacttgtttcaaatgtgtcaaatacaaaaatggtaactaggttgacagatactttgtatttttcttttgaattcagacctggaatgtaagtaagtgacaatgcttatggaaagccagttagttagaattggaaatctgtcttgtcattttacaagcattagattcctttcctgtgtgaagaaagcctcagtgaaacaggtctttgccataactttatgaagtgctacagaaagcacaaagaattgattcatgttcatcaatacctgctgagagtactgtcccaggaatatccagtggatggattcatcatccaggaggttcaaaagtaagatggttttcaaatcatttttgagactggttgcataacagcagggtacctgaaagagccttctgggagttagtgaactaggtagattgttttgttcacataacgccaccatcaacttaaagtgaattgtctttgttataaatgaggtcactatggacttaccctaaagatcttctgtacttctctcttccataggacaaatgataagtactacatacctcatctcttgggttattattgtagtcttgcattcatggttatgaatttaaaaataaataccaattatggaaatagtactaaaggcttgccgcacatgaaacattattttaattggtttaaagtccctttataaagagtgctacatggtttagataaaggaaacatataactattgagttacaggggattttattaattataaaatgcaatcaatttaaattacgtaggtttaagactagtcccttggataagccccaagcgaatttgtcttcagattattaaaattagtgctgtaaatcagggtgggcaattcacagcctttctgaactgactgaactagagcttgcagtgaagtgttctgctgagactgagcaccttacagatatttttctccagaagatggtgctgggtaataaaatcatcacaattagggaatggttagtggtctctactgtggcaaatgccaactgttggaattcactttattgtagaaaaacccaaactgagactcttaagttttgtttagcaatgtgtttctggtatgaaacaaactactgtgtcactgtccaggtaggaaacaattctttcaactgggttttcagcataaatgggaactgatgtagaaggcaggatttagcccttctaggcaaaagaaaagctcagttgggtttcacgagtgttcctgtgcttatattcagtctgtgcctacatgttctcatgcatgtctaacctgatttacctcttacctgtaacctaccttatcatgtggcttttaattgacagtcactcagccatttctaagcagatatagtagtacctttcagaactcacattggcaagtgtaaaaagatgacttaaggtgaagtgaggacaaaatcacattctgcatactaacctatttttttctccctttaaggtgctaaacttgcacctcatgtccactcagtaacaagtattgggacgtagagcacagcctcactcagctctgaaaggtaatacagcttgtgaggaagtgagccagcagtggcctttgcaattgtggatcttgagctctgctctcagcagatttcaggtgtaaccatttgttaactgtactgaaggtgtgtcctcaagaagaaagtgttcaaattaaaaaagctgctgccaagt

SEQ ID NO: 25321 - DNA, 2875 bp, Homo sapiens
  source 1..2875: mol_type = unassigned DNA
atttcccgctgtcaggatgaggaggcggaggtcggcggtcgggtccgtctctgcccgcggctgtggcggcgccggcggatccagccttagcggtttctctctgggcggcggcggcggcggctcggttgacgcctcctccgccagctgagcccgcgggagcccaggacgccgcttccccgcccatccccgctccccgaggccggccgcctggtcatggcgcagccgggcccggcttcccagcctgacgaggatctgaagaggcaaaatgcagtattacaagctgcacaagatgatttgggacaccttcgaacccagctgtgggaagctcaagcagagatggagaatattaaggcgattgccacagtctctgagaacaccaagcaagaagctatagatgaagtgaaaagacagtggagagaagaagttgcttcacttcaggctgttatgaaagaaacagttcgtgactatgagcaccagttccaccttaggctggagcaggagcgaacacagtgggcacagtatagagaatccgcagagagggaaatagctgatttaagaagaaggctgtctgaaggtcaagaggaggaaaatttagaaaatgaaatgaaaaaggcccaagaggatgctgagaaacttcggtccgttgtgatgccaatggaaaaggaaattgcagctttgaaggataaactgacagaggctgaagacaaaattaaagagctggaggcctcaaaggttaaagaactgaatcattatctggaagctgagaaatcttgtaggactgatctagagatgtatgtagctgttttgaatactcagaaatctgttctacaggaagatgctgagaaactgcggaaagaattgcatgaagtttgccatctcttggagcaagagcgacaacaacacaaccagttaaaacatacgtggcagaaggccaatgaccagtttctggaatctcagcgtttactgatgagagacatgcagcgaatggagattgtgctaacttcagaacagctccgacaagttgaagaactgaagaagaaagatcaggaggatgatgaacaacaaagactcaataagagaaaggatcacaaaaaagcagatgttgaggaagaaataaaaataccagtagtgtgtgctttaactcaagaagaatcttcagcccagttatcaaatgaagaggagcatttagacagcacccgtggctcagttcattccttagatgcaggcttgctgttgccatctggagatcctttcagtaaatcggacaatgacatgtttaaagatggactcaggagagcacagtctacagacagcttgggaacctcgggctcattgcaatccaaagctttaggctataactacaaagcaaaatctgctggaaacctggacgagtcagattttggaccactggtaggagcagattcagtgtctgagaactttgatactgcatcccttgggtcactccagatgccaagtgggtttatgttaaccaaagatcaggaaagagcaatcaaggcgatgacaccagaacaagaagagacagcgtccctcctctccagcgttacccagggcatggagagtgcctatgtgtcccctagtggttatcgtttagttagtgaaacagaatggaatctcttgcagaaagaggtacataatgctggaaataaacttggtagacgttgtgatatgtgttccaattacgaaaaacagttacaaggaattcagattcaggaggctgaaacgagagaccaggtgaaaaaactacagctgatgctaaggcaagctaatgaccagttagagaagacaatgaaagataagcaggagctggaagacttcataaagcaaagcagcgaagattcgagtcaccagatctctgcactcgtcctaagagcccaggcctccgagatcttacttgaagagttacagcaggggctttcccaggcaaagagggatgttcaggaacagatggcggtgctgatgcagtcacgggaacaggtttcagaagagctggtgaggttacagaaagataatgacagtctccagggaaagcacagcctgcatgtgtcattacagcaagcagaagacttcatcctcccagacactacagaggcactgcgggagttggtattaaaataccgtgaggacatcattaatgtgcggacagcagcagaccacgtagaagaaaagctgaaggctgagatacttttcctaaaagagcagatccaagcagaacagtgtttaaaagaaaatcttgaagaaactctgcaactagaaatagaaaactgcaaggaggaaatagcttctatttctagcctaaaagctgaattagaaagaataaaagtggaaaaaggacagttggagtccacattaagagagaagtctcaacagcttgagagtcttcaggaaataaagatcagtttggaagagcagttaaagaaagagactgctgctaaggctaccgttgaacaactaatgtttgaagagaagaataaagctcagagattacagacagaattagatgtcagtgagcaagtccagagggattttgtaaagctttcacagacccttcaggtgcagttagagcggatccggcaagctgactccttggagagaatccgggcaattctgaatgatactaaactgacagacattaaccagcttcctgagacatgacaccctcatggcaggattctagcctgcactttgggtttttaactcatctttagagcaacagtaattattatttaactcttaactgaagaaagagaagtcacaacaaaaggaagactggagaaatgcttacttctagagggagaagactgtgcggcacaggaaacagcaaacagtggggtgatctgcagcccagagaccttca

SEQ ID NO: 25322 - DNA, 2363 bp, Homo sapiens
  source 1..2363: mol_type = unassigned DNA
ttatttcccgctgtcaggatgaggaggcggaggtcggcggtcgggtccgtctctgcccgcggctgtggcggcgccggcggatccagccttagcggtttctctctgggcggcggcggcggcggctcggttgacgcctcctccgccagctgagcccgcgggagcccaggacgccgcttccccgcccatccccgctccccgaggccggccgcctggtcatggcgcagccgggcccggcttcccagcctgacgtttctcttcagcaacgggtagcagaattggaaaaaattaatgcagaatttttacgtgcacaacagcagcttgaacaagaatttaatcaaaagagagcaaaatttaaggagttatatttggctaaagaggaggatctgaagaggcaaaatgcagtattacaagctgcacaagatgatttgggacaccttcgaacccagctgtgggaagctcaagcagagatggagaatattaaggcgattgccacagtctctgagaacaccaagcaagaagctatagatgaagtgaaaagacagtggagagaagaagttgcttcacttcaggctgttatgaaagaaacagttcgtgactatgagcaccagttccaccttaggctggagcaggagcgaacacagtgggcacagtatagagaatccgcagagagggaaatagctgatttaagaagaaggctgtctgaaggtcaagaggaggaaaatttagaaaatgaaatgaaaaaggcccaagaggatgctgagaaacttcggtccgttgtgatgccaatggaaaaggaaattgcagctttgaaggataaactgacagaggctgaagacaaaattaaagagctggaggcctcaaaggttaaagaactgaatcattatctggaagctgagaaatcttgtaggactgatctagagatgtatgtagctgttttgaatactcagaaatctgttctacaggaagatgctgagaaactgcggaaagaattgcatcaagagcgacaacaacacaaccagttaaaacatacgtggcagaaggccaatgaccagtttctggaatctcagcgtttactgatgagagacatgcagcgaatggagattgtgctaacttcagaacagctccgacaagttgaagaactgaagaagaaagatcaggaggatgatgaacaacaaagactcaataagagaaaggatcacaaaaaagcagatgttgaggaagaaataaaaataccagtagtgtgtgctttaactcaagaagaatcttcagcccagttatcaaatgaagaggagcatttagacagcacccgtggctcagttcattccttagatgcaggcttgctgttgccatctggagatcctttcagtaaatcggacaatgacatgtttaaagatggactcaggagagcacagtctacagacagcttgggaacctcgggctcattgcaatccaaagctttaggctataactacaaagcaaaatctgctggaaacctggacgagtcagattttggaccactggtaggagcagattcagtgtctgagaactttgatactgcatcccttgggtcactccagatgccaagtgggtttatgttaaccaaagatcaggaaagagcaatcaaggcgatgacaccagaacaagaagagacagcgtccctcctctccagcgttacccagggcatggagagtgcctatgtgtcccctagtggttatcgtttagttagtgaaacagaatggaatctcttgcagaaagaggtacataatgctggaaataaacttggtagacgttgtgatatgtgttccaattacgaaaaacagttacaaggaattcagattcaggaggctgaaacgagagaccaggtgaaaaaactacagctgatgctaaggcaagctaatgaccagttagagaagacaatgaaagataagcaggagctggaagacttcataaagcaaagcagcgaagattcgagtcaccagatctctgcactcgtcctaagagcccaggcctccgagatcttacttgaagagttacagcaggggctttcccaggcaaagagggatgttcaggaacagatggcggtgctgatgcagtcacgggaacaggtttcagaagagctggtgaggttacagaaagataatgacagtctccagggaaagcacagcctgcatgtgtcattacagcaagcagaagacttcatcctcccagacactacagaggcactgcgggagttggtattaaaataccgtgaggacatcattaatgtgcggacagcagcagaccacgtagaagaaaagctgaaggctgagatacttttcctaaaagagcagatccaagcagaacagtgtttaaaaaaaaaaaaa

SEQ ID NO: 25323 - DNA, 3004 bp, Homo sapiens
  source 1..3004: mol_type = unassigned DNA
atttcccgctgtcaggatgaggaggcggaggtcggcggtcgggtccgtctctgcccgcggctgtggcggcgccggcggatccagccttagcggtttctctctgggcggcggcggcggcggctcggttgacgcctcctccgccagctgagcccgcgggagcccaggacgccgcttccccgcccatccccgctccccgaggccggccgcctggtcatggcgcagccgggcccggcttcccagcctgacgtttctcttcagcaacgggtagcagaattggaaaaaattaatgcagaatttttacgtgcacaacagcagcttgaacaagaatttaatcaaaagagagcaaaatttaaggagttatatttggctaaagaggaggatctgaagaggcaaaatgcagtattacaagctgcacaagatgatttgggacaccttcgaacccagctgtgggaagctcaagcagagatggagaatattaaggcgattgccacagtctctgagaacaccaagcaagaagctatagatgaagtgaaaagacagtggagagaagaagttgcttcacttcaggctgttatgaaagaaacagttcgtgactatgagcaccagttccaccttaggctggagcaggagcgaacacagtgggcacagtatagagaatccgcagagagggaaatagctgatttaagaagaaggctgtctgaaggtcaagaggaggaaaatttagaaaatgaaatgaaaaaggcccaagaggatgctgagaaacttcggtccgttgtgatgccaatggaaaaggaaattgcagctttgaaggataaactgacagaggctgaagacaaaattaaagagctggaggcctcaaaggttaaagaactgaatcattatctggaagctgagaaatcttgtaggactgatctagagatgtatgtagctgttttgaatactcagaaatctgttctacaggaagatgctgagaaactgcggaaagaattgcatgaagtttgccatctcttggagcaagagcgacaacaacacaaccagttaaaacatacgtggcagaaggccaatgaccagtttctggaatctcagcgtttactgatgagagacatgcagcgaatggagattgtgctaacttcagaacagctccgacaagttgaagaactgaagaagaaagatcaggaggatgatgaacaacaaagactcaataagagaaaggatcacaaaaaagcagatgttgaggaagaaataaaaataccagtagtgtgtgctttaactcaagaagaatcttcagcccagttatcaaatgaagaggagcatttagacagcacccgtggctcagttcattccttagatgcaggcttgctgttgccatctggagatcctttcagtaaatcggacaatgacatgtttaaagatggactcaggagagcacagtctacagacagcttgggaacctcgggctcattgcaatccaaagctttaggctataactacaaagcaaaatctgctggaaacctggacgagtcagattttggaccactggtaggagcagattcagtgtctgagaactttgatactgcatcccttgggtcactccagatgccaagtgggtttatgttaaccaaagatcaggaaagagcaatcaaggcgatgacaccagaacaagaagagacagcgtccctcctctccagcgttacccagggcatggagagtgcctatgtgtcccctagtggttatcgtttagttagtgaaacagaatggaatctcttgcagaaagaggtacataatgctggaaataaacttggtagacgttgtgatatgtgttccaattacgaaaaacagttacaaggaattcagattcaggaggctgaaacgagagaccaggtgaaaaaactacagctgatgctaaggcaagctaatgaccagttagagaagacaatgaaagataagcaggagctggaagacttcataaagcaaagcagcgaagattcgagtcaccagatctctgcactcgtcctaagagcccaggcctccgagatcttacttgaagagttacagcaggggctttcccaggcaaagagggatgttcaggaacagatggcggtgctgatgcagtcacgggaacaggtttcagaagagctggtgaggttacagaaagataatgacagtctccagggaaagcacagcctgcatgtgtcattacagcaagcagaagacttcatcctcccagacactacagaggcactgcgggagttggtattaaaataccgtgaggacatcattaatgtgcggacagcagcagaccacgtagaagaaaagctgaaggctgagatacttttcctaaaagagcagatccaagcagaacagtgtttaaaagaaaatcttgaagaaactctgcaactagaaatagaaaactgcaaggaggaaatagcttctatttctagcctaaaagctgaattagaaagaataaaagtggaaaaaggacagttggagtccacattaagagagaagtctcaacagcttgagagtcttcaggaaataaagatcagtttggaagagcagttaaagaaagagactgctgctaaggctaccgttgaacaactaatgtttgaagagaagaataaagctcagagattacagacagaattagatgtcagtgagcaagtccagagggattttgtaaagctttcacagacccttcaggtgcagttagagcggatccggcaagctgactccttggagagaatccgggcaattctgaatgatactaaactgacagacattaaccagcttcctgagacatgacaccctcatggcaggattctagcctgcactttgggtttttaactcatctttagagcaacagtaattattatttaactcttaactgaagaaagagaagtcacaacaaaaggaagactggagaaatgcttacttctagagggagaagactgtgcggcacaggaaacagcaaacagtggggtgatctgcagcccagagaccttca

SEQ ID NO: 25324 - DNA, 2171 bp, Homo sapiens
  source 1..2171: mol_type = unassigned DNA
gcgctccgtcaccagggagtgcgggaatccgccgtttgcgctgaggcaatggcggcagctgcgccggtggccgcggacgacgatgagcggcggcggcggccgggggctgcactggaggactcccggtcccaggaaggggcaaatggtgaggccgagtcaggtgagctcagccggcttcgggctgagctggcaggcgccctggcagaaatggaaaccatgaaggctgtggcagaggtgagcgagagcacgaaggccgaggctgtggctgcggtgcagcggcagtgccaagaggaggtggcctcgctgcaggccatcctgaaagactccatcagcagctatgaagcccagatcaccgccctgaagcaggagcgacagcagcagcagcaggactgtgaggagaaggagcgggagctgggccgcctgaagcagctgctgtcccgggcctaccccctggactccctggagaagcagatggaaaaggcccacgaggactcggagaagctgcgggagatcgtactgcccatggaaaaggagatcgaggagctgaaggcgaagctgctgagggccgaggagctgattcaggagatccagagacgtccccggcatgccccttccctgcacggctccacggagttgctgcccctgtcccgggatccatcgcccccgctggagcctctggaggagctgagcggagatgggggtccagccgctgaggccttcgctcacaactgcgatgacagcgcctccatctcctccttctcccttggcggtggggtcggcagcagctcctccctgccccaaagccgccagggcctgagccctgaacaggaagagacggcctcgctggtgtctacgggcaccctggttcccgagggcatctacctgccccctcctggctaccagctcgtcccagacactcagtgggagcagctgcagacagagatgcaggtgctcctggcccaggtccagaactcagagcagctgctgcggaccctgcaagggaccgtgagccaggcccaggagcgggtgcagctgcagatggcggagctggtcaccacccacaagtgcctgcaccatgaggtaaagcggttgaatgaggaaaaccaagggctccgggccgagcagctgccatcctcagccccccagggctcgcagcaggagcagggcgaggaggaatcactgcccagctctgtgccagagctgcagcagctgctgtgctgcacgcggcaagaggcgagggcccggctgcaggcccaggagcacggggccgagcgcctgcggatcgagatcgtgacgctgcgggaggctctggaggaggagacagtggccagggccagcctggaggggcagctgagggtgcagcgggaggagacagcctccctgtgcagcctgaggacagagatggagcgggtgcagcaggaacagagcaaggcccagctcccagacctcctctcagaacagagggccaaggtgctgcggctgcaggcagagctggagaccagtgagcaggtgcagagggatttcgtgcgactgtcccaggccctgcaggtgcgcctagagcggatccgccaggctgagaccctggagcaagtgcgcagcatcatggatgaggcgccactcacggacgtcagggacatcaaggacacctgaggggtcaggatatccccacccccaccctgggaaagacgcctttccccactcctgaaccatgaggcctcgctctggggtcttggatggcttttccaccgtccctgagactggggttgaggggactgacgggggccaccaccgccccgccctccagcgcctcctcccagggtggctgggcctcctgttctcagggatcacacctgggtgaggggcccaagcccctcccggaaccaaaggtgcaggctcaggcctgcggctttctggctgctgtgctgcctcctgggctccagccctcccctgcccccagcccgtcccctgcccagggcacagcggagccatgggggctgggagtccccatcagaggcagtgaggtgggccccggccctgggacaggcagctgccttctggtctgcatgacactaagacgcttgtccacagcggcgacccaggcctccaagcttgcacagaggcaaggccagacttttccgtcgtttattttcaataaataagcagctcagcgc

SEQ ID NO: 25325 - DNA, 2820 bp, Homo sapiens
  source 1..2820: mol_type = unassigned DNA
aacaaaatgggggtggggacgtgcaagtttcagactccgactaactacgcggggactccgaggcgctcagaaaaatgaagccgacccggccctgccccgagggacgctccaagagggcggaggtgcagggagggccccgccacaattcgcggtaacgcaagccaggctcgggcggaagggcggccggagccgatcaaaggctggctccgggcaggggcagcgagggagcgagggggagctctccgcaggccggtgtcccggaggaggcataattggagcagggcttccaaggtcacggagagacgccgggcaagacctcttaaggatcctcttccgggcttgaaaggcaggcgtcctcccgaaccgcgcgacccagccaagaagagccggggcggggccggggccggggccgggggccgactcgggaatcttcggccgaggctcggcaatccccccatcctccgtccggggcctccagcccggggccgatccggaaacagccgagcggatccggaaacagccgagaggacccggaagcggtgcgctccgtcaccagggagtgcgggaatccgccgtttgcgctgaggcaatggcggcagctgcgccggtggccgcggacgacgatgagcggcggcggcggccgggggctgcactggaggactcccggtcccaggaaggggcaaatggtgaggccgagtcaggtgagctcagccggcttcgggctgagctggcaggcgccctggcagaaatggaaaccatgaaggctgtggcagaggtgagcgagagcacgaaggccgaggctgtggctgcggtgcagcggcagtgccaagaggaggtggcctcgctgcaggccatcctgaaagactccatcagcagctatgaagcccagatcaccgccctgaagcaggagcgacagcagcagcagcaggactgtgaggagaaggagcgggagctgggccgcctgaagcagctgctgtcccgggcctaccccctggactccctggagaagcagatggaaaaggcccacgaggactcggagaagctgcgggagatcgtactgcccatggaaaaggagatcgaggagctgaaggcgaagctgctgagggccgaggagctgattcaggagatccagagacgtccccggcatgccccttccctgcacggctccacggagttgctgcccctgtcccgggatccatcgcccccgctggagcctctggaggagctgagcggagatgggggtccagccgctgaggccttcgctcacaactgcgatgacagcgcctccatctcctccttctcccttggcggtggggtcggcagcagctcctccctgccccaaagccgccagggcctgagccctgaacaggaagagacggcctcgctggtgtctacgggcaccctggttcccgagggcatctacctgccccctcctggctaccagctcgtcccagacactcagtgggagcagctgcagacagagggccgacagctgcagaaggacctggagagcgtcagtcgcgagcgggacgagctccaagagggcctgagacggagcaatgaggactgtgccaagcagatgcaggtgctcctggcccaggtccagaactcagagcagctgctgcggaccctgcaagggaccgtgagccaggcccaggagcgggtgcagctgcagatggcggagctggtcaccacccacaagtgcctgcaccatgaggtaaagcggttgaatgaggaaaaccaagggctccgggccgagcagctgccatcctcagccccccagggctcgcagcaggagcagggcgaggaggaatcactgcccagctctgtgccagagctgcagcagctgctgtgctgcacgcggcaagaggcgagggcccggctgcaggcccaggagcacggggccgagcgcctgcggatcgagatcgtgacgctgcgggaggctctggaggaggagacagtggccagggccagcctggaggggcagctgagggtgcagcgggaggagacagaggtgctggaggcctccctgtgcagcctgaggacagagatggagcgggtgcagcaggaacagagcaaggcccagctcccagacctcctctcagaacagagggccaaggtgctgcggctgcaggcagagctggagaccagtgagcaggtgcagagggatttcgtgcgactgtcccaggccctgcaggtgcgcctagagcggatccgccaggctgagaccctggagcaagtgcgcagcatcatggatgaggcgccactcacggacgtcagggacatcaaggacacctgaggggtcaggatatccccacccccaccctgggaaagacgcctttccccactcctgaaccatgaggcctcgctctggggtcttggatggcttttccaccgtccctgagactggggttgaggggactgacgggggccaccaccgccccgccctccagcgcctcctcccagggtggctgggcctcctgttctcagggatcacacctgggtgaggggcccaagcccctcccggaaccaaaggtgcaggctcaggcctgcggctttctggctgctgtgctgcctcctgggctccagccctcccctgcccccagcccgtcccctgcccagggcacagcggagccatgggggctgggagtccccatcagaggcagtgaggtgggccccggccctgggacaggcagctgccttctggtctgcatgacactaagacgcttgtccacagcggcgacccaggcctccaagcttgcacagaggcaaggccagacttttccgtcgtttattttcaataaataagcagctcagcgc

SEQ ID NO: 25326 - DNA, 1645 bp, Homo sapiens
  source 1..1645: mol_type = unassigned DNA
ggagtgcgggaatccgccgtttgcgctgaggcaatggcggcagctgcgccggtggccgcggacgacgatgagcggcggcggcggccgggggctgactccatcagcagctatgaagcccagatcaccgccctgaagcaggagcgacagcagcagcagcaggactgtgaggagaaggagcgggagctgggccgcctgaagcagctgctgtcccgggcctaccccctggactccctggagaagcagatggaaaaggcccacgaggactcggagaagctgcgggagatcgtactgcccatggaaaaggagatcgaggagctgaaggcgaagctgctgagggccgaggagctgattcaggagatccagagacgtccccggcatgccccttccctgcacggctccacggagttgctgcccctgtcccgggatccatcgcccccgctggagcctctggaggagctgagcggagatgggggtccagccgctgaggccttcgctcacaactgcgatgacagcgcctccatctcctccttctcccttggcggtggggtcggcagcagctcctccctgccccaaagccgccagggcctgagccctgaacaggaagagacggcctcgctggtgtctacgggcaccctggttcccgagggcatctacctgccccctcctggctaccagctcgtcccagacactcagtgggagcagctgcagacagagggccgacagctgcagaaggacctggagagcgtcagtcgcgagcgggacgagctccaagagggcctgagacggagcaatgaggactgtgccaagcagatgcaggtgctcctggcccaggtccagaactcagagcagctgctgcggaccctgcaagggaccgtgagccaggcccaggagcgggtgcagctgcagatggcggagctggtcaccacccacaagtgcctgcaccatgaggtaaagcggttgaatgaggaaaaccaagggctccgggccgagcagctgccatcctcagccccccagggctcgcagcaggagcagggcgaggaggaatcactgcccagctctgtgccagagctgcagcagctgctgtgctgcacgcggcaagaggcgagggcccggctgcaggcccaggagcacggggccgagcgcctgcggatcgagatcgtgacgctgcgggaggctctggaggaggagacagtggccagggccagcctggaggggcagctgagggtgcagcgggaggagacagaggtgctggaggcctccctgtgcagcctgaggacagagatggagcgggtgcagcaggaacagagcaaggcccagctcccagacctcctctcagaacagagggccaaggtgctgcggctgcaggcagagctggagaccagtgagcaggtgcagagggatttcgtgcgactgtcccaggccctgcaggtgcgcctagagcggatccgccaggctgagaccctggagcaagtgcgcagcatcatggatgaggcgccactcacggacgtcagggacatcaaggacacctgaggggtcaggatatccccacccccaccctgggaaagacgcctttccccactcctgaaccatgaggcctcgctctggggtcttggatggcttttccaccgtccctgagactggggtt

SEQ ID NO: 25327 - DNA, 4679 bp, Homo sapiens
  source 1..4679: mol_type = unassigned DNA
ggcaccgcacacataaatcacgggtgggaggcaggcttggttcccgcttggttccccctgcactgggaagctgccgccccgcttcccttgctcacacagggctttgcagtagtggtggcagccgcggcagaaactggctctggggaagcaattgattcgtctactgccagcagcccggagttgcctacgcggactggaaaggaagggagaagggagagagagagagagagagagagagagagagagagagactcacagagctaaaaccttcatccatgtggaggacagtctgagggagccactgtcccttgtccactgactcactggctggtccgagttttctccgcttctggcagtggcacctccgctgagcttttaaaccaagtcattgggacttagcgtctttctacccggcagggaagggaggagttggcaagaatttggctcacccattccccctgcaagcctccagcgtcgcggagcactagacatctactatgactgacaccgtgttcagcaacagttctaaccgttggatgtaccccagtgaccggccccttcaatcaaatgataaagaacagctccaggcaggctggtccgtccaccccggtggtcagcctgacaggcagaggaagcaggaagagctgactgatgaggagaaagaaatcatcaacagggtgattgctcgagctgagaaaatggaagagatggagcaggagcgaatcggacgcctggtggaccgcctagaaaacatgaggaagaacgtggctggagatggggtgaaccgctgcatactgtgtggagaacagctggggatgctgggctctgcctgtgtagtatgtgaggactgtaagaagaacgtctgcaccaagtgcggagtggagaccaacaaccgcctgcattctgtgtggctctgcaaaatctgcattgagcagagggaggtgtggaagcgttctggagcgtggttcttcaaaggcttccccaaacaggtcctcccacagcctatgcctataaagaagaccaagccccagcagcctgtcagtgagcctgctgcccctgaacagcctgctcctgagcccaagcaccctgcccgggctccagctcgaggtgacagtgaagataggaggggcccgggtcagaagacaggccctgacccagcctctgctcccgggcgaggaaactatgggcctcccgtgcgcagggcctccgaggcacgaatgagctcatctagccgagattcagagagctgggaccacagtgggggtgctggagactccagccggagcccagcaggtttgagacgggccaactcagtccaggcctccagacctgccccaggctcggtgcagagcccagcgccacctcagcctgggcagccagggaccccaggaggaagcagaccgggtcctgggccagcaggacgctttccagatcagaagccagaggtggctccgagcgaccctgggaccactgccccaccccgagaggagagaacagggggagtcgggggctacccagcagttggagccagagaggaccgaatgagccacccctccggaccctattcccaagcatctgcagctgccccccagcctgctgcagcccgccagccaccacccccagaggaggaggaagaggaagccaacagctacgattcggatgaagcaaccaccctgggtgccctggaattcagccttctctacgaccaggacaacagctccctgcagtgcaccatcattaaggccaagggcctgaagcccatggattcaaacggcttggctgatccctacgttaagctgcacctcctgccgggagccagcaagtccaacaagcttcgtacaaaaactctgcggaatacccggaaccccatctggaatgagaccctcgtgtatcacggcatcaccgatgaggacatgcaaaggaagaccctcaggatctccgtctgtgatgaggacaaatttggccacaatgaatttattggtgagaccagattctccctcaagaaactgaagcccaaccagaggaagaatttcaacatctgcctggagcgagtgattcctatgaaacgtgctgggaccaccgggtcagcccgaggcatggccctttatgaggaagagcaggtggagcgtgttggtgacatcgaggagcgtggcaagatcctggtctccctcatgtacagcacacagcagggaggcctcattgtgggcatcatacgctgcgtgcacctggctgccatggacgctaatggctactcagacccattcgtcaagctctggctgaaaccggacatgggaaagaaggccaaacacaagactcaaattaaaaagaaaaccttgaatcccgaattcaatgaggagtttttctatgacatcaaacacagtgacctggcaaagaagtcactggacatttcagtctgggactatgacatcggcaagtccaatgattacatcggaggctgccagctggggatctctgccaagggagagcgcttaaaacactggtacgagtgtctgaaaaataaagacaagaagatagagcgctggcaccagctacagaatgagaaccacgtgtcaagtgattaggctagtgcccaggtccccatctccatgtcccgggtcccccccagcctgctctagctgcccaccgcaccctgatctctcttctctatgcctacctccccccataccctgctgatctccctgagcctgcctttgagcccccgtcacgttgggcactgctgccaaagactccctcctccctgatgctgggatgtgggctctgaatacagcccctctctcatccctgggatggagcaatggggatggggttggggagacgtttacaaagaggttgatcatttaataacctctcagtttgggtaaattacaaaggttcttcatcatttaggactgtttttagaccctcctagccttgaacacacacatgtacacacacacacacacacacacacacacaccctttcattccctgtgttgtgtctctgtatatccccagttgtcagcagacccggacaatgctgtgagagaagcattggggcacaaatagagcctccgggctcccactgccccctgagatgtacaccctgattgccaggaaaacagactgctgtgttcagtaacacaccctccctgctccaagtgcaccaggatgcaaatgcacagaattcaccaggggcttggacgctctcctctttccgaatgtcacctgtgtgcttcctagcaaaacaaaaacaaacgacaacaacaaaaaacccttcctctgtcaccttttctcctcctccctcttctttcccttccatgatagtagattctctctttctcagcctctcccctctcctttctctccctgcctttcttccctttgcctttctctctctctaaagcagtaacaccgcaaaaacaacagcaaaaaaagtgtatgttaacctagcctcacccccttgctctcaccagcctgaccaggaaactgagaaactggcccaaacctgagattccacttgggcccacgcttcttaactgacccactcctcccgttggcagaaccagacattcccagggcttgggccaatggctggcactgccctgagtgcatggcagcatccctcaagctgtgtagatgccccatagaggactctctcatccgtgggctccccgggtgggcacggaggcatttagaagaccagggccatgggtctgaggaagcctcagccaaagcctccagcctttctcctttctccgctcttaggtaaatgaacaagctaccctcctccccaatgcccttgactctgtttcattgactcttttgcatcccatctctcactcagaaccccctccagtctctctgtctctctttgtctgtctctctgtctcctgcactctcgttactaagcttcctgggagaatcaaataatatcatggctatggaacagtagagagagacaggcctgatgccaaaggctttgggctcatcatcaatctttcactttcttcctataaaaaaaattattttataaaggaggaaaaggcaatgtgggcaaacattacaaatttgaggttgaagtcaggcaatcttcaatgccctgtgagaaaggttcgattttcccaattttgatgaagtcttccctcatgaaaatcactcccagtcatcccaaacccctgacattctctacagaagcatcagacagatactcaaactctcactttccccaaatcacatctcttaacttttcaacgccctccaccctcagctccctgcacaattcatgggaggactcatttcttgccttgaataaccattttctaaacatcgagctcttcaccttccccaaggtggccaacagcttcctggctgccatctttccttttgaccttatctttccccattagtccctggtggcacctactctcagcccacctccctcaccacagtttccccttaggagacagcatgctggctgtgtcgcccaagcctgatgctggtgtaggcgctggaatcagcatgcagcaagctcacagtgcccctagtctgggtgcccgctgtccccgacaaatgtaaccacctccctgcctagaatacacacacgtcctccggtgcatgcacaaccacccagcatctttctttgtgatgatgtagccaaaaataaagtaggagcatccaag

SEQ ID NO: 25328 - DNA, 4452 bp, Homo sapiens
  source 1..4452: mol_type = unassigned DNA
tttctttttgtcttggtcctgcatgatttaggggtagttgatgtgtctgtgtgtctacgtgtgtgcactggtgctttgattttattttgggaagagtaggagagtcaaatgaacaattttctttcaggcacctccgctgagcttttaaaccaagtcattgggacttagcgtctttctacccggcagggaagggaggagttggcaagaatttggctcacccattccccctgcaagcctccagcgtcgcggagcactagacatctactatgactgacaccgtgttcagcaacagttctaaccgttggatgtaccccagtgaccggccccttcaatcaaatgataaagaacagctccaggcaggctggtccgtccaccccggtggtcagcctgacaggcagaggaagcaggaagagctgactgatgaggagaaagaaatcatcaacagggtgattgctcgagctgagaaaatggaagagatggagcaggagcgaatcggacgcctggtggaccgcctagaaaacatgaggaagaacgtggctggagatggggtgaaccgctgcatactgtgtggagaacagctggggatgctgggctctgcctgtgtagtatgtgaggactgtaagaagaacgtctgcaccaagtgcggagtggagaccaacaaccgcctgcattctgtgtggctctgcaaaatctgcattgagcagagggaggtgtggaagcgttctggagcgtggttcttcaaaggcttccccaaacaggtcctcccacagcctatgcctataaagaagaccaagccccagcagcctgtcagtgagcctgctgcccctgaacagcctgctcctgagcccaagcaccctgcccgggctccagctcgaggtgacagtgaagataggaggggcccgggtcagaagacaggccctgacccagcctctgctcccgggcgaggaaactatgggcctcccgtgcgcagggcctccgaggcacgaatgagctcatctagccgagattcagagagctgggaccacagtgggggtgctggagactccagccggagcccagcaggtttgagacgggccaactcagtccaggcctccagacctgccccaggctcggtgcagagcccagcgccacctcagcctgggcagccagggaccccaggaggaagcagaccgggtcctgggccagcaggacgctttccagatcagaagccagaggtggctccgagcgaccctgggaccactgccccaccccgagaggagagaacagggggagtcgggggctacccagcagttggagccagagaggaccgaatgagccacccctccggaccctattcccaagcatctgcagctgccccccagcctgctgcagcccgccagccaccacccccagaggaggaggaagaggaagccaacagctacgattcggatgaagcaaccaccctgggtgccctggaattcagccttctctacgaccaggacaacagctccctgcagtgcaccatcattaaggccaagggcctgaagcccatggattcaaacggcttggctgatccctacgttaagctgcacctcctgccgggagccagcaagtccaacaagcttcgtacaaaaactctgcggaatacccggaaccccatctggaatgagaccctcgtgtatcacggcatcaccgatgaggacatgcaaaggaagaccctcaggatctccgtctgtgatgaggacaaatttggccacaatgaatttattggtgagaccagattctccctcaagaaactgaagcccaaccagaggaagaatttcaacatctgcctggagcgagtgattcctatgaaacgtgctgggaccaccgggtcagcccgaggcatggccctttatgaggaagagcaggtggagcgtgttggtgacatcgaggagcgtggcaagatcctggtctccctcatgtacagcacacagcagggaggcctcattgtgggcatcatacgctgcgtgcacctggctgccatggacgctaatggctactcagacccattcgtcaagctctggctgaaaccggacatgggaaagaaggccaaacacaagactcaaattaaaaagaaaaccttgaatcccgaattcaatgaggagtttttctatgacatcaaacacagtgacctggcaaagaagtcactggacatttcagtctgggactatgacatcggcaagtccaatgattacatcggaggctgccagctggggatctctgccaagggagagcgcttaaaacactggtacgagtgtctgaaaaataaagacaagaagatagagcgctggcaccagctacagaatgagaaccacgtgtcaagtgattaggctagtgcccaggtccccatctccatgtcccgggtcccccccagcctgctctagctgcccaccgcaccctgatctctcttctctatgcctacctccccccataccctgctgatctccctgagcctgcctttgagcccccgtcacgttgggcactgctgccaaagactccctcctccctgatgctgggatgtgggctctgaatacagcccctctctcatccctgggatggagcaatggggatggggttggggagacgtttacaaagaggttgatcatttaataacctctcagtttgggtaaattacaaaggttcttcatcatttaggactgtttttagaccctcctagccttgaacacacacatgtacacacacacacacacacacacacacacaccctttcattccctgtgttgtgtctctgtatatccccagttgtcagcagacccggacaatgctgtgagagaagcattggggcacaaatagagcctccgggctcccactgccccctgagatgtacaccctgattgccaggaaaacagactgctgtgttcagtaacacaccctccctgctccaagtgcaccaggatgcaaatgcacagaattcaccaggggcttggacgctctcctctttccgaatgtcacctgtgtgcttcctagcaaaacaaaaacaaacgacaacaacaaaaaacccttcctctgtcaccttttctcctcctccctcttctttcccttccatgatagtagattctctctttctcagcctctcccctctcctttctctccctgcctttcttccctttgcctttctctctctctaaagcagtaacaccgcaaaaacaacagcaaaaaaagtgtatgttaacctagcctcacccccttgctctcaccagcctgaccaggaaactgagaaactggcccaaacctgagattccacttgggcccacgcttcttaactgacccactcctcccgttggcagaaccagacattcccagggcttgggccaatggctggcactgccctgagtgcatggcagcatccctcaagctgtgtagatgccccatagaggactctctcatccgtgggctccccgggtgggcacggaggcatttagaagaccagggccatgggtctgaggaagcctcagccaaagcctccagcctttctcctttctccgctcttaggtaaatgaacaagctaccctcctccccaatgcccttgactctgtttcattgactcttttgcatcccatctctcactcagaaccccctccagtctctctgtctctctttgtctgtctctctgtctcctgcactctcgttactaagcttcctgggagaatcaaataatatcatggctatggaacagtagagagagacaggcctgatgccaaaggctttgggctcatcatcaatctttcactttcttcctataaaaaaaattattttataaaggaggaaaaggcaatgtgggcaaacattacaaatttgaggttgaagtcaggcaatcttcaatgccctgtgagaaaggttcgattttcccaattttgatgaagtcttccctcatgaaaatcactcccagtcatcccaaacccctgacattctctacagaagcatcagacagatactcaaactctcactttccccaaatcacatctcttaacttttcaacgccctccaccctcagctccctgcacaattcatgggaggactcatttcttgccttgaataaccattttctaaacatcgagctcttcaccttccccaaggtggccaacagcttcctggctgccatctttccttttgaccttatctttccccattagtccctggtggcacctactctcagcccacctccctcaccacagtttccccttaggagacagcatgctggctgtgtcgcccaagcctgatgctggtgtaggcgctggaatcagcatgcagcaagctcacagtgcccctagtctgggtgcccgctgtccccgacaaatgtaaccacctccctgcctagaatacacacacgtcctccggtgcatgcacaaccacccagcatctttctttgtgatgatgtagccaaaaataaagtaggagcatccaagaaaa

SEQ ID NO: 25329 - DNA, 4179 bp, Homo sapiens
  source 1..4179: mol_type = unassigned DNA
atgactgacaccgtgttcagcaacagttctaaccgttggatgtaccccagtgaccggccccttcaatcaaatgataaagaacagctccaggcaggctggtccgtccaccccggtggtcagcctgacaggcagaggaagcaggaagagctgactgatgaggagaaagaaatcatcaacagggtgattgctcgagctgagaaaatggaagagatggagcaggagcgaatcggacgcctggtggaccgcctagaaaacatgaggaagaacgtggctggagatggggtgaaccgctgcatactgtgtggagaacagctggggatgctgggctctgcctgtgtagtatgtgaggactgtaagaagaacgtctgcaccaagtgcggagtggagaccaacaaccgcctgcattctgtgtggctctgcaaaatctgcattgagcagagggaggtgtggaagcgttctggagcgtggttcttcaaaggcttccccaaacaggtcctcccacagcctatgcctataaagaagaccaagccccagcagcctgtcagtgagcctgctgcccctgaacagcctgctcctgagcccaagcaccctgcccgggctccagctcgaggtgacagtgaagataggaggggcccgggtcagaagacaggccctgacccagcctctgctcccgggcgaggaaactatgggcctcccgtgcgcagggcctccgaggcacgaatgagctcatctagccgagattcagagagctgggaccacagtgggggtgctggagactccagccggagcccagcaggtttgagacgggccaactcagtccaggcctccagacctgccccaggctcggtgcagagcccagcgccacctcagcctgggcagccagggaccccaggaggaagcagaccgggtcctgggccagcaggacgctttccagatcagaagccagaggtggctccgagcgaccctgggaccactgccccaccccgagaggagagaacagggggagtcgggggctacccagcagttggagccagagaggaccgaatgagccacccctccggaccctattcccaagcatctgcagctgccccccagcctgctgcagcccgccagccaccacccccagaggaggaggaagaggaagccaacagctacgattcggatgaagcaaccaccctgggtgccctggaattcagccttctctacgaccaggacaacagctccctgcagtgcaccatcattaaggccaagggcctgaagcccatggattcaaacggcttggctgatccctacgttaagctgcacctcctgccgggagccagcaagtccaacaagcttcgtacaaaaactctgcggaatacccggaaccccatctggaatgagaccctcgtgtatcacggcatcaccgatgaggacatgcaaaggaagaccctcaggatctccgtctgtgatgaggacaaatttggccacaatgaatttattggtgagaccagattctccctcaagaaactgaagcccaaccagaggaagaatttcaacatctgcctggagcgagtgattcctatgaaacgtgctgggaccaccgggtcagcccgaggcatggccctttatgaggaagagcaggtggagcgtgttggtgacatcgaggagcgtggcaagatcctggtctccctcatgtacagcacacagcagggaggcctcattgtgggcatcatacgctgcgtgcacctggctgccatggacgctaatggctactcagacccattcgtcaagctctggctgaaaccggacatgggaaagaaggccaaacacaagactcaaattaaaaagaaaaccttgaatcccgaattcaatgaggagtttttctatgacatcaaacacagtgacctggcaaagaagtcactggacatttcagtctgggactatgacatcggcaagtccaatgattacatcggaggctgccagctggggatctctgccaagggagagcgcttaaaacactggtacgagtgtctgaaaaataaagacaagaagatagagcgctggcaccagctacagaatgagaaccacgtgtcaagtgattaggctagtgcccaggtccccatctccatgtcccgggtcccccccagcctgctctagctgcccaccgcaccctgatctctcttctctatgcctacctccccccataccctgctgatctccctgagcctgcctttgagcccccgtcacgttgggcactgctgccaaagactccctcctccctgatgctgggatgtgggctctgaatacagcccctctctcatccctgggatggagcaatggggatggggttggggagacgtttacaaagaggttgatcatttaataacctctcagtttgggtaaattacaaaggttcttcatcatttaggactgtttttagaccctcctagccttgaacacacacatgtacacacacacacacacacacacacacacaccctttcattccctgtgttgtgtctctgtatatccccagttgtcagcagacccggacaatgctgtgagagaagcattggggcacaaatagagcctccgggctcccactgccccctgagatgtacaccctgattgccaggaaaacagactgctgtgttcagtaacacaccctccctgctccaagtgcaccaggatgcaaatgcacagaattcaccaggggcttggacgctctcctctttccgaatgtcacctgtgtgcttcctagcaaaacaaaaacaaacgacaacaacaaaaaacccttcctctgtcaccttttctcctcctccctcttctttcccttccatgatagtagattctctctttctcagcctctcccctctcctttctctccctgcctttcttccctttgcctttctctctctctaaagcagtaacaccgcaaaaacaacagcaaaaaaagtgtatgttaacctagcctcacccccttgctctcaccagcctgaccaggaaactgagaaactggcccaaacctgagattccacttgggcccacgcttcttaactgacccactcctcccgttggcagaaccagacattcccagggcttgggccaatggctggcactgccctgagtgcatggcagcatccctcaagctgtgtagatgccccatagaggactctctcatccgtgggctccccgggtgggcacggaggcatttagaagaccagggccatgggtctgaggaagcctcagccaaagcctccagcctttctcctttctccgctcttaggtaaatgaacaagctaccctcctccccaatgcccttgactctgtttcattgactcttttgcatcccatctctcactcagaaccccctccagtctctctgtctctctttgtctgtctctctgtctcctgcactctcgttactaagcttcctgggagaatcaaataatatcatggctatggaacagtagagagagacaggcctgatgccaaaggctttgggctcatcatcaatctttcactttcttcctataaaaaaaattattttataaaggaggaaaaggcaatgtgggcaaacattacaaatttgaggttgaagtcaggcaatcttcaatgccctgtgagaaaggttcgattttcccaattttgatgaagtcttccctcatgaaaatcactcccagtcatcccaaacccctgacattctctacagaagcatcagacagatactcaaactctcactttccccaaatcacatctcttaacttttcaacgccctccaccctcagctccctgcacaattcatgggaggactcatttcttgccttgaataaccattttctaaacatcgagctcttcaccttccccaaggtggccaacagcttcctggctgccatctttccttttgaccttatctttccccattagtccctggtggcacctactctcagcccacctccctcaccacagtttccccttaggagacagcatgctggctgtgtcgcccaagcctgatgctggtgtaggcgctggaatcagcatgcagcaagctcacagtgcccctagtctgggtgcccgctgtccccgacaaatgtaaccacctccctgcctagaatacacacacgtcctccggtgcatgcacaaccacccagcatctttctttgtgatgatgtagccaaaaataaagtaggagcatcc

SEQ ID NO: 25330 - DNA, 4440 bp, Homo sapiens
  source 1..4440: mol_type = unassigned DNA
gctcacacagggctttgcagtagtggtggcagccgcggcagaaactggctctggggaagcaattgattcgtctactgccagcagcccggagttgcctacgcggactggaaaggaagggagaagggagagagagagagagagagagagagagagagagagagactcacagagctaaaaccttcatccatgtggaggacagtctgagggagccactgtcccttgtccactgactcactggctggtccgagttttctccgcttctggcagtggcacctccgctgagcttttaaaccaagtcattgggacttagcgtctttctacccggcagggaagggaggagttggcaagaatttggctcacccattccccctgcaagcctccagcgtcgcggagcactagacatctactatgactgacaccgtgttcagcaacagttctaaccgttggatgtaccccagtgaccggccccttcaatcaaagttgaaagatagacgcctggtggaccgcctagaaaacatgaggaagaacgtggctggagatggggtgaaccgctgcatactgtgtggagaacagctggggatgctgggctctgcctgtgtagtatgtgaggactgtaagaagaacgtctgcaccaagtgcggagtggagaccaacaaccgcctgcattctgtgtggctctgcaaaatctgcattgagcagagggaggtgtggaagcgttctggagcgtggttcttcaaaggcttccccaaacaggtcctcccacagcctatgcctataaagaagaccaagccccagcagcctgtcagtgagcctgctgcccctgaacagcctgctcctgagcccaagcaccctgcccgggctccagctcgaggtgacagtgaagataggaggggcccgggtcagaagacaggccctgacccagcctctgctcccgggcgaggaaactatgggcctcccgtgcgcagggcctccgaggcacgaatgagctcatctagccgagattcagagagctgggaccacagtgggggtgctggagactccagccggagcccagcaggtttgagacgggccaactcagtccaggcctccagacctgccccaggctcggtgcagagcccagcgccacctcagcctgggcagccagggaccccaggaggaagcagaccgggtcctgggccagcaggacgctttccagatcagaagccagaggtggctccgagcgaccctgggaccactgccccaccccgagaggagagaacagggggagtcgggggctacccagcagttggagccagagaggaccgaatgagccacccctccggaccctattcccaagcatctgcagctgccccccagcctgctgcagcccgccagccaccacccccagaggaggaggaagaggaagccaacagctacgattcggatgaagcaaccaccctgggtgccctggaattcagccttctctacgaccaggacaacagctccctgcagtgcaccatcattaaggccaagggcctgaagcccatggattcaaacggcttggctgatccctacgttaagctgcacctcctgccgggagccagcaagtccaacaagcttcgtacaaaaactctgcggaatacccggaaccccatctggaatgagaccctcgtgtatcacggcatcaccgatgaggacatgcaaaggaagaccctcaggatctccgtctgtgatgaggacaaatttggccacaatgaatttattggtgagaccagattctccctcaagaaactgaagcccaaccagaggaagaatttcaacatctgcctggagcgagtgattcctatgaaacgtgctgggaccaccgggtcagcccgaggcatggccctttatgaggaagagcaggtggagcgtgttggtgacatcgaggagcgtggcaagatcctggtctccctcatgtacagcacacagcagggaggcctcattgtgggcatcatacgctgcgtgcacctggctgccatggacgctaatggctactcagacccattcgtcaagctctggctgaaaccggacatgggaaagaaggccaaacacaagactcaaattaaaaagaaaaccttgaatcccgaattcaatgaggagtttttctatgacatcaaacacagtgacctggcaaagaagtcactggacatttcagtctgggactatgacatcggcaagtccaatgattacatcggaggctgccagctggggatctctgccaagggagagcgcttaaaacactggtacgagtgtctgaaaaataaagacaagaagatagagcgctggcaccagctacagaatgagaaccacgtgtcaagtgattaggctagtgcccaggtccccatctccatgtcccgggtcccccccagcctgctctagctgcccaccgcaccctgatctctcttctctatgcctacctccccccataccctgctgatctccctgagcctgcctttgagcccccgtcacgttgggcactgctgccaaagactccctcctccctgatgctgggatgtgggctctgaatacagcccctctctcatccctgggatggagcaatggggatggggttggggagacgtttacaaagaggttgatcatttaataacctctcagtttgggtaaattacaaaggttcttcatcatttaggactgtttttagaccctcctagccttgaacacacacatgtacacacacacacacacacacacacacacaccctttcattccctgtgttgtgtctctgtatatccccagttgtcagcagacccggacaatgctgtgagagaagcattggggcacaaatagagcctccgggctcccactgccccctgagatgtacaccctgattgccaggaaaacagactgctgtgttcagtaacacaccctccctgctccaagtgcaccaggatgcaaatgcacagaattcaccaggggcttggacgctctcctctttccgaatgtcacctgtgtgcttcctagcaaaacaaaaacaaacgacaacaacaaaaaacccttcctctgtcaccttttctcctcctccctcttctttcccttccatgatagtagattctctctttctcagcctctcccctctcctttctctccctgcctttcttccctttgcctttctctctctctaaagcagtaacaccgcaaaaacaacagcaaaaaaagtgtatgttaacctagcctcacccccttgctctcaccagcctgaccaggaaactgagaaactggcccaaacctgagattccacttgggcccacgcttcttaactgacccactcctcccgttggcagaaccagacattcccagggcttgggccaatggctggcactgccctgagtgcatggcagcatccctcaagctgtgtagatgccccatagaggactctctcatccgtgggctccccgggtgggcacggaggcatttagaagaccagggccatgggtctgaggaagcctcagccaaagcctccagcctttctcctttctccgctcttaggtaaatgaacaagctaccctcctccccaatgcccttgactctgtttcattgactcttttgcatcccatctctcactcagaaccccctccagtctctctgtctctctttgtctgtctctctgtctcctgcactctcgttactaagcttcctgggagaatcaaataatatcatggctatggaacagtagagagagacaggcctgatgccaaaggctttgggctcatcatcaatctttcactttcttcctataaaaaaaattattttataaaggaggaaaaggcaatgtgggcaaacattacaaatttgaggttgaagtcaggcaatcttcaatgccctgtgagaaaggttcgattttcccaattttgatgaagtcttccctcatgaaaatcactcccagtcatcccaaacccctgacattctctacagaagcatcagacagatactcaaactctcactttccccaaatcacatctcttaacttttcaacgccctccaccctcagctccctgcacaattcatgggaggactcatttcttgccttgaataaccattttctaaacatcgagctcttcaccttccccaaggtggccaacagcttcctggctgccatctttccttttgaccttatctttccccattagtccctggtggcacctactctcagcccacctccctcaccacagtttccccttaggagacagcatgctggctgtgtcgcccaagcctgatgctggtgtaggcgctggaatcagcatgcagcaagctcacagtgcccctagtctgggtgcccgctgtccccgacaaatgtaaccacctccctgcctagaatacacacacgtcctccggtgcatgcacaaccacccagcatctttctttgtgatgatgtagccaaaaataaagtaggagcatcc

SEQ ID NO: 25331 - DNA, 2581 bp, Homo sapiens
  source 1..2581: mol_type = unassigned DNA
gttcctaacccttgatcttggcttgttaaccctttctgagcttccctttagcggggggatgaggatggtcggctgtttccacatttaagggcagagctgggtgaagggtggtgttagtgctcgagggtcacgcgcgggtggctttgccgcggtggtggcagcggtggcagaggcgacaccgctggaggcggcggagggacgggcccaccaacgctgcaggccggcacctccgctgagcttttaaaccaagtcattgggacttagcgtctttctacccggcagggaagggaggagttggcaagaatttggctcacccattccccctgcaagcctccagcgtcgcggagcactagacatctactatgactgacaccgtgttcagcaacagttctaaccgttggatgtaccccagtgaccggccccttcaatcaaatgataaagaacagctccaggcaggctggtccgtccaccccggtggtcagcctgacaggcagaggaagcaggaagagctgactgatgaggagaaagaaatcatcaacagggtgattgctcgagctgagaaaatggaagagatggagcaggagcgaatcggacgcctggtggaccgcctagaaaacatgaggaagaacgtggctggagatggggtgaaccgctgcatactgtgtggagaacagctggggatgctgggctctgcctgtgtagtatgtgaggactgtaagaagaacgtctgcaccaagtgcggagtggagaccaacaaccgcctgcattctgtgtggctctgcaaaatctgcattgagcagagggaggtgtggaagcgttctggagcgtggttcttcaaaggcttccccaaacaggtcctcccacagcctatgcctataaagaagaccaagccccagcagcctgtcagtgagcctgctgcccctgaacagcctgctcctgagcccaagcaccctgcccgggctccagctcgaggtgacagtgaagataggaggggcccgggtcagaagacaggccctgacccagcctctgctcccgggcgaggaaactatgggcctcccgtgcgcagggcctccgaggcacgaatgagctcatctagccgagattcagagagctgggaccacagtgggggtgctggagactccagccggagcccagcaggtttgagacgggccaactcagtccaggcctccagacctgccccaggctcggtgcagagcccagcgccacctcagcctgggcagccagggaccccaggaggaagcagaccgggtcctgggccagcaggacgctttccagatcagaagccagaggtggctccgagcgaccctgggaccactgccccaccccgagaggagagaacagggggagtcgggggctacccagcagttggagccagagaggaccgaatgagccacccctccggaccctattcccaagcatctgcagctgccccccagcctgctgcagcccgccagccaccacccccagaggaggaggaagaggaagccaacagctacgattcggatgaagcaaccaccctgggtgccctggaattcagccttctctacgaccaggacaacagctccctgcagtgcaccatcattaaggccaagggcctgaagcccatggattcaaacggcttggctgatccctacgttaagctgcacctcctgccgggagccagcaagtccaacaagcttcgtacaaaaactctgcggaatacccggaaccccatctggaatgagaccctcgtgtatcacggcatcaccgatgaggacatgcaaaggaagaccctcaggatctccgtctgtgatgaggacaaatttggccacaatgaatttattggtgagaccagattctccctcaagaaactgaagcccaaccagaggaagaatttcaacatctgcctggagcgagtgattcctatgaaacgtgctgggaccaccgggtcagcccgaggcatggccctttatgaggaagagcaggtggagcgtgttggtgacatcgaggagcgtggcaagatcctggtctccctcatgtacagcacacagcagggaggcctcattgtgggcatcatacgctgcgtgcacctggctgccatggacgctaatggctactcagacccattcgtcaagctctggctgaaaccggacatgggaaagaaggccaaacacaagactcaaattaaaaagaaaaccttgaatcccgaattcaatgaggagtttttctatgacatcaaacacagtgacctggcaaagaagtcactggacatttcagtctgggactatgacatcggcaagtccaatgattacatcggaggctgccagctggggatctctgccaagggagagcgcttaaaacactggtacgagtgtctgaaaaataaagacaagaagatagagcgctggcaccagctacagaatgagaaccacgtgtcaagtgattaggctagtgcccaggtccccatctccatgtcccgggtcccccccagcctgctctagctgcccaccgcaccctgatctctcttctctatgcctacctccccccataccctgctgatctccctgagcctgcctttgag

SEQ ID NO: 25332 - DNA, 492 bp, Homo sapiens
  source 1..492: mol_type = unassigned DNA
ggtggctttgccgcggtggtggcagcggtggcagaggcgacaccgctggaggcggcggagggacgggcccaccaacgctgcaggccggttcttgctctgttgcccaggctggactgcagtggcaccagcatggctcactgcagcctcgaccccctaggctcaagtgatcctcctgcttcagcctcctgagtagctgggaccacaggtcatcagttgggtcaaagatggagctactagccaggcctgagacctgagcccctggacaccatgtttctattttctgcttctgtgaaattgcctcttctacatacctcatgcacctccgctgagcttttaaaccaagtcattgggacttagcgtctttctacccggcagggaagggaggagttggcaagaatttggctcacccattccccctgcaagcctccagcgtcgcggagcactagacatctactatgactgacaccgtgttcagcaacagttctaaccgtt

SEQ ID NO: 25333 - DNA, 561 bp, Homo sapiens
  source 1..561: mol_type = unassigned DNA
agaggcgacaccgctggaggcggcggagggacgggcccaccaacgctgcaggccggttcttgctctgttgcccaggctggactgcagtggcaccagcatggctcactgcagcctcgaccccctaggctcaagtgatcctcctgcttcagcctcctgagtagctgggaccacaggcacctccgctgagcttttaaaccaagtcattgggacttagcgtctttctacccggcagggaagggaggagttggcaagaatttggctcacccattccccctgcaagcctccagcgtcgcggagcactagacatctactatgactgacaccgtgttcagcaacagttctaaccgttggatgtaccccagtgaccggccccttcaatcaaatgataaagaacagctccaggcaggctggtccgtccaccccggtggtcagcctgacaggcagaggaagcaggaagagctgactgatgaggagaaagaaatcatcaacagggtgattgctcgagctgagaaaatggaagagatggagcaggagcgaatcggacgcctggtggaccgccta

SEQ ID NO: 25334 - DNA, 531 bp, Homo sapiens
  source 1..531: mol_type = unassigned DNA
gagagggaggaagaggagggagaggggcgatggagaaggtcatcagttgggtcaaagatggagctactagccaggcctgagacctgagcccctggacaccatgtttctattttctgcttctgtgaaattgcctcttctacatacctcatgcaacgttcgttctacataattcagcaccagcttagattctcactatcaaattgaaccctttcccctttgctatccacacaggagcactagacatctactatgactgacaccgtgttcagcaacagttctaaccgttggatgtaccccagtgaccggccccttcaatcaaatgataaagaacagctccaggcaggctggtccgtccaccccggtggtcagcctgacaggcagaggaagcaggaagagctgactgatgaggagaaagaaatcatcaacagggtgattgctcgagctgagaaaatggaagagatggagcaggagcgaatcggacgcctggtggaccgcctagaaaacatgaggaagaacgtggctggagatggg

SEQ ID NO: 25335 - DNA, 660 bp, Homo sapiens
  source 1..660: mol_type = unassigned DNA
ttttctgctctgaattctgagaaactccaggcacctccgctgagcttttaaaccaagtcattgggacttagcgtctttctacccggcagggaagggaggagttggcaagaatttggctcacccattccccctgcaagcctccagcgtcgcggagcactagacatctactatgactgacaccgtgttcagcaacagttctaaccgttggatgtaccccagtgaccggccccttcaatcaaatgataaagaacagctccaggcaggctggtccgtccaccccggtggtcagcctgacaggcagaggaagcaggaagagctgactgatgaggagaaagaaatcatcaacagggtgattgctcgagctgagaaaatggaagagatggagcaggagcgaatcggacgcctggtggaccgcctagaaaacatgaggaagaacgtggctggagatggggtgaaccgctgcatactgtgtggagaacagctggggatgctgggctctgcctgtgtagtatgtgaggactgtaagaagaacgtctgcaccaagtgcggagtggagaccaacaaccgcctgcattctgtgtggctctgcaaaatctgcattgagcagagggaggtgtggaagcgttctggagcgtggttcttcaaaggcttccccaaaca

SEQ ID NO: 25336 - DNA, 561 bp, Homo sapiens
  source 1..561: mol_type = unassigned DNA
acttttcactttcagaatggcgtccagtaaatcaatcctgggcacctccgctgagcttttaaaccaagtcattgggacttagcgtctttctacccggcagggaagggaggagttggcaagaatttggctcacccattccccctgcaagcctccagcgtcgcggagcactagacatctactatgactgacaccgtgttcagcaacagttctaaccgttggatgtaccccagtgaccggccccttcaatcaaatgataaagaacagctccaggcaggctggtccgtccaccccggtggtcagcctgacaggcagaggaagcaggaagagctgactgatgaggagaaagaaatcatcaacagggtgattgctcgagctgagaaaatggaagagatggagcaggagcgaatcggacgcctggtggaccgcctagaaaacatgaggaagaacgtggctggagatggggtgaaccgctgcatactgtgtggagaacagctggggatgctgggctctgcctgtgtagtatgtgaggactgtaagaagaacgtctgcaccaagtgcgga

SEQ ID NO: 25337 - DNA, 570 bp, Homo sapiens
  source 1..570: mol_type = unassigned DNA
ccttctgaagctggacttgaacctgagaaaatgtgacctggggctgctggcggccagcttgtccccgttaggtgacaataagcagacagaagagccaagcagctatggaggaaaatcaggcacctccgctgagcttttaaaccaagtcattgggacttagcgtctttctacccggcagggaagggaggagttggcaagaatttggctcacccattccccctgcaagcctccagcgtcgcggagcactagacatctactatgactgacaccgtgttcagcaacagttctaaccgttggatgtaccccagtgaccggccccttcaatcaaatgataaagaacagctccaggcaggctggtccgtccaccccggtggtcagcctgacaggcagaggaagcaggaagagctgactgatgaggagaaagaaatcatcaacagggtgattgctcgagctgagaaaatggaagagatggagcaggagcgaatcggacgcctggtggaccgcctagaaaacatgaggaagaacgtggctggagatggggtgaaccgctgcatactgtgtggagaacag

SEQ ID NO: 25338 - DNA, 534 bp, Homo sapiens
  source 1..534: mol_type = unassigned DNA
gaatttcaggaatattgggagaagtcaccagaaaagaggactgctcccttctgaagctggacttgaacctgagaaaatgtgacctggggctgctggcggccagcttgtccccgttaggtgacaataagcagacagaagagccaagcagctatggaggaaaatcaggtcatcagttgggtcaaagatggagctactagccaggcctgagacctgagcccctggacaccatgtttctattttctgcttctgtgaaattgcctcttctacatacctcatgcacctccgctgagcttttaaaccaagtcattgggacttagcgtctttctacccggcagggaagggaggagttggcaagaatttggctcacccattccccctgcaagcctccagcgtcgcggagcactagacatctactatgactgacaccgtgttcagcaacagttctaaccgttggatgtaccccagtgaccggccccttcaatcaaatgataaagaacagctccaggcaggctggtccgtccaccccggtggtca

SEQ ID NO: 25339 - DNA, 538 bp, Homo sapiens
  source 1..538: mol_type = unassigned DNA
atagttcctttgctctgagagtgagcgacagtattagaaaaagtgtgtggtaggcacctccgctgagcttttaaaccaagtcattgggacttagcgtctttctacccggcagggaagggaggagttggcaagaatttggctcacccattccccctgcaagcctccagcgtcgcggagcactagacatctactatgactgacaccgtgttcagcaacagttctaaccgttggatgtaccccagtgaccggccccttcaatcaaatgataaagaacagctccaggcaggctggtccgtccaccccggtggtcagcctgacaggcagaggaagcaggaagagctgactgatgaggagaaagaaatcatcaacagggtgattgctcgagctgagaaaatggaagagatggagcaggagcgaatcggacgcctggtggaccgcctagaaaacatgaggaagaacgtggctggagatggggtgaaccgctgcatactgtgtggagaacagctggggatgctgggctctgcctgtgtagtatgtg

SEQ ID NO: 25340 - DNA, 2961 bp, Homo sapiens
  source 1..2961: mol_type = unassigned DNA
ggacagtctgagggagccactgtcccttgtccactgactcactggctggtccgagttttctccgcttctggcagtggcacctccgctgagcttttaaaccaagtcattgggacttagcgtctttctacccggcagggaagggaggagttggcaagaatttggctcacccattccccctgcaagcctccagcgtcgcggagcactagacatctactatgactgacaccgtgttcagcaacagttctaaccgttggatgtaccccagtgaccggccccttcaatcaaagctccaggcaggctggtccgtccaccccggtggtcagcctgacaggcagaggaagcaggaagagctgactgatgaggagaaagaaatcatcaacagggtgattgctcgagctgagaaaatggaagagatggagcaggagcgaatcggacgcctggtggaccgcctagaaaacatgaggaagaacgtggctggagatggggtgaaccgctgcatactgtgtggagaacagctggggatgctgggctctgcctgtgtagtatgtgaggactgtaagaagaacgtctgcaccaagtgcggagtggagaccaacaaccgcctgcattctgtgtggctctgcaaaatctgcattgagcagagggaggtgtggaagcgttctggagcgtggttcttcaaaggcttccccaaacaggtcctcccacagcctatgcctataaagaagaccaagccccagcagcctgtcagtgagcctgctgcccctgaacagcctgctcctgagcccaagcaccctgcccgggctccagctcgaggtgacagtgaagataggaggggcccgggtcagaagacaggccctgacccagcctctgctcccgggcgaggaaactatgggcctcccgtgcgcagggcctccgaggcacgaatgagctcatctagccgagattcagagagctgggaccacagtgggggtgctggagactccagccggagcccagcaggtttgagacgggccaactcagtccaggcctccagacctgccccaggctcggtgcagagcccagcgccacctcagcctgggcagccagggaccccaggaggaagcagaccgggtcctgggccagcaggacgctttccagatcagaagccagaggtggctccgagcgaccctgggaccactgccccaccccgagaggagagaacagggggagtcgggggctacccagcagttggagccagagaggaccgaatgagccacccctccggaccctattcccaagcatctgcagctgccccccagcctgctgcagcccgccagccaccacccccagaggaggaggaagaggaagccaacagctacgattcggatgaagcaaccaccctgggtgccctggaattcagccttctctacgaccaggacaacagctccctgcagtgcaccatcattaaggccaagggcctgaagcccatggattcaaacggcttggctgatccctacgttaagctgcacctcctgccgggagccagcaagtccaacaagcttcgtacaaaaactctgcggaatacccggaaccccatctggaatgagaccctcgtgtatcacggcatcaccgatgaggacatgcaaaggaagaccctcaggatctccgtctgtgatgaggacaaatttggccacaatgaatttattggtgagaccagattctccctcaagaaactgaagcccaaccagaggaagaatttcaacatctgcctggagcgagtgattcctatgaaacgtgctgggaccaccgggtcagcccgaggcatggccctttatgaggaagagcaggtggagcgtgttggtgacatcgaggagcgtggcaagatcctggtctccctcatgtacagcacacagcagggaggcctcattgtgggcatcatacgctgcgtgcacctggctgccatggacgctaatggctactcagacccattcgtcaagctctggctgaaaccggacatgggaaagaaggccaaacacaagactcaaattaaaaagaaaaccttgaatcccgaattcaatgaggagtttttctatgacatcaaacacagtgacctggcaaagaagtcactggacatttcagtctgggactatgacatcggcaagtccaatgattacatcggaggctgccagctggggatctctgccaagggagagcgcttaaaacactggtacgagtgtctgaaaaataaagacaagaagatagagcgctggcaccagctacagaatgagaaccacgtgtcaagtgattaggctagtgcccaggtccccatctccatgtcccgggtcccccccagcctgctctagctgcccaccgcaccctgatctctcttctctatgcctacctccccccataccctgctgatctccctgagcctgcctttgagcccccgtcacgttgggcactgctgccaaagactccctcctccctgatgctgggatgtgggctctgaatacagcccctctctcatccctgggatggagcaatggggatggggttggggagacgtttacaaagaggttgatcatttaataacctctcagtttgggtaaattacaaaggttcttcatcatttaggactgtttttagaccctcctagccttgaacacacacatgtacacacacacacacacacacacacacacaccctttcattccctgtgttgtgtctctgtatatccccagttgtcagcagacccggacaatgctgtgagagaagcattggggcacaaatagagcctccgggctcccactgccccctgagatgtacaccctgattgccaggaaaacagactgctgtgttcagtaacacaccctccctgctccaagtgcaccaggatgcaaatgcacagaattcaccaggggcttggacgctctcctctttccgaatgtcacctgtgtgcttcctagcaaaacaaaaacaaa

SEQ ID NO: 25341 - DNA, 579 bp, Homo sapiens
  source 1..579: mol_type = unassigned DNA
cttcatccatgtggaggacagtctgagggagccactgtcccttgtccactgactcactggctggcacctccgctgagcttttaaaccaagtcattgggacttagcgtctttctacccggcagggaagggaggagttggcaagaatttggctcacccattccccctgcaagcctccagcgtcgcggagcactagacatctactatgactgacaccgtgttcagcaacagttctaaccgttggatgtaccccagtgaccggccccttcaatcaaatgataaagaacagctccaggcaggctggtccgtccaccccggtggtcagcctgacaggcagaggaagcaggaagagctgactgatgaggagaaagaaatcatcaacagggtgattgctcgagctgagaaaatggaagagatggagcaggagcgaatcggacgcctggtggaccgcctagaaaacatgaggaagaacgtggctggagatggggtgaaccgctgcatactgtgtggagaacagctggggatgctgggctctgcctgtgtagtatgtgaggactgtaagaagaacgtctgcaccaagtg

SEQ ID NO: 25342 - DNA, 740 bp, Homo sapiens
  source 1..740: mol_type = unassigned DNA
tttagcggggggatgaggatggtcggctgtttccacatttaagggcagagctgggtgaagggtggtgttagtgctcgagggtcacgcgcgggtggctttgccgcggtggtggcagcggtggcagaggcgacaccgctggaggcggcggagggacgggcccaccaacgctgcaggccggagcactagacatctactatgactgacaccgtgttcagcaacagttctaaccgttggatgtaccccagtgaccggccccttcaatcaaatgataaagaacagctccaggcaggctggtccgtccaccccggtggtcagcctgacaggcagaggaagcaggaagagctgactgatgaggagaaagaaatcatcaacagggtgattgctcgagctgagaaaatggaagagatggagcaggagcgaatcggacgcctggtggaccgcctagaaaacatgaggaagaacgtggctggagatggggtgaaccgctgcatactgtgtggagaacagctggggatgctgggctctgcctgtgtagtatgtgaggactgtaagaagaacgtctgcaccaagtgcggagtggagaccaacaaccgcctgcattctgtgtggctctgcaaaatctgcattgagcagagggaggtgtggaagcgttctggagcgtggttcttcaaaggcttccccaaacaggtcctcccacagcctatgcctataaagaagaccaagccccagcagcctgtcag

SEQ ID NO: 25343 - DNA, 557 bp, Homo sapiens
  source 1..557: mol_type = unassigned DNA
ctttgccgcggtggtggcagcggtggcagaggcgacaccgctggaggcggcggagggacgggcccaccaacgctgcagggtctcgctctgtcacccaggctggagtgcaggagcagatcatagttcaccgcaacctccgcctcctgggctccagtgatccttccatcttagcctcctgagtagctgggaccacagcccctggacaccatgtttctattttctgcttctgtgaaattgcctcttctacatacctcatgagcactagacatctactatgactgacaccgtgttcagcaacagttctaaccgttggatgtaccccagtgaccggccccttcaatcaaatgataaagaacagctccaggcaggctggtccgtccaccccggtggtcagcctgacaggcagaggaagcaggaagagctgactgatgaggagaaagaaatcatcaacagggtgattgctcgagctgagaaaatggaagagatggagcaggagcgaatcggacgcctggtggaccgcctagaaaacatgaggaagaacgtggctggagatgggg

SEQ ID NO: 25344 - DNA, 572 bp, Homo sapiens
  source 1..572: mol_type = unassigned DNA
aaggcatcttagcgctgtccgtggtgctgaccgccaatcccctggttgccgtttcgaccagctgggatctctggcacctccgctgagcttttaaaccaagtcattgggacttagcgtctttctacccggcagggaagggaggagttggcaagaatttggctcacccattccccctgcaagcctccagcgtcgcggagcactagacatctactatgactgacaccgtgttcagcaacagttctaaccgttggatgtaccccagtgaccggccccttcaatcaaatgataaagaacagctccaggcaggctggtccgtccaccccggtggtcagcctgacaggcagaggaagcaggaagagctgactgatgaggagaaagaaatcatcaacagggtgattgctcgagctgagaaaatggaagagatggagcaggagcgaatcggacgcctggtggaccgcctagaaaacatgaggaagaacgtggctggagatggggtgaaccgctgcatactgtgtggagaacagctggggatgctgggctctgcctgtgtagtatgtgaggactgtaagaag

SEQ ID NO: 25345 - DNA, 562 bp, Homo sapiens
  source 1..562: mol_type = unassigned DNA
gtctttctacccggcagggaagggaggagttggcaagaatttggctcacccattccccctgcaagcctccagcgtcgcggggcaagaagaggagaagaggaagattgtggtccattcatgttctccagccaatactggccaaggagcactagacatctactatgactgacaccgtgttcagcaacagttctaaccgttggatgtaccccagtgaccggccccttcaatcaaatgataaagaacagctccaggcaggctggtccgtccaccccggtggtcagcctgacaggcagaggaagcaggaagagctgactgatgaggagaaagaaatcatcaacagggtgattgctcgagctgagaaaatggaagagatggagcaggagcgaatcggacgcctggtggaccgcctagaaaacatgaggaagaacgtggctggagatggggtgaaccgctgcatactgtgtggagaacagctggggatgctgggctctgcctgtgtagtatgtgaggactgtaagaagaacgtctgcaccaagtgcggagtggagaccaacaaccgcct

SEQ ID NO: 25346 - DNA, 2896 bp, Homo sapiens
  source 1..2896: mol_type = unassigned DNA
ccaccactgctgcctgtaagggctgttttggatacagaaaatgtgccctttctaacccaaaaaatgcttgaaatgtgtaaaagtggccagactaacagtcccaaagagggctgccctctaagaggaagcgtcccaaatctgttcagttttagagactacgtgactggggtacgtggtggggccttaccagacatccacgaggagaatccaggccttggtttggctccagctgggcctgcctggtggctgccacttattgacttaagtcccagtgattcagctcctcatctggaacacctcgggtcacccccgacaacggtggtgggagggagagcggcctcctcctccctggtggggcctgtctgggtgaagcccctctgttcccgaggatcgtctgccttattgaaaccatctaattggagatccgcagattaggctaccaagacacagctgcctccagcagaatttgtgtagtggacacttgtacgtgcactttggagacagcaagcatgaggcctgcagctgacagctttgagtggctgtgaacctgactatggaaaagatgtgactccccacccccagccgggtgctccgagccatggccgacaccatcttcggcagcgggaatgatcagtgggtttgccccaatgaccggcagcttgcccttcgagccaagctgcagacgggctggtccgtgcacacctaccagacggagaagcagaggaggaagcagcacctcagcccggcggaggtggaggccatcctgcaggtcatccagagggcagagcggctcgacgtcctggagcagcagagaatcgggcggctggtggagcggctggagaccatgaggcggaatgtgatggggaacggcctgtcccagtgtctgctctgcggggaggtgctgggcttcctgggcagctcgtcggtgttctgcaaagactgcaggaagaaagtctgcaccaaatgtgggatcgaggcctcccctggccagaagcggcccctgtggctgtgtaagatctgcagtgagcaaagagaggtctggaagaggtcgggggcctggttctacaaagggctccccaagtatatcttgcccctgaagacccctggccgagctgatgacccccacttccgacctttgcccacggaaccggcagagcgagagcccagaagctctgagaccagccgcatctacacgtgggcccgaggaagagtggtttccagtgacagtgacagtgactcggatcttagctcctccagcctagaggacagactcccatccactggggtcagggaccggaaaggcgacaaaccctggaaggagtcaggtggcagcgtggaggcccccaggatggggttcacccacccgccgggccacctctctgggtgccagagcagcctggccagtggtgagacggggacaggctctgctgacccgccagggggaccccgccccgggctgacccgaagggccccggtaaaagacacacctggacgagcccccgctgctgacgcagctccagcaggcccctccagctgcctgggctgaggtgtctggtgcctggaacagacttccctgtggaggattcctgccagaccctgcccggctcctccctgaccggtccttgtgccctcaccagacaccctgttggccatgactcaacaaaccagtgttgggagccgtctgcctccccagctcagtgcctttctgcaccccttctctcctggggagctgtctgcatccgccaccccctccaaccactgccctcagcccccgaccttatttattaccctcccctcccacacccccaatctacctggtgatgattttaagtttgcgcgtgtcttgggttgggctggggggtttcccacatgcagtgtcagaggggccgcccggtggggctatctccgttgctatattaatggcaagactaaatgaaacctagggcacggcctccgaagctgcgtgtggccccttagaggtgagcatcagagccagagcagtgagggggagactcacccaccctctccctctcccttcagctctgggaggcaggcgcagtgcccccctcccatgggctggcccaggaccgtgggtgaaacctgggtctgtttagtttctttggtttttgtatgtttgtttgtttttgacacagtctcgctttgttgcccaggctggggtgcagtggcacgatcgcggctcactgcaacctccacctcccgggctcaagcgattctctcacctcagcctcctgagtaggtgggattacagatgcccgccaccacacccagttaatttttgtatttttagaagagatggggtttctccatgttggccaggctggtcttgaactcctggtctcaagtgatctgcccgcctcggcctcccaaagtgctgggattacaggtgtgagccaccgcacccaatcctattaggtttctttgaatcccctcatggcctgcctggtttttgctcagcctgtcttcagcttgaggagctgggaagctctggtggatgctatgaactcacttgctgaagagcagcgttcaggtgcatccccagccagggcacgtggctccctcagccatgaattcacttctcttcaggaggtttggcttggcatgaaaatacttcattcagagtatgggcaaatgcttctggaaaacccttccctgaagagagagaacgtgtgtgtgtgtgtcggtgatcacaccctcccatccttcctgcctcctgccccaaaccccgggttcctgggtctggaagggccttctctccaagctgggagctcctgggcccccaccattcactttttgtccttgctgctggcaaacagtaaagaaactcactttccctgtggcacgttatgcttcagaattaaaacaatgaagattaaaa

SEQ ID NO: 25347 - DNA, 2493 bp, Homo sapiens
  source 1..2493: mol_type = unassigned DNA
acaacggtggtgggagggagagcggcctcctcctccctggtggggcctgtctgggtgaagcccctctgttcccgaggatcgtctgccttattgaaaccatctaattggagatccgcagattaggctaccaagacacagctgcctccagcagaatttgtgtagtggacacttgtacgtgcactttggagacagcaagcatgaggcctgcagctgacagctttgagtggctgtgaacctgactatggaaaagatgtgactccccacccccagccgggtgctccgagccatggccgacaccatcttcggcagcgggaatgatcagtgggtttgccccaatgaccggcagcttgcccttcgagccaagctgcagacgggctggtccgtgcacacctaccagacggagaagcagaggaggaagcagcacctcagcccggcggaggtggaggccatcctgcaggtcatccagagggcagagcggctcgacgtcctggagcagcagagaatcgggcggctggtggagcggctggagaccatgaggcggaatgtgatggggaacggcctgtcccagtgtctgctctgcggggaggtgctgggcttcctgggcagctcgtcggtgttctgcaaagactgcaggaaggtctggaagaggtcgggggcctggttctacaaagggctccccaagtatatcttgcccctgaagacccctggccgagctgatgacccccacttccgacctttgcccacggaaccggcagagcgagagcccagaagctctgagaccagccgcatctacacgtgggcccgaggaagagtggtttccagtgacagtgacagtgactcggatcttagctcctccagcctagaggacagactcccatccactggggtcagggaccggaaaggcgacaaaccctggaaggagtcaggtggcagcgtggaggcccccaggatggggttcacccacccgccgggccacctctctgggtgccagagcagcctggccagtggtgagacggggacaggctctgctgacccgccagggggaccccgccccgggctgacccgaagggccccggtaaaagacacacctggacgagcccccgctgctgacgcagctccagcaggcccctccagctgcctgggctgaggtgtctggtgcctggaacagacttccctgtggaggattcctgccagaccctgcccggctcctccctgaccggtccttgtgccctcaccagacaccctgttggccatgactcaacaaaccagtgttgggagccgtctgcctccccagctcagtgcctttctgcaccccttctctcctggggagctgtctgcatccgccaccccctccaaccactgccctcagcccccgaccttatttattaccctcccctcccacacccccaatctacctggtgatgattttaagtttgcgcgtgtcttgggttgggctggggggtttcccacatgcagtgtcagaggggccgcccggtggggctatctccgttgctatattaatggcaagactaaatgaaacctagggcacggcctccgaagctgcgtgtggccccttagaggtgagcatcagagccagagcagtgagggggagactcacccaccctctccctctcccttcagctctgggaggcaggcgcagtgcccccctcccatgggctggcccaggaccgtgggtgaaacctgggtctgtttagtttctttggtttttgtatgtttgtttgtttttgacacagtctcgctttgttgcccaggctggggtgcagtggcacgatcgcggctcactgcaacctccacctcccgggctcaagcgattctctcacctcagcctcctgagtaggtgggattacagatgcccgccaccacacccagttaatttttgtatttttagaagagatggggtttctccatgttggccaggctggtcttgaactcctggtctcaagtgatctgcccgcctcggcctcccaaagtgctgggattacaggtgtgagccaccgcacccaatcctattaggtttctttgaatcccctcatggcctgcctggtttttgctcagcctgtcttcagcttgaggagctgggaagctctggtggatgctatgaactcacttgctgaagagcagcgttcaggtgcatccccagccagggcacgtggctccctcagccatgaattcacttctcttcaggaggtttggcttggcatgaaaatacttcattcagagtatgggcaaatgcttctggaaaacccttccctgaagagagagaacgtgtgtgtgtgtgtcggtgatcacaccctcccatccttcctgcctcctgccccaaaccccgggttcctgggtctggaagggccttctctccaagctgggagctcctgggcccccaccattcactttttgtccttgctgctggcaaacagtaaagaaactcactttccctgtggcacgttatgcttcagaattaaaacaatgaagatt

SEQ ID NO: 25348 - DNA, 1204 bp, Homo sapiens
  source 1..1204: mol_type = unassigned DNA
atctggaacacctcgggtcacccccgacaacggtggtgggagggagagcggcctcctcctccctggtggggcctgtctgggtgaagcccctctgttcccgatgtgactccccacccccagccgggtgctccgagccatggccgacaccatcttcggcagcgggaatgatcagtgggtttgccccaatgaccggcagcttgcccttcgagccaagctgcagacgggctggtccgtgcacacctaccagacggagaagcagaggaggaagcagcacctcagcccggcggaggtggaggccatcctgcaggtcatccagagggcagagcggctcgacgtcctggagcagcagagaatcgggcggctggtggagcggctggagaccatgaggcggaatgtgatggggaacggcctgtcccagtgtctgctctgcggggaggtgctgggcttcctgggcagctcgtcggtgttctgcaaagactgcaggaaggtctggaagaggtcgggggcctggttctacaaagggctccccaagtatatcttgcccctgaagacccctggccgagctgatgacccccacttccgacctttgcccacggaaccggcagagcgagagcccagaagctctgagaccagccgcatctacacgtgggcccgaggaagagtggtttccagtgacagtgacagtgactcggatcttagctcctccagcctagaggacagactcccatccactggggtcagggaccggaaaggcgacaaaccctggaaggagtcaggtggcagcgtggaggcccccaggatggggttcacccacccgccgggccacctctctgggtgccagagcagcctggccagtggtgagacggggacaggctctgctgacccgccagggggaccccgccccgggctgacccgaagggccccggtaaaagacacacctggacgagcccccgctgctgacgcagctccagcaggcccctccagctgcctgggctgaggtgtctggtgcctggaacagacttccctgtggaggattcctgccagaccctgcccggctcctccctgaccggtccttgtgccctcaccagacaccctgttggccatgactcaacaaaccagtgttgggagccgtctgcctccccagctcagtgcctttctgcaccccttctctcctggggagctgtctgcatccgccaccccctcc

SEQ ID NO: 25349 - DNA, 6019 bp, Homo sapiens
  source 1..6019: mol_type = unassigned DNA
attaaagttggccttatcataaatttcccaatagtatgcctatttcaagtggttctgaaaatgtttgagaatgatgaagatctcttgttatagacagtttttttttcagagcagtattttaagtgcaaagtgtttttttgttgttgttgttgttgggaaaataagaatcttccatattgtagtgtagacagaggacaagtgctcttttgttctcaaacattctattttttcaagtgtattttacccacttatgtgactgagtctgagcctttgctaagggtactgcagctggattatgtagtggaaccaggtccagaaaaagaattgctaaagaatgcaagtaaacaggatgtcagatgttatccttagcctatttccctaaacatagctttttggctgcaaagtaaaatgccattcttctagcttctgcttatacacagtgatggctgacagcaggcataatcttcgtttgcttggcacgttgtcaccatgcaactcaacgtgttttgcaaggaatgatcgtgacacaccatctctgggagatactatgaggacatccggctatttcttggaagaattttctgtctaccttctttgagccctgttgtgccagcacatctccccatgaggctcagatctgtctgacctaagagccagttggcatcgtcctcctaacagaagccagattttcactggggctagactatttattgacagtgttttcccagactggcccatgagtgtctcatttccaaggtcccctgaagtgctggctcacctctgtttcccaaagcacttgcttgcttgtctctcctccctccccagcatccttttcactttcttcccttataacttcttgcactctgtgtgcgtgtgtgtgtatgcgtgtgtgcatgtgcgtttcttctttttttttatcctaacgaatttgttttgcaggttttgaaaaggaaaaaccagcgttatccaggattgttaaattaattcttatctgtttccacatcttggaccgtgatctctgtggttttaaaatcccatattttgagtgggttccgctgttgtttaagaaaagttgctttaaacctttgctctgcaagcacccgaagagaactcataaaaaggaagacaacagcagatgcaatcgcggatgtggcttagtccttgcagctgccccagagtgctgtttggagtgtaccgtcctcagtaatgaatccagaagaacaaatcgtgacatggcttatatctttgggagttttagagtcccctaaaaagaccatctgtgatccggaggagtttttaaagtcctcgctgaaaaatggggtagttctgtgcaaactgatcaacagactcatgcctggctctgtggaaaagttttgtctggatccccaaactgaagctgactgcatcaacaacatcaatgacttcctgaaaggatgtgcaaccctccaagtggaaatatttgatcctgatgacctttattcaggggtcaatttctccaaggtactgagtactcttttagctgtcaacaaagcaacagaagatcagctatcagaaagaccatgtggacgttcctcttctcttagtgctgctaatacttctcagacaaacccacagggagcagtttctagcacagtttcagggctgcaaaggcagtcaaagacagtggagatgacggaaaatggaagtcatcagttgatagtaaaagcaagattcaactttaagcagactaatgaggatgaactgtcagtttgtaagggggacatcatttacgtcacacgagttgaagaaggaggctggtgggaaggcacattaaatgggagaacaggctggttccccagtaattatgtccgtgaaattaaatccagtgagagacctctctccccaaaagccgtcaaaggatttgaaactgctccacttaccaagaattattatactgtggtgttacagaacatcctggacactgaaaaagaatatgctaaagaacttcagtctcttcttgttacttacttaagacccctgcagtccaataacaatctgagtactgtggaggttacatctttactgggaaacttcgaggaagtatgcacatttcaacagacactctgccaagccttggaagaatgttcaaagtttccagaaaaccagcacaaagtaggaggttgtctactgagtctcatgcctcattttaaatctatgtatctggcttactgtgcaaaccatccttcagctgtaaatgtgctcactcagcacagtgatgagttggaacaattcatggaaaatcaaggtgcatcgagcccaggtatcctcattttaacaacaaacctcagcaaaccattcatgcgactggagaaatatgttactctcttgcaagagttagaacggcatatggaggatactcatccagatcatcaggatattctgaaagcaatcgtagcattcaaaactctcatggggcaatgtcaagatctgaggaagagaaaacagctggagttacagatactgtccgaacctattcaggcatgggaaggagaagatattaaaaacttgggaaatgtgatttttatgtcacaagtaatggtgcagtatggagcatgtgaggaaaaagaggagcggtaccttatgttattttcaaatgtcctgataatgttatctgcaagtcctcggatgagtggctttatctatcagggaaaaataccaatagcaggaacggtggtgactagattagatgaaattgaagggaatgactgcacatttgaaatcactggtaacacagtggagagaattgtggtccattgtaacaacaaccaggacttccaggaatggttggagcagctgaacagactgatcagaggacctgcctcttgcagttcattatccaaaacctcatcgtcatcatgtagtgctcattcttcttttagctctaccggacagccccgaggacccttggagcctcctcaaattataaaaccgtggagtttaagttgtctacgacctgcacctccacttagaccatcagcagcactaggttataaagagaggatgtcttatatcttaaaggagtctagtaaaagccctaaaacgatgaagaaatttcttcataaaaggaagactgagagaaaaccatcggaggaggaatatgtgattaggaaaagtacagctgctctggaagaggatgctcaaatccttaaagtgatcgaagcctactgcaccagcgcaaattttcaacaaggccatggctcaagtactcgaaaagattccattccacaagtcctactccctgaggaagagaaactcatcattgaagaaaccagaagcaacggccagaccatcatggaagaaaagagccttgttgatactgtttacgccttgaaggacgaggtcagagaactgaagcaggaaaataaaagaatgaagcaatgcctggaagaagaactgaaatcaagaagggacctagaaaagctggtgcggaggcttttgaagcaaacagatgagtgtattcgaggcgagtccagtagcaagacctcaattcttccataaccatcactgtgccactgggtggagtgtgccttcagggcatcttgaaatgtcccgctgaatgatttgactcagtttgctcacttctttggcttttgttttgtgtttgagtctctctctctctctccctctctcttctctttctctccccgctgtgtgcatatgtgtgtgcgtgcacgtgcgcgcttgggcatttgctgttgtttggttattggttggttgttcattttttttttcaacaggtgaaaaagcaggaagtggtggtagagatggcctcagagtcttttccattcagtaagaaagagaaagggaatgcaggccagttacttaaaaggtcttcagattgccttcagttcacagtgcctctgcaacagccattgccctcaggtcacattctttgggctggctgcccttgcaaagcagctggccaaggcttattaaatgtgaacccaacttttccccagggctttcctgtacctgcaagcctcttagtacttaatttaccgaaggcaaatcttccagactatggcttgagtaggatgaaagacaaacacatctgcccaatgatccagctgcccttccttagaccatcacatgcctcccctcaatcacaggttttaaaattactgccctatgttgtctataagaccaagaaaactgtagtacccttattccttttgtgtcatgtaaattgtaactcaggggggcagaagctctggtcacccacaccaacaccaaatccatcagcaaattctactggacaatcctcccttttagtagcagagttgaccgccttttcccattgcatgataggtttctttccctcattctgcctagtgtgtaagttttctatttccccagtacttttagccaaccttaccaagtggtgtgtaaactagtatgtatgtgctttgcttactttttaaaaaaatgtagttagactgtgaggagttactttatgtacgttgcatattcaaactgtgatgttttatccttcaaaacaatctgcattaagaagatattgtgccctactagacagctttcattcactttattactctctcatatatgctgtgagaagttgtaatattaattggcctctttgggtgggactctaagcagtatttgcagaaatatgcttctggtccaacttgtacatccagaacaaaagggcccctctagtagctgtgtgctggattattcaggactgattaactcaagttgctcattgaatcacatcatccactttatcccagaaactagaactgtgagaaaccaggtttagaagacagtcacagaacagcacacatccaaattcagcgccattgaaagttggcctaaggctcagtgccactcacccctccctccccaaaagacaagagaaatttggccagatggggaaggtcactggaaattgaggccaaagggctgatcagaattgcctttataatatatttgatggatgcctataaatgtgggttttgcaaatattgtttaaaaaccaaacttgaagccaggcatggtggcccacacctgtggtcccagctactcaggaggctgaggtgggaggatcatttgagcccaggaggtcaaggctgcagtgagctgtgatgacaccactgcactccaacctaggtaacagagagacacctctgtctctgaaaaaacaaaacttgaagtttgaaacccccagcttgctgaggagccctttttatttttggtactgagagtctcaaggtcccatagctacatggtacagggctgttgtctgcttgctgcacagcagaaattacaccatccacaggaaatggactatttttgcagtccaacatcagccaaccacacacagccgtgtttggaagctgaagagtaaagaaatttctaggaatggctgttgttctgttttttagcacagccatttagatataacatccttcacttaaaaattaaaaacatcagtactaccaccaccaccaacaacatcaacacagatcttcacatctgcccattctgtggttagtcaatggcttgcaataaatgtgcaaactgcatctataggaaacatttttgtgattacggaatactttagttgattgctgaaaatattgaaaggtcttcattttacagtgatgagtacatatgcatgtttcggggacttggcccttctgatgaggggccctcggtactctggataacgaagcttgtgcagagtggtaaccatgcttacacactaaactataatataaaggaaatgaagccatgttaatctgagagcagtgtcgccatagttgtgttgtttacaatactctataaatgggttcctgttgccctgtaattaaactgctgcccgtagaggcctttcagttccttttctgtccttccccttcttaacacaagctcaaattttctaacttgtttttattttgaagacttttaaaatggacattttcaatacataaaaataaacagtgctttataaaaataa

SEQ ID NO: 25350 - DNA, 4764 bp, Homo sapiens
  source 1..4764: mol_type = unassigned DNA
agtttcgccctggtggcggccgcgctcagggcagggtcccagctccggctgggttgatctgttcccgcagccttggcacaggcttgcccgcccgctcgccggccccgtgactcgggagggcgaacggcttccaggaggcggcggcggcgcggctggagtgagggagcagctggaggacaggcgggcagcggccgagccagatatttgatcctgatgacctttattcaggggtcaatttctccaaggtactgagtactcttttagctgtcaacaaagcaacagaagatcagctatcagaaagaccatgtggacgttcctcttctcttagtgctgctaatacttctcagacaaacccacagggagcagtttctagcacagtttcagggctgcaaaggcagtcaaagacagtggagatgacggaaaatggaagtcatcagttgatagtaaaagcaagattcaactttaagcagactaatgaggatgaactgtcagtttgtaagggggacatcatttacgtcacacgagttgaagaaggaggctggtgggaaggcacattaaatgggagaacaggctggttccccagtaattatgtccgtgaaattaaatccagtgagagacctctctccccaaaagccgtcaaaggatttgaaactgctccacttaccaagaattattatactgtggtgttacagaacatcctggacactgaaaaagaatatgctaaagaacttcagtctcttcttgttacttacttaagacccctgcagtccaataacaatctgagtactgtggaggttacatctttactgggaaacttcgaggaagtatgcacatttcaacagacactctgccaagccttggaagaatgttcaaagtttccagaaaaccagcacaaagtaggaggttgtctactgagtctcatgcctcattttaaatctatgtatctggcttactgtgcaaaccatccttcagctgtaaatgtgctcactcagcacagtgatgagttggaacaattcatggaaaatcaaggtgcatcgagcccaggtatcctcattttaacaacaaacctcagcaaaccattcatgcgactggagaaatatgttactctcttgcaagagttagaacggcatatggaggatactcatccagatcatcaggatattctgaaagcaatcgtagcattcaaaactctcatggggcaatgtcaagatctgaggaagagaaaacagctggagttacagatactgtccgaacctattcaggcatgggaaggagaagatattaaaaacttgggaaatgtgatttttatgtcacaagtaatggtgcagtatggagcatgtgaggaaaaagaggagcggtaccttatgttattttcaaatgtcctgataatgttatctgcaagtcctcggatgagtggctttatctatcagggaaaaataccaatagcaggaacggtggtgactagattagatgaaattgaagggaatgactgcacatttgaaatcactggtaacacagtggagagaattgtggtccattgtaacaacaaccaggacttccaggaatggttggagcagctgaacagactgatcagaggacctgcctcttgcagttcattatccaaaacctcatcgtcatcatgtagtgctcattcttcttttagctctaccggacagccccgaggacccttggagcctcctcaaattataaaaccgtggagtttaagttgtctacgacctgcacctccacttagaccatcagcagcactaggttataaagagaggatgtcttatatcttaaaggagtctagtaaaagccctaaaacgatgaagaaatttcttcataaaaggaagactgagagaaaaccatcggaggaggaatatgtgattaggaaaagtacagctgctctggaagaggatgctcaaatccttaaagtgatcgaagcctactgcaccagcgcaaattttcaacaaggccatggctcaagtactcgaaaagattccattccacaagtcctactccctgaggaagagaaactcatcattgaagaaaccagaagcaacggccagaccatcatggaagaaaagagccttgttgatactgtttacgccttgaaggacgaggtcagagaactgaagcaggaaaataaaagaatgaagcaatgcctggaagaagaactgaaatcaagaagggacctagaaaagctggtgcggaggcttttgaagcaaacagatgagtgtattcgaggcgagtccagtagcaagacctcaattcttccataaccatcactgtgccactgggtggagtgtgccttcagggcatcttgaaatgtcccgctgaatgatttgactcagtttgctcacttctttggcttttgttttgtgtttgagtctctctctctctctccctctctcttctctttctctccccgctgtgtgcatatgtgtgtgcgtgcacgtgcgcgcttgggcatttgctgttgtttggttattggttggttgttcattttttttttcaacaggtgaaaaagcaggaagtggtggtagagatggcctcagagtcttttccattcagtaagaaagagaaagggaatgcaggccagttacttaaaaggtcttcagattgccttcagttcacagtgcctctgcaacagccattgccctcaggtcacattctttgggctggctgcccttgcaaagcagctggccaaggcttattaaatgtgaacccaacttttccccagggctttcctgtacctgcaagcctcttagtacttaatttaccgaaggcaaatcttccagactatggcttgagtaggatgaaagacaaacacatctgcccaatgatccagctgcccttccttagaccatcacatgcctcccctcaatcacaggttttaaaattactgccctatgttgtctataagaccaagaaaactgtagtacccttattccttttgtgtcatgtaaattgtaactcaggggggcagaagctctggtcacccacaccaacaccaaatccatcagcaaattctactggacaatcctcccttttagtagcagagttgaccgccttttcccattgcatgataggtttctttccctcattctgcctagtgtgtaagttttctatttccccagtacttttagccaaccttaccaagtggtgtgtaaactagtatgtatgtgctttgcttactttttaaaaaaatgtagttagactgtgaggagttactttatgtacgttgcatattcaaactgtgatgttttatccttcaaaacaatctgcattaagaagatattgtgccctactagacagctttcattcactttattactctctcatatatgctgtgagaagttgtaatattaattggcctctttgggtgggactctaagcagtatttgcagaaatatgcttctggtccaacttgtacatccagaacaaaagggcccctctagtagctgtgtgctggattattcaggactgattaactcaagttgctcattgaatcacatcatccactttatcccagaaactagaactgtgagaaaccaggtttagaagacagtcacagaacagcacacatccaaattcagcgccattgaaagttggcctaaggctcagtgccactcacccctccctccccaaaagacaagagaaatttggccagatggggaaggtcactggaaattgaggccaaagggctgatcagaattgcctttataatatatttgatggatgcctataaatgtgggttttgcaaatattgtttaaaaaccaaacttgaagccaggcatggtggcccacacctgtggtcccagctactcaggaggctgaggtgggaggatcatttgagcccaggaggtcaaggctgcagtgagctgtgatgacaccactgcactccaacctaggtaacagagagacacctctgtctctgaaaaaacaaaacttgaagtttgaaacccccagcttgctgaggagccctttttatttttggtactgagagtctcaaggtcccatagctacatggtacagggctgttgtctgcttgctgcacagcagaaattacaccatccacaggaaatggactatttttgcagtccaacatcagccaaccacacacagccgtgtttggaagctgaagagtaaagaaatttctaggaatggctgttgttctgttttttagcacagccatttagatataacatccttcacttaaaaattaaaaacatcagtactaccaccaccaccaacaacatcaacacagatcttcacatctgcccattctgtggttagtcaatggcttgcaataaatgtgcaaactgcatctataggaaacatttttgtgattacggaatactttagttgattgctgaaaatattgaaaggtcttcattttacagtgatgagtacatatgcatgtttcggggacttggcccttctgatgaggggccctcggtactctggataacgaagcttgtgcagagtggtaaccatgcttacacactaaactataatataaaggaaatgaagccatgttaatctgagagcagtgtcgccatagttgtgttgtttacaatactctataaatgggttcctgttgccctgtaattaaactgctgcccgtagaggcctttcagttccttttctgtccttccccttcttaacacaagctcaaattttctaacttgtttttattttgaagacttttaaaatggacattttcaatacataaaaataaacagtgctttataaaaataa

SEQ ID NO: 25351 - DNA, 4779 bp, Homo sapiens
  source 1..4779: mol_type = unassigned DNA
gccctgaccctgccacttgtgtgaagtcaggatctcctttcccaggcctcagttgagtcatctgtaaaatgaggagactagagtaggggttgggtaatgtctaatggttgtaatgtctgtttttaacttgcccatttccatcagtttccgctaggcaaagctttgcatatttagctgctcagttggaactagtaggaagaccaaagaggattttgatatttgatcctgatgacctttattcaggggtcaatttctccaaggtactgagtactcttttagctgtcaacaaagcaacagaagatcagctatcagaaagaccatgtggacgttcctcttctcttagtgctgctaatacttctcagacaaacccacagggagcagtttctagcacagtttcagggctgcaaaggcagtcaaagacagtggagatgacggaaaatggaagtcatcagttgatagtaaaagcaagattcaactttaagcagactaatgaggatgaactgtcagtttgtaagggggacatcatttacgtcacacgagttgaagaaggaggctggtgggaaggcacattaaatgggagaacaggctggttccccagtaattatgtccgtgaaattaaatccagtgagagacctctctccccaaaagccgtcaaaggatttgaaactgctccacttaccaagaattattatactgtggtgttacagaacatcctggacactgaaaaagaatatgctaaagaacttcagtctcttcttgttacttacttaagacccctgcagtccaataacaatctgagtactgtggaggttacatctttactgggaaacttcgaggaagtatgcacatttcaacagacactctgccaagccttggaagaatgttcaaagtttccagaaaaccagcacaaagtaggaggttgtctactgagtctcatgcctcattttaaatctatgtatctggcttactgtgcaaaccatccttcagctgtaaatgtgctcactcagcacagtgatgagttggaacaattcatggaaaatcaaggtgcatcgagcccaggtatcctcattttaacaacaaacctcagcaaaccattcatgcgactggagaaatatgttactctcttgcaagagttagaacggcatatggaggatactcatccagatcatcaggatattctgaaagcaatcgtagcattcaaaactctcatggggcaatgtcaagatctgaggaagagaaaacagctggagttacagatactgtccgaacctattcaggcatgggaaggagaagatattaaaaacttgggaaatgtgatttttatgtcacaagtaatggtgcagtatggagcatgtgaggaaaaagaggagcggtaccttatgttattttcaaatgtcctgataatgttatctgcaagtcctcggatgagtggctttatctatcagggaaaaataccaatagcaggaacggtggtgactagattagatgaaattgaagggaatgactgcacatttgaaatcactggtaacacagtggagagaattgtggtccattgtaacaacaaccaggacttccaggaatggttggagcagctgaacagactgatcagaggacctgcctcttgcagttcattatccaaaacctcatcgtcatcatgtagtgctcattcttcttttagctctaccggacagccccgaggacccttggagcctcctcaaattataaaaccgtggagtttaagttgtctacgacctgcacctccacttagaccatcagcagcactaggttataaagagaggatgtcttatatcttaaaggagtctagtaaaagccctaaaacgatgaagaaatttcttcataaaaggaagactgagagaaaaccatcggaggaggaatatgtgattaggaaaagtacagctgctctggaagaggatgctcaaatccttaaagtgatcgaagcctactgcaccagcgcaaattttcaacaaggccatggctcaagtactcgaaaagattccattccacaagtcctactccctgaggaagagaaactcatcattgaagaaaccagaagcaacggccagaccatcatggaagaaaagagccttgttgatactgtttacgccttgaaggacgaggtcagagaactgaagcaggaaaataaaagaatgaagcaatgcctggaagaagaactgaaatcaagaagggacctagaaaagctggtgcggaggcttttgaagcaaacagatgagtgtattcgaggcgagtccagtagcaagacctcaattcttccataaccatcactgtgccactgggtggagtgtgccttcagggcatcttgaaatgtcccgctgaatgatttgactcagtttgctcacttctttggcttttgttttgtgtttgagtctctctctctctctccctctctcttctctttctctccccgctgtgtgcatatgtgtgtgcgtgcacgtgcgcgcttgggcatttgctgttgtttggttattggttggttgttcattttttttttcaacaggtgaaaaagcaggaagtggtggtagagatggcctcagagtcttttccattcagtaagaaagagaaagggaatgcaggccagttacttaaaaggtcttcagattgccttcagttcacagtgcctctgcaacagccattgccctcaggtcacattctttgggctggctgcccttgcaaagcagctggccaaggcttattaaatgtgaacccaacttttccccagggctttcctgtacctgcaagcctcttagtacttaatttaccgaaggcaaatcttccagactatggcttgagtaggatgaaagacaaacacatctgcccaatgatccagctgcccttccttagaccatcacatgcctcccctcaatcacaggttttaaaattactgccctatgttgtctataagaccaagaaaactgtagtacccttattccttttgtgtcatgtaaattgtaactcaggggggcagaagctctggtcacccacaccaacaccaaatccatcagcaaattctactggacaatcctcccttttagtagcagagttgaccgccttttcccattgcatgataggtttctttccctcattctgcctagtgtgtaagttttctatttccccagtacttttagccaaccttaccaagtggtgtgtaaactagtatgtatgtgctttgcttactttttaaaaaaatgtagttagactgtgaggagttactttatgtacgttgcatattcaaactgtgatgttttatccttcaaaacaatctgcattaagaagatattgtgccctactagacagctttcattcactttattactctctcatatatgctgtgagaagttgtaatattaattggcctctttgggtgggactctaagcagtatttgcagaaatatgcttctggtccaacttgtacatccagaacaaaagggcccctctagtagctgtgtgctggattattcaggactgattaactcaagttgctcattgaatcacatcatccactttatcccagaaactagaactgtgagaaaccaggtttagaagacagtcacagaacagcacacatccaaattcagcgccattgaaagttggcctaaggctcagtgccactcacccctccctccccaaaagacaagagaaatttggccagatggggaaggtcactggaaattgaggccaaagggctgatcagaattgcctttataatatatttgatggatgcctataaatgtgggttttgcaaatattgtttaaaaaccaaacttgaagccaggcatggtggcccacacctgtggtcccagctactcaggaggctgaggtgggaggatcatttgagcccaggaggtcaaggctgcagtgagctgtgatgacaccactgcactccaacctaggtaacagagagacacctctgtctctgaaaaaacaaaacttgaagtttgaaacccccagcttgctgaggagccctttttatttttggtactgagagtctcaaggtcccatagctacatggtacagggctgttgtctgcttgctgcacagcagaaattacaccatccacaggaaatggactatttttgcagtccaacatcagccaaccacacacagccgtgtttggaagctgaagagtaaagaaatttctaggaatggctgttgttctgttttttagcacagccatttagatataacatccttcacttaaaaattaaaaacatcagtactaccaccaccaccaacaacatcaacacagatcttcacatctgcccattctgtggttagtcaatggcttgcaataaatgtgcaaactgcatctataggaaacatttttgtgattacggaatactttagttgattgctgaaaatattgaaaggtcttcattttacagtgatgagtacatatgcatgtttcggggacttggcccttctgatgaggggccctcggtactctggataacgaagcttgtgcagagtggtaaccatgcttacacactaaactataatataaaggaaatgaagccatgttaatctgagagcagtgtcgccatagttgtgttgtttacaatactctataaatgggttcctgttgccctgtaattaaactgctgcccgtagaggcctttcagttccttttctgtccttccccttcttaacacaagctcaaattttctaacttgtttttattttgaagacttttaaaatggacattttcaatacataaaaataaacagtgctttataaaaataa

SEQ ID NO: 25352 - DNA, 2654 bp, Homo sapiens
  source 1..2654: mol_type = unassigned DNA
aaagttgcagccgcccctccccgctggggcgagcctagcccagctctccagtttcgccctggtggcggccgcgctcagggcagggtcccagctccggctgggttgatctgttcccgcagccttggcacaggcttgcccgcccgctcgccggccccgtgactcgggagggcgaacggcttccaggaggcggcggcggcgcggctggagtgagggagcagctggaggacaggcgggcagcggccgagccagatatttgatcctgatgacctttattcaggggtcaatttctccaaggtactgagtactcttttagctgtcaacaaagcaacagaagatcagctatcagaaagaccatgtggacgttcctcttctcttagtgctgctaatacttctcagacaaacccacagggagcagtttctagcacagtttcagggctgcaaaggcagtcaaagacagtggagatgacggaaaatggaagtcatcagttgatagtaaaagcaagattcaactttaagcagactaatgaggatgaactgtcagtttgtaagggggacatcatttacgtcacacgagttgaagaaggaggctggtgggaaggcacattaaatgggagaacaggctggttccccagtaattatgtccgtgaaattaaatccagtgatggagtttcgctcttgttgcccgggctggagtgcaatggcgcgatctcagctcaccacaacctctgcctcccaggttcaaagagacctctctccccaaaagccgtcaaaggatttgaaactgctccacttaccaagaattattatactgtggtgttacagaacatcctggacactgaaaaagaatatgctaaagaacttcagtctcttcttgttacttacttaagacccctgcagtccaataacaatctgagtactgtggaggttacatctttactgggaaacttcgaggaagtatgcacatttcaacagacactctgccaagccttggaagaatgttcaaagtttccagaaaaccagcacaaagtaggaggttgtctactgagtctcatgcctcattttaaatctatgtatctggcttactgtgcaaaccatccttcagctgtaaatgtgctcactcagcacagtgatgagttggaacaattcatggaaaatcaaggtgcatcgagcccaggtatcctcattttaacaacaaacctcagcaaaccattcatgcgactggagaaatatgttactctcttgcaagagttagaacggcatatggaggatactcatccagatcatcaggatattctgaaagcaatcgtagcattcaaaactctcatggggcaatgtcaagatctgaggaagagaaaacagctggagttacagatactgtccgaacctattcaggcatgggaaggagaagatattaaaaacttgggaaatgtgatttttatgtcacaagtaatggtgcagtatggagcatgtgaggaaaaagaggagcggtaccttatgttattttcaaatgtcctgataatgttatctgcaagtcctcggatgagtggctttatctatcagggaaaaataccaatagcaggaacggtggtgactagattagatgaaattgaagggaatgactgcacatttgaaatcactggtaacacagtggagagaattgtggtccattgtaacaacaaccaggacttccaggaatggttggagcagctgaacagactgatcagaggacctgcctcttgcagttcattatccaaaacctcatcgtcatcatgtagtgctcattcttcttttagctctaccggacagccccgaggacccttggagcctcctcaaattataaaaccgtggagtttaagttgtctacgacctgcacctccacttagaccatcagcagcactaggttataaagagaggatgtcttatatcttaaaggagtctagtaaaagccctaaaacgatgaagaaatttcttcataaaaggaagactgagagaaaaccatcggaggaggaatatgtgattaggaaaagtacagctgctctggaagaggatgctcaaatccttaaagtgatcgaagcctactgcaccagcgcaaattttcaacaaggccatggctcaagtactcgaaaagattccattccacaagtcctactccctgaggaagagaaactcatcattgaagaaaccagaagcaacggccagaccatcatggaagaaaagagccttgttgatactgtttacgccttgaaggacgaggtcagagaactgaagcaggaaaataaaagaatgaagcaatgcctggaagaagaactgaaatcaagaagggacctagaaaagctggtgcggaggcttttgaagcaaacagatgagtgtattcgaggcgagtccagtagcaagacctcaattcttccataaccatcactgtgccactgggtggagtgtgccttcagggcatcttgaaatgtcccgctgaatgatttgactcagtttgctcacttctttggcttttgttttgtgtttgagtctctctctctctctccctctctcttctctttctctccccgctgtgtgcatatgtgtgtgcgtgcacgtgcgcgcttgggcatttgctgttgtttggttattggttggttgttcattttttttttcaacaggtg

SEQ ID NO: 25353 - DNA, 5265 bp, Homo sapiens
  source 1..5265: mol_type = unassigned DNA
ctcatttccaaggtcccctgaagtgctggctcacctctgtttcccaaagcacttgcttgcttgtctctcctccctccccagcatccttttcactttcttcccttataacttcttgcactctgtgtgcgtgtgtgtgtatgcgtgtgtgcatgtgcgtttcttctttttttttatcctaacgaatttgttttgcaggttttgaaaaggaaaaaccagcgttatccaggattgttaaattaattcttatctgtttccacatcttggaccgtgatctctgtggttttaaaatcccatattttgagtgggttccgctgttgtttaagaaaagttgctttaaacctttgctctgcaagcacccgaagagaactcataaaaaggaagacaacagcagatgcaatcgcggatgtggcttagtccttgcagctgccccagagtgctgtttggagtgtaccgtcctcagtaatgaatccagaagaacaaatcgtgacatggcttatatctttgggagttttagagtcccctaaaaagaccatctgtgatccggaggagtttttaaagtcctcgctgaaaaatggggtagttctgtgcaaactgatcaacagactcatgcctggctctgtggaaaagttttgtctggatccccaaactgaagctgactgcatcaacaacatcaatgacttcctgaaaggatgtgcaaccctccaagtggaaatatttgatcctgatgacctttattcaggggtcaatttctccaaggtactgagtactcttttagctgtcaacaaagcaacagaagatcagctatcagaaagaccatgtggacgttcctcttctcttagtgctgctaatacttctcagacaaacccacagggagcagtttctagcacagtttcagggctgcaaaggcagtcaaagacagtggagatgacggaaaatggaagtcatcagttgatagtaaaagcaagattcaactttaagcagactaatgaggatgaactgtcagtttgtaagggggacatcatttacgtcacacgagttgaagaaggaggctggtgggaaggcacattaaatgggagaacaggctggttccccagtaattatgtccgtgaaattaaatccagtgagagacctctctccccaaaagccgtcaaaggatttgaaactgctccacttaccaagaattattatactgtggtgttacagaacatcctggacactgaaaaagaatatgctaaagaacttcagtctcttcttgttacttacttaagacccctgcagtccaataacaatctgagtactgtggaggttacatctttactgggaaacttcgaggaagtatgcacatttcaacagacactctgccaagccttggaagaatgttcaaagtttccagaaaaccagcacaaagtaggaggttgtctactgagtctcatgcctcattttaaatctatgtatctggcttactgtgcaaaccatccttcagctgtaaatgtgctcactcagcacagtgatgagttggaacaattcatggaaaatcaaggtgcatcgagcccaggtatcctcattttaacaacaaacctcagcaaaccattcatgcgactggagaaatatgttactctcttgcaagagttagaacggcatatggaggatactcatccagatcatcaggatattctgaaagcaatcgtagcattcaaaactctcatggggcaatgtcaagatctgaggaagagaaaacagctggagttacagatactgtccgaacctattcaggcatgggaaggagaagatattaaaaacttgggaaatgtgatttttatgtcacaagtaatggtgcagtatggagcatgtgaggaaaaagaggagcggtaccttatgttattttcaaatgtcctgataatgttatctgcaagtcctcggatgagtggctttatctatcagggaaaaataccaatagcaggaacggtggtgactagattagatgaaattgaagggaatgactgcacatttgaaatcactggtaacacagtggagagaattgtggtccattgtaacaacaaccaggacttccaggaatggttggagcagctgaacagactgatcagaggacctgcctcttgcagttcattatccaaaacctcatcgtcatcatgtagtgctcattcttcttttagctctaccggacagccccgaggacccttggagcctcctcaaattataaaaccgtggagtttaagttgtctacgacctgcacctccacttagaccatcagcagcactaggttataaagaggcttttacttttgtttttgaggagtctagtaaaagccctaaaacgatgaagaaatttcttcataaaaggaagactgagagaaaaccatcggaggaggaatatgtgattaggaaaagtacagctgctctggaagaggatgctcaaatccttaaagtgatcgaagcctactgcaccagcgcaaattttcaacaaggccatggctcaagtactcgaaaagattccattccacaagtcctactccctgaggaagagaaactcatcattgaagaaaccagaagcaacggccagaccatcatggaagaaaagagccttgttgatactgtttacgccttgaaggacgaggtcagagaactgaagcaggaaaataaaagaatgaagcaatgcctggaagaagaactgaaatcaagaagggacctagaaaagctggtgcggaggcttttgaagcaaacagatgagtgtattcgaggcgagtccagtagcaagacctcaattcttccataaccatcactgtgccactgggtggagtgtgccttcagggcatcttgaaatgtcccgctgaatgatttgactcagtttgctcacttctttggcttttgttttgtgtttgagtctctctctctctctccctctctcttctctttctctccccgctgtgtgcatatgtgtgtgcgtgcacgtgcgcgcttgggcatttgctgttgtttggttattggttggttgttcattttttttttcaacaggtgaaaaagcaggaagtggtggtagagatggcctcagagtcttttccattcagtaagaaagagaaagggaatgcaggccagttacttaaaaggtcttcagattgccttcagttcacagtgcctctgcaacagccattgccctcaggtcacattctttgggctggctgcccttgcaaagcagctggccaaggcttattaaatgtgaacccaacttttccccagggctttcctgtacctgcaagcctcttagtacttaatttaccgaaggcaaatcttccagactatggcttgagtaggatgaaagacaaacacatctgcccaatgatccagctgcccttccttagaccatcacatgcctcccctcaatcacaggttttaaaattactgccctatgttgtctataagaccaagaaaactgtagtacccttattccttttgtgtcatgtaaattgtaactcaggggggcagaagctctggtcacccacaccaacaccaaatccatcagcaaattctactggacaatcctcccttttagtagcagagttgaccgccttttcccattgcatgataggtttctttccctcattctgcctagtgtgtaagttttctatttccccagtacttttagccaaccttaccaagtggtgtgtaaactagtatgtatgtgctttgcttactttttaaaaaaatgtagttagactgtgaggagttactttatgtacgttgcatattcaaactgtgatgttttatccttcaaaacaatctgcattaagaagatattgtgccctactagacagctttcattcactttattactctctcatatatgctgtgagaagttgtaatattaattggcctctttgggtgggactctaagcagtatttgcagaaatatgcttctggtccaacttgtacatccagaacaaaagggcccctctagtagctgtgtgctggattattcaggactgattaactcaagttgctcattgaatcacatcatccactttatcccagaaactagaactgtgagaaaccaggtttagaagacagtcacagaacagcacacatccaaattcagcgccattgaaagttggcctaaggctcagtgccactcacccctccctccccaaaagacaagagaaatttggccagatggggaaggtcactggaaattgaggccaaagggctgatcagaattgcctttataatatatttgatggatgcctataaatgtgggttttgcaaatattgtttaaaaaccaaacttgaagccaggcatggtggcccacacctgtggtcccagctactcaggaggctgaggtgggaggatcatttgagcccaggaggtcaaggctgcagtgagctgtgatgacaccactgcactccaacctaggtaacagagagacacctctgtctctgaaaaaacaaaacttgaagtttgaaacccccagcttgctgaggagccctttttatttttggtactgagagtctcaaggtcccatagctacatggtacagggctgttgtctgcttgctgcacagcagaaattacaccatccacaggaaatggactatttttgcagtccaacatcagccaaccacacacagccgtgtttggaagctgaagagtaaagaaatttctaggaatggctgttgttctgttttttagcacagccatttagatataacatccttcacttaaaaattaaaaacatcagtactaccaccaccaccaacaacatcaacacagatcttcacatctgcccattctgtggttagtcaatggcttgcaataaatgtgcaaactgcatctataggaaacatttttgtgattacggaatactttagttgattgctgaaaatattgaaaggtcttcattttacagtgatgagtacatatgcatgtttcggggacttggcccttctgatgaggggccctcggtactctggataacgaagcttgtgcagagtggtaaccatgcttacacactaaactataatataaaggaaatgaagccatgttaatctgagagcagtgtcgccatagttgtgttgtttacaatactctataaatgggttcctgttgccctgtaattaaactgctgcccgtagaggcctttcagttccttttctgtccttccccttcttaacacaagctcaaattttctaacttgtttttattttgaagacttttaaaatggacattttcaatacataaaaataaacagtgcttt

SEQ ID NO: 25354 - DNA, 3749 bp, Homo sapiens
  source 1..3749: mol_type = unassigned DNA
aggcgcacaggtaccattttgaccgtaaacatcctgccgatttgaaccgaggatttgggcggcaggaagagccgcggcgtaacggcagccatcttgtttgtttgagtgaatcggaaaggaggcgccggctgtggcggcggcgggagctgctcggaagctacacctcgcaagggctcccccctttccccaccccctcccccgacccttttcccctccccgggccacccagcccgcccaactcccagcggagagcaaggttttcttctgttttcatagccagccagaacaatgttctacgcacattttgttctcagtaaaagagggcctctggccaaaatttggctagcggcccattgggataagaagctaaccaaagcccatgtgttcgagtgtaatttagagagcagcgtggagagtatcatctcaccaaaggtgaaaatggcattacggacatcaggacatctcttactgggagtagttcgaatctatcacaggaaagccaaataccttcttgcagactgtaatgaagcattcattaagataaagatggcttttcggccaggtgtggttgacctgcctgaggaaaatcgggaagcagcttataatgccattactttacctgaagaatttcatgactttgatcagccactgcctgacttagatgacatcgatgtggcccagcagttcagcttgaatcagagtagagtggaagagataaccatgagagaagaagttgggaacatcagtattttacaagaaaatgattttggtgattttggaatggatgatcgtgagataatgagagaaggcagtgcttttgaggatgacgacatgttagtaagcactactacttctaacctcctattagagtctgaacagagcaccagcaatctgaatgagaaaattaaccatttagaatatgaagatcaatataaggatgataattttggagaaggaaatgatggtggaatattagatgacaaacttattagtaataatgatggcggtatctttgatgatccccctgccctctctgaggcaggggtgatgttgccagagcagcctgcacatgacgatatggatgaggatgataatgtatcaatgggtgggcctgatagtcctgattcagtggatcccgttgaaccaatgccaaccatgactgatcaaacaacacttgttccaaatgaggaagaagcatttgcattggagcctattgatataactgttaaagaaacaaaagccaagaggaagaggaagctaattgttgacagtgtcaaagagttggatagcaagacaattagagcccaacttagtgattattcagatattgttactactttggatctggcaccgcccaccaagaaattgatgatgtggaaagagacaggaggagtagaaaaactgttttctttacctgctcagcctttgtggaataacagactactgaagctctttacacgctgtcttacaccgcttgtaccagaagaccttagaaaaaggaggaaaggaggagaggcagataatttggatgaattcctcaaagaatttgaaaatccagaggttcctagagaggaccagcaacagcagcatcagcagcgtgatgttatcgatgagcccattattgaagagccaagccgcctccaggagtcagtgatggaggccagcagaacaaacatagatgagtcagctatgcctccaccaccacctcagggagttaagcgaaaagctggacaaattgacccagagcctgtgatgcctcctcagcaggtagagcagatggaaataccacctgtagagcttcccccagaagaacctccaaatatctgtcagctaataccagagttagaacttctgccagaaaaagagaaggagaaagagaaggaaaaagaagatgatgaagaggaagaggatgaagatgcatcagggggcgatcaagatcaggaagaaagaagatggaacaaaaggactcagcagatgcttcatggtcttcagcgtgctcttgctaaaactggagctgaatctatcagtttgcttgagttatgtcgaaatacgaacagaaaacaagctgccgcaaagttctacagcttcttggttcttaaaaagcagcaagctattgagctgacacaggaagaaccgtacagtgacatcatcgcaacacctggaccaaggttccatattatataaggagctagaagcattatagctagtgtttgattcactagtgcttacaaattgcccccatgtgtaggggacacagaaccctttgagaaaacttagatttttgtctgtacaaagtctttgcctttttccttcttcatttttttccagtacattaaatttgtcaatttcatctttgagggaaactgattagatgggttgtgtttgtgttctgatggagaaaacagcaccccaaggactcagaagatgattttaacagttcagaacagatgtgtgcaatattggtgcatgtaataatgttgagtggcagtcaaaagtcatgatttttatcttagttcttcattactgcattgaaaaggaaaacctgtctgagaaaatgcctgacagtttaatttaaaactatggtgtaagtctttgacaagaaaaaaaaacaaacaaacacttctttccatcagtaacactggcaatcttcctgttaaccactctccttagggatggtatctgaaacaacaatggtcaccctcttgagattcgttttaagtgtaattccataatgagcagaggtgtacgcgaaattgtgttatgactgatagccttcagctacaaaaagataggactgacctggtttaaagtgttctattttgtaaatcattccatttgagtctttctgatgaacttggctatactgaaatctgttattttagtgaggctccaaaatgagcaaagctaggcctgattagagtagagtgactattaaaaaacataactttctaggagctataaatcaaagttttaaaaagatgtttggatatatttgagtattccgatcatgaaaacagaaattgccctgcctactacaaggacagactgatgggaaattatgcacctggtcaacttagcttttaagcagacgatgctgtaaaaactaacggcttctctgatatttattgtaagttttagtactgatctccttttccagtgctgcacactcctggtttggaactttaatagcgttgcaacgaaatcctatatccagtttcctgtaatttaattgaagaaaaatacatccaaataaagactttattattaacagaccagatagcatcagaaatcatgtgactgttatgattatcagaatgtcttaactttttagggcaaagttaacactgaaagttctagcttaagtgttgaaacttttgtgggaaaaaaaaatcacttttgaaactcagacttcagtgtatacccaataatttaaaattatgtgaaatgttttaaatttgtgaactcgtaattactgttttaatgattcagtttcttcagagtggtaattgtataaaattgctattgcagctttacattcaatatgatgtgcctgtaaaccaaggagttttccccgtttgtaaaaagacattgtagataattgaatgtttgattttagaaaggtcattagtttcttgttacacattttgttagtctggtttttgttgcttatcgggtttaatattgttcttgaaaatagttgatgctatgttatgtataacttttctaataaaagttgtgttataagctgt

SEQ ID NO: 25355 - DNA, 2163 bp, Homo sapiens
  source 1..2163: mol_type = unassigned DNA
gaagccaacaagaatttgagaactgtaaataccaagccttgaaagggaccatggtgcggcctgtgagacataagaaaccagtcaattactcacagtttgaccactctgacagtgatgatgattttgtttctgcaactgtacctttaaacaagaaatccagaacagcaccaaaggagttaaaacaagataaaccaaaacctaacttgaacaatctccggaaagaagaaatcccagtacaagagaaaacccctaaaaaaagactccctgaaggtacttttagtattccagctagtgcagtgccttgtacaaagatggctttagatgacaagctctaccagagagacttagaagttgcactagctttatcagtgaaggaacttccaacagtcaccactaatgtgcagaactctcaagataaaagcattgaaaaacatggcagtagtaaaatagaaacaatgaataagtctcctcatatctctaattgcagtgtagccagtgattatttagatttggataagattactgtggaagatgatgttggtggtgttcaagggaaaagaaaagcagcatctaaagctgcagcacagcagaggaagattcttctggaaggcagtgatggtgatagtgctaatgacactgaaccagactttgcacctggtgaagattctgaggatgattctgatttttgtgagagtgaggataatgacgaagacttctctatgagaaaaagtaaagttaaagaaattaaaaagaaagaagtgaaggtaaaatccccagtagaaaagaaagagaagaaatctaaatccaaatgtaatgctttggtgacttcggtggactctgctccagctgccgtcaaatcagaatctcagtccttgccaaaaaaggtttctctgtcttcagataccactaggaaaccattagaaatacgcagtccttcagctgaaagcaagaaacctaaatgggtcccaccagcggcatctggaggtagcagaagtagcagcagcccactggtggtagtgtctgtgaagtctcccaatcagagtctccgccttggcttgtccagattagcacgagttaaacctttgcatccaaatgccactagcacctgagtgtggtacaggaggaatgtttggttgggagaatcacagctttacaagggtgtttatatttgatttgtgtttatatttgaggcaggtattgtaatataaaggaatccattaccatgtcctataaatgacctctagccattttatgattatgttctctgtaaaactcttcaagacttcaatgagaagtttgtttataagaattatcttctcatacctttccttgtgaagagcgtattctgtttttctatcagttcgacatgaagtccacatcacatgctgttcttttctagttacatgatgtgcctttctagctttgtctagtttatagcaccttaactttaactgttcagttttatctggcagaggaaaacattcttatttctttcagaagacatttctgaaatcttataagctacttaagctacgttgtcagttttatcgcaaagatgttttgtattttagccaaatctttttatagtacaaacttagaattattttacacactaaaatggttgcagttttatggcatatgtctccgatttagatggttattctctagaaaatagtatttaaagacattttatgaaatcttcattgtcaaaacctttaataaaagtggaaatattttgaaatgccctttttcttgataccactcatccacgtgttcctgattgtccacatttcatgataaaatgagagctccgcagagaatgttagcctttctgttgtaaatgtaatcttcaagtagtcactttttgttaagttctttagaaagtagttgtcaagtacttagtcatccctattatgatatgagatagtacagcttttcaggaagcttagatctgaatttactttgaaaaacaattgtaatgaatattttatatttacattgagaatttcaactagcttctgatcaatttttaataaaaaattttcaaatcatgttagctgttaaaaaatgtataataactcagtttttcttggtttatggaaatatctatattaatgtgaaaataattaatttagaattgtgattaaagtgagcatttgtcta

SEQ ID NO: 25356 - DNA, 2119 bp, Homo sapiens
  source 1..2119: mol_type = unassigned DNA
acagcgcgtgcgccgccgcaagcatggctggtgatgattggacgactggtaacagggggcggagggctccgaagtctggttttgggcgggaattgaaaccgccgctgaagccaacaagaatttgagaactgtaaataccaagccttgaaagggaccatggtgcggcctgtgagacataagaaaccagtcaattactcacagtttgaccactctgacagtgatgatgattttgtttctgcaactgtacctttaaacaagaaatccagaacagcaccaaaggagttaaaacaagataaaccaaaacctaacttgaacaatctccggaaagaagaaatcccagtacaagagaaaacccctaaaaaaagactccctgaaggtacttttagtattccagctagtgcagtgccttgtacaaagatggctttagatgacaagctctaccagagagacttagaagttgcactagctttatcagtgaaggaacttccaacagtcaccactaatgtgcagaactctcaagataaaagcattgaaaaacatggcagtagtaaaatagaaacaatgaataagtctcctcatatctctaattgcagtgtagccagtgattatttagatttggataagattactgtggaagatgatgttggtggtgttcaagggaaaagaaaagcagcatctaaagctgcagcacagcagaggaagattcttctggaaggcagtgatggtgatagtgctaatgacactgaaccagactttgcacctggtgaagattctgaggatgattctgatttttgtgagagtgaggataatgacgaagacttctctatgagaaaaagtaaagttaaagaaattaaaaagaaagaagtgaaggtaaaatccccagtagaaaagaaagagaagaaatctaaatccaaatgtaatgctttggcggcatctggaggtagcagaagtagcagcagcccactggtggtagtgtctgtgaagtctcccaatcagagtctccgccttggcttgtccagattagcacgagttaaacctttgcatccaaatgccactagcacctgagtgtggtacaggaggaatgtttggttgggagaatcacagctttacaagggtgtttatatttgatttgtgtttatatttgaggcaggtattgtaatataaaggaatccattaccatgtcctataaatgacctctagccattttatgattatgttctctgtaaaactcttcaagacttcaatgagaagtttgtttataagaattatcttctcatacctttccttgtgaagagcgtattctgtttttctatcagttcgacatgaagtccacatcacatgctgttcttttctagttacatgatgtgcctttctagctttgtctagtttatagcaccttaactttaactgttcagttttatctggcagaggaaaacattcttatttctttcagaagacatttctgaaatcttataagctacttaagctacgttgtcagttttatcgcaaagatgttttgtattttagccaaatctttttatagtacaaacttagaattattttacacactaaaatggttgcagttttatggcatatgtctccgatttagatggttattctctagaaaatagtatttaaagacattttatgaaatcttcattgtcaaaacctttaataaaagtggaaatattttgaaatgccctttttcttgataccactcatccacgtgttcctgattgtccacatttcatgataaaatgagagctccgcagagaatgttagcctttctgttgtaaatgtaatcttcaagtagtcactttttgttaagttctttagaaagtagttgtcaagtacttagtcatccctattatgatatgagatagtacagcttttcaggaagcttagatctgaatttactttgaaaaacaattgtaatgaatattttatatttacattgagaatttcaactagcttctgatcaatttttaataaaaaattttcaaatcatgttagctgttaaaaaatgtataataactcagtttttcttggtttatggaaatatctatattaatgtgaaaataattaatttagaattgtgattaaagtgagcatttgtcta

SEQ ID NO: 25357 - DNA, 2113 bp, Homo sapiens
  source 1..2113: mol_type = unassigned DNA
gaagccaacaagaatttgagaactgtaaataccaagccttgaaagggaccatggtgcggcctgtgagacataagaaaccagtcaattactcacagtttgaccactctgacagtgatgatgattttgtttctgcaactgtacctttaaacaagaaatccagaacagcaccaaaggagttaaaacaagataaaccaaaacctaacttgaacaatctccggaaagaagaaatcccagtacaagagaaaacccctaaaaaaaggatggctttagatgacaagctctaccagagagacttagaagttgcactagctttatcagtgaaggaacttccaacagtcaccactaatgtgcagaactctcaagataaaagcattgaaaaacatggcagtagtaaaatagaaacaatgaataagtctcctcatatctctaattgcagtgtagccagtgattatttagatttggataagattactgtggaagatgatgttggtggtgttcaagggaaaagaaaagcagcatctaaagctgcagcacagcagaggaagattcttctggaaggcagtgatggtgatagtgctaatgacactgaaccagactttgcacctggtgaagattctgaggatgattctgatttttgtgagagtgaggataatgacgaagacttctctatgagaaaaagtaaagttaaagaaattaaaaagaaagaagtgaaggtaaaatccccagtagaaaagaaagagaagaaatctaaatccaaatgtaatgctttggtgacttcggtggactctgctccagctgccgtcaaatcagaatctcagtccttgccaaaaaaggtttctctgtcttcagataccactaggaaaccattagaaatacgcagtccttcagctgaaagcaagaaacctaaatgggtcccaccagcggcatctggaggtagcagaagtagcagcagcccactggtggtagtgtctgtgaagtctcccaatcagagtctccgccttggcttgtccagattagcacgagttaaacctttgcatccaaatgccactagcacctgagtgtggtacaggaggaatgtttggttgggagaatcacagctttacaagggtgtttatatttgatttgtgtttatatttgaggcaggtattgtaatataaaggaatccattaccatgtcctataaatgacctctagccattttatgattatgttctctgtaaaactcttcaagacttcaatgagaagtttgtttataagaattatcttctcatacctttccttgtgaagagcgtattctgtttttctatcagttcgacatgaagtccacatcacatgctgttcttttctagttacatgatgtgcctttctagctttgtctagtttatagcaccttaactttaactgttcagttttatctggcagaggaaaacattcttatttctttcagaagacatttctgaaatcttataagctacttaagctacgttgtcagttttatcgcaaagatgttttgtattttagccaaatctttttatagtacaaacttagaattattttacacactaaaatggttgcagttttatggcatatgtctccgatttagatggttattctctagaaaatagtatttaaagacattttatgaaatcttcattgtcaaaacctttaataaaagtggaaatattttgaaatgccctttttcttgataccactcatccacgtgttcctgattgtccacatttcatgataaaatgagagctccgcagagaatgttagcctttctgttgtaaatgtaatcttcaagtagtcactttttgttaagttctttagaaagtagttgtcaagtacttagtcatccctattatgatatgagatagtacagcttttcaggaagcttagatctgaatttactttgaaaaacaattgtaatgaatattttatatttacattgagaatttcaactagcttctgatcaatttttaataaaaaattttcaaatcatgttagctgttaaaaaatgtataataactcagtttttcttggtttatggaaatatctatattaatgtgaaaataattaatttagaattgtgattaaagtgagcatttgtctat

SEQ ID NO: 25358 - DNA, 1036 bp, Homo sapiens
  source 1..1036: mol_type = unassigned DNA
cgccgctgaagccaacaagaatttgagaactgtaaataccaagccttgaaagggaccatggtgcggcctgtgagacataagaaaccagtcaattactcacagtttgaccactctgacagtgatgatgattttgtttctgcaactgtacctttaaacaagaaatccagaacagcaccaaaggagttaaaacaagataaaccaaaacctaacttgaacaatctccggaaagaagaaatcccagtacaagagaaaacccctaaaaaaaggtgagaggcattgaaaaacatggcagtagtaaaatagaaacaatgaataagtctcctcatatctctaattgcagtgtagccagtgattatttagatttggataagattactgtggaagatgatgttggtggtgttcaagggaaaagaaaagcagcatctaaagctgcagcacagcagaggaagattcttctggaaggcagtgatggtgatagtgctaatgacactgaaccagactttgcacctggtgaagattctgaggatgattctgatttttgtgagagtgaggataatgacgaagacttctctatgagaaaaagtaaagttaaagaaattaaaaagaaagaagtgaaggtaaaatccccagtagaaaagaaagagaagaaatctaaatccaaatgtaatgctttggtgacttcggtggactctgctccagctgccgtcaaatcagaatctcagtccttgccaaaaaaggtttctctgtcttcagataccactaggaaaccattagaaatacgcagtccttcagctgaaagcaagaaacctaaatgggtcccaccaggtatggcatatttatcatcaaggacaggagcttggaaaattatcactgcggcatctggaggtagcagaagtagcagcagcccactggtggtagtgtctgtgaagtctcccaatcagagtctccgccttggcttgtccagattagcacgagttaaacctttgcatccaaatgccactagcacctgagtgtggtacaggaggaatgtttggtt

SEQ ID NO: 25359 - DNA, 565 bp, Homo sapiens
  source 1..565: mol_type = unassigned DNA
agcaggtgagcctgcgatgcgcgggaagacgttccgctttgaaatgcagcgggatttggtgagtttcccgctgtctccagcggtgcgggtgaagctggtgtctgcggggttccagactgctgaggaactcctagaggtgaaaccctccgagcttagcaaagaagttgggatatctaaagcagaagccttagaaactctgcaaattatcagaagagaatgtctcacaaataaaccaagatatgctggtacatctgagtcacacaagaagtgtacagcactggaacttcttgagcaggagcatacccagggcttcataatcaccttctgttcagcactagatgatattcttgggggtggagtgcccttaatgaaaacaacagaaatttgtggtgcaccaggtgttggaaaaacacaattatggtaaaataaagtgttctccttttaagggtgggtttaataacatattatgaaagtagtattttgtactatcgtcaggaaaccaaataagatatatatgtgctcttaattttaagtgtgtatgtgcattaaacaaaaattagcttac

SEQ ID NO: 25360 - DNA, 1158 bp, Homo sapiens
  source 1..1158: mol_type = unassigned DNA
tagccgcgcaggtgcggtgaagggaggatggcggagttggtaccttttgcggttcccatcgagagtgacaaaaccttgctagtgtgggagctgagctccggacccacggccgaggctttgcatcattctctgttcacagcattttctcagtttggccttctgtattcagtccgggtcttcccaaatgctgcagtggcccatcctggtttctatgccgtcattaagttttattctgcaagggctgcccacagagcccaaaaggcatgcgaccggaagcagctttttcagaaatctccagtcaaggttcgtcttggcaccagacataaggcagttcaacatcaagcccttgccctgaacagttccaaatgccaagaactggcgaattactactttggtttcaatgggtgttccaaaaggatcatcaagcttcaggagctttctgaccttgaagaaagggaaaatgaagatagcatggtgccacttccgaagcaaagcctgaagttcttctgtgctttagaagtggtgttgccatcctgtgattgcaggagtcctggcattggcttggtggaggagcctatggataaggtggaggaaggaccattatcattccttatgaaaaggaagacagcccagaagcttgctattcagaaggctttgtcagatgcattccagaaactgttgattgttgttctagaaagtggtaaaatagctgtggagtacagacccagtgaagacatcgtaggtgtcagatgcgaagaagaactacacggtttaattcaagtcccttgctctccctggaagcagtatggccaagaggaggaagggtatctctcggatttcagcttggaggaggaagagttcaggctgccagaacttgactagcatttctgaatatcccaaggcgaggtcatgtaacttccttgggaagctctgtcgtgcccctaccccacgccgccccaccactataggctgctggagtcctggaaccacctgggtcggccgcccaaatctttcctggcgaaggggagggaaggggtgttctggtggagtgggaagggaggcttgggtaggattgtgggataagatcgccctggtgacgaggagcggatctcgaacggaacttaataaaggttgcctagataaagatatggtaaataa

SEQ ID NO: 25361 - DNA, 542 bp, Homo sapiens
  source 1..542: mol_type = unassigned DNA
tctgggcgtgagatttcatgcatttacttgtcccacccccacagcattctctgttcacagcattttctcagtttggccttctgtattcagtccgggtcttcccaaatgctgcagtggcccatcctggtttctatgccgtcattaagttttattctgcaagggctgcccacagagcccaaaaggcatgcgaccggaagcagctttttcagaaatctccagtcaaggttcgtcttggcaccagacataaggcagttcaacatcaagcccttgccctgaacagttccaaatgccaagaactggcgaattactactttggtttcaatgggtgttccaaaaggatcatcaaggaccattatcattccttatgaaaaggaagacagcccagaagcttgctattcagaaggctttgtcagatgcattccagaaactgttgattgttgttctaggtaagactgtcttgatcatccttgaagtacttcagtttcagtaagcaaataaactcattttgaaaagttaattgaataaaaatattgatatctaaa

SEQ ID NO: 25362 - DNA, 779 bp, Homo sapiens
  source 1..779: mol_type = unassigned DNA
cggtgaagggaggatggcggagttggtaccttttgcggttcccatcgagagtgacaaaaccttgctagtgtgggagctgagctccggacccacggccgaggctttgcatcattctctgttcacagcattttctcagtttggccttctgtattcagtccgggtcttcccaaatgctgcagtggcccatcctggtttctatgccgtcattaagttttattctgcaagggctgcccacagagcccaaaaggcatgcgaccggaagcagctttttcagaaatctccagtcaaggttcgtcttggcaccagacataaggcagttcaacatcaagcccttgccctgaacagttccaaatgccaagaactggcgaattactactttggtttcaatgggtgttccaaaaggatcatcaagcttcaggagctttctgaccttgaagaaagggaaaatgaagatagcatggtgccacttccgaagcaaagcctgaagttcttctgtgctttagaagtggtgttgccatcctgtgattgcaggagtcctggcattggcttggtggaggagcctatggataaggtggaggaaggaccattatcattccttatgaaaaggaagacagcccagaagcttgctattcagaaggctttgtcagatgcattccagaaactgttgattgttgttctaggtaagactgtcttgatcatccttgaagtacttcagtttcagtaagcaaataaactcattttgaaaagttaattgaataaaaatattgatatctaaagca

SEQ ID NO: 25363 - DNA, 1535 bp, Homo sapiens
  source 1..1535: mol_type = unassigned DNA
tgctggggcgagggttagccgcgcaggtgcggtgaagggaggatggcggagttggtaccttttgcggttcccatcgagagtgacaaaaccttgctagtgtgggagctgagctccggacccacggccgaggctttgcatgtgagccggggccaggatggagggagggatggagaaagctgcccacccgctgactgggagttccggagtcctgcctcagaccctcacctgcctgagcctccgctgaaggactcttaattataaaggggatcccaactgacaactgacgacccccaacagatttttagagtcccggagaggtatctctccaccttcagaacgttttaccttccagtgcttcttaaagtttaggattttaagaggaaaacctgttgattaagtgggaagtgttttgaatcgcatccttcgcgaagagaggtttggggaatatgagggcatgtgcggttttgttttctgggcgtgagatttcatgcatttacttgtcccacccccacagcattctctgttcacagcattttctcagtttggccttctgtattcagtccgggtcttcccaaatgctgcagtggcccatcctggtttctatgccgtcattaagttttattctgcaagggctgcccacagagcccaaaaggcatgcgaccggaagcagctttttcagaaatctccagtcaaggttcgtcttggcaccagacataaggcagttcaacatcaagcccttgccctgaacagttccaaatgccaagaactggcgaattactactttggtttcaatgggtgttccaaaaggatcatcaagcttcaggagctttctgaccttgaagaaagggaaaatgaagatagcatggtgccacttccgaagcaaagcctgaagttcttctgtgctttagaagtggtgttgccatcctgtgattgcaggagtcctggcattggcttggtggaggagcctatggataaggtggaggaaggaccattatcattccttatgaaaaggaagacagcccagaagcttgctattcagaaggctttgtcagatgcattccagaaactgttgattgttgttctagaaagtggtaaaatagctgtggagtacagacccagtgaagacatcgtaggtgtcagatgcgaagaagaactacacggtttaattcaagtcccttgctctccctggaagcagtatggccaagaggaggaagggtatctctcggatttcagcttggaggaggaagagttcaggctgccagaacttgactagcatttctgaatatcccaaggcgaggtcatgtaacttccttgggaagctctgtcgtgcccctaccccacgccgccccaccactataggctgctggagtcctggaaccacctgggtcggccgcccaaatctttcctggcgaaggggagggaaggggtgttctggtggagtgggaagggaggcttgggtaggattgtgggataagatcgccctggtgacgaggagcggatctcgaacggaacttaataaaggttgcctagataaa

SEQ ID NO: 25364 - DNA, 669 bp, Homo sapiens
  source 1..669: mol_type = unassigned DNA
tttggtttcaatgggtgttccaaaaggatcatcaagcttcaggagctttctgaccttgaagaaagggaaaatgaagatagcatggtgccacttccgaagcaaagcctgaagttcttctgtgctttagaagtggtgttgccatcctgtgattgcaggagtcctggcattggcttggtggaggagcctatggataaggtggaggaagaaagtggtaaaatagctgtggagtacagacccagtgaagacatcgtaggtgtcagatgcgaagaagaactacacggtttaattcaagtcccttgctctccctggaagcagtatggccaagaggaggaagggtatctctcggatttcagcttggaggaggaagagttcaggctgccagaacttgactagcatttctgaatatcccaaggcgaggtcatgtaacttccttgggaagctctgtcgtgcccctaccccacgccgccccaccactataggctgctggagtcctggaaccacctgggtcggccgcccaaatctttcctggcgaaggggagggaaggggtgttctggtggagtgggaagggaggcttgggtaggattgtgggataagatcgccctggtgacgaggagcggatctcgaacggaacttaataaaggttgcctagataaagatatggtaaataa

SEQ ID NO: 25365 - DNA, 812 bp, Homo sapiens
  source 1..812: mol_type = unassigned DNA
ggcgcaatgctggggcgagggttagccgcgcaggtgcggtgaagggaggatggcggagttggtaccttttgcggttcccatcgagagtgacaaaaccttgctagtgtgggagctgagctccggacccacggccgaggctttgcatcattctctgttcacagcattttctcagtttggccttctgtattcagtccgggtcttcccaaatgctgcagtggcccatcctggtttctatgccgtcattaagttttattctgcaagggctgcccacagagcccaaaaggcatgcgaccggaagcagctttttcagaaatctccagtcaaggttcgtcttggcaccagacataaggcagttcaacatcaagcccttgccctgaacagttccaaatgccaagaactggcgaattactactttggtttcaatgggtgttccaaaaggatcatcaaggtcccttgctctccctggaagcagtatggccaagaggaggaagggtatctctcggatttcagcttggaggaggaagagttcaggctgccagaacttgactagcatttctgaatatcccaaggcgaggtcatgtaacttccttgggaagctctgtcgtgcccctaccccacgccgccccaccactataggctgctggagtcctggaaccacctgggtcggccgcccaaatctttcctggcgaaggggagggaaggggtgttctggtggagtgggaagggaggcttgggtaggattgtgggataagatcgccctggtgacgaggagcggatctcgaacggaacttaataaaggttgcctagataaa

SEQ ID NO: 25366 - DNA, 1491 bp, Homo sapiens
  source 1..1491: mol_type = unassigned DNA
agccgcgcaggtgcggtgaagggaggatggcggagttggtaccttttgcggttcccatcgagagtgacaaaaccttgctagtgtgggagctgagctccggacccacggccgaggctttgcatgtgagccggggccaggatggagggagggatggagaaagctgcccacccgctgactgggagttccggagtcctgcctcagaccctcacctgcctgagcctccgctgaaggactcttaattataaaggggatcccaactgacaactgacgacccccaacagatttttagagtcccggagaggtatctctccaccttcagaacgttttaccttccagtgcttcttaaagtttaggattttaagaggaaaacctgttgattaagtgggaagtgttttgaatcgcatccttcgcgaagagaggtttggggaatatgagggcatgtgcggttttgttttctgggcgtgagatttcatgcatttacttgtcccacccccacagcattctctgttcacagcattttctcagtttggccttctgtattcagtccgggtcttcccaaatgctgcagtggcccatcctggtttctatgccgtcattaagttttattctgcaagggctgcccacagagcccaaaaggcatgcgaccggaagcagctttttcagaaatctccagtcaaggttcgtcttggcaccagacataaggcagttcaacatcaagcccttgccctgaacagttccaaatgccaagaactggcgaattactactttggtttcaatgggtgttccaaaaggatcatcaagcttcaggagctttctgaccttgaagaaagggaaaatgaagatagcatggtgccacttccgaagcaaagcctgaagttcttctgtgctttagaagtggtgttgccatcctgtgattgcaggagtcctggcattggcttggtggaggagcctatggataaggtggaggaaggaccattatcattccttatgaaaaggaagacagcccagaagcttgctattcagaaggctttgtcagatgcattccagaaactgttgattgttgttctaggtaagactgtcttgatcatccttgaagtacttcagtttcagtaagcaaataaactcattttgaaaagttaattgaataaaaatattgatatctaaagcactctatagtatgctttcatttgctaaattatttcacaccaacaggctcaaatttgttctgtgtgacatttgtgaaaaaaaatgacagcaaatattgtccccagtttacagatgtgaaaagacttgcctcagttcccacagaaaatgtttaagccaggtcttctttaattgcttacctatcatacagaatagtgattataagttttggacgcatggatttgagtcctaactctgtctcttagatttttaatgcaattaggccgggcgcggtggctcacgcctgtaatcccagcactttgggaggccgagatgggcggatcacga

SEQ ID NO: 25367 - DNA, 1067 bp, Homo sapiens
  source 1..1067: mol_type = unassigned DNA
ggcgcaatgctggggcgagggttagccgcgcaggtgcggtgaagggaggatggcggagttggtaccttttgcggttcccatcgagagtgacaaaaccttgctagtgtgggagctgagctccggacccacggccgaggctttgcatcattctctgttcacagcattttctcagtttggccttctgtattcagtccgggtcttcccaaatgctgcagtggcccatcctggtttctatgccgtcattaagttttattctgcaagggctgcccacagagcccaaaaggcatgcgaccggaagcagctttttcagaaatctccagtcaaggttcgtcttggcaccagacataaggcagttcaacatcaagcccttgccctgaacagttccaaatgccaagaactggcgaattactactttggtttcaatgggtgttccaaaaggatcatcaagcttcaggagctttctgaccttgaagaaagggaaaatgaagatagcatggtgccacttccgaagcaaagcctgaagttcttctgtgctttagaagtggtgttgccatcctgtgattgcaggagtcctggcattggcttggtggaggagcctatggataaggtggaggaagaaagtggtaaaatagctgtggagtacagacccagtgaagacatcgtaggtgtcagatgcgaagaagaactacacggtttaattcaagtcccttgctctccctggaagcagtatggccaagaggaggaagggtatctctcggatttcagcttggaggaggaagagttcaggctgccagaacttgactagcatttctgaatatcccaaggcgaggtcatgtaacttccttgggaagctctgtcgtgcccctaccccacgccgccccaccactataggctgctggagtcctggaaccacctgggtcggccgcccaaatctttcctggcgaaggggagggaaggggtgttctggtggagtgggaagggaggcttgggtaggattgtgggataagatcgccctggtgacgaggagcggatctcgaacggaacttaataaaggttgcctagataaa

SEQ ID NO: 25368 - DNA, 997 bp, Homo sapiens
  source 1..997: mol_type = unassigned DNA
ggcgcaatgctggggcgagggttagccgcgcaggtgcggtgaagggaggatggcggagttggtaccttttgcggttcccatcgagagtgacaaaaccttgctagtgtgggagctgagctccggacccacggccgaggctttgcatcattctctgttcacagcattttctcagtttggccttctgtattcagtccgggtcttcccaaatgctgcagtggcccatcctggtttctatgccgtcattaagttttattctgcaagggctgcccacagagcccaaaaggcatgcgaccggaagcagctttttcagaaatctccagtcaaggttcgtcttggcaccagacataaggcagttcaacatcaagcccttgccctgaacagttccaaatgccaagaactggcgaattactactttggtttcaatgggtgttccaaaaggatcatcaaggaccattatcattccttatgaaaaggaagacagcccagaagcttgctattcagaaggctttgtcagatgcattccagaaactgttgattgttgttctagaaagtggtaaaatagctgtggagtacagacccagtgaagacatcgtaggtgtcagatgcgaagaagaactacacggtttaattcaagtcccttgctctccctggaagcagtatggccaagaggaggaagggtatctctcggatttcagcttggaggaggaagagttcaggctgccagaacttgactagcatttctgaatatcccaaggcgaggtcatgtaacttccttgggaagctctgtcgtgcccctaccccacgccgccccaccactataggctgctggagtcctggaaccacctgggtcggccgcccaaatctttcctggcgaaggggagggaaggggtgttctggtggagtgggaagggaggcttgggtaggattgtgggataagatcgccctggtgacgaggagcggatctcgaacggaacttaataaaggttgcctagataaa

SEQ ID NO: 25369 - DNA, 432 bp, Homo sapiens
  source 1..432: mol_type = unassigned DNA
atgcatttacttgtcccacccccacagcattctctgttcacagcattttctcagtttggccttctgtattcagtccgggtcttcccaaatgctgcagtggcccatcctggtttctatgccgtcattaagttttattctgcaagggctgcccacagagcccaaaaggcatgcgaccggaagcagctttttcagaaatctccagtcaaggttcgtcttggcaccagacataaggcagttcaacatcaagcccttgccctgaacagttccaaatgccaagaactggcgaattactactttggtttcaatgggtgttccaaaaggatcatcaaggtcccttgctctccctggaagcagtatggccaagaggaggaagggtatctctcggatttcagcttggaggaggaagagttcaggctgccagaacttgactag

SEQ ID NO: 25370 - DNA, 3068 bp, Homo sapiens
  source 1..3068: mol_type = unassigned DNA
gattggcttcgccgaggcgggatccttgagcttctccggcggcgaggggatagctggttaccagaaggacttctttgcagggccagtggtttctgtcagattttcgccggtcacgactgctgaatatgagacgatctgcagcaccaagtcagttgcaggggaattccttcaaaaaaccaaaatttatacctccaggaagaagtaatccaggtctgaatgaagagattacaaaactgaatccagatataaaattatttgagggtgttgcaattaataacacctttctcccgtcacaaaatgatcttagaatatgcagtttaaatctgcctagtgaagaaagtactagagaaatcaataacagagataattgcagtggaaaatattgttttgaagcacctacactggcaacattagatccacctcatacagttcattcggctcctaaagaagtagcagtgtccaaggaacaagaagagaaatctgatagcctagttaaatatttcagtgttgtttggtgtaagccttcaaagaaaaaacataaaaagtgggaaggtgatgctgttcttattgtaaaaggaaagtcatttatattaaagaatttggaaggcaaagacattggaagaggcattggttataaattcaaagagcttgaaaagattgaagagggccaaacactgatgatttgtggaaaagaaatagaagtcatgggtgtaatctctccagatgacttcagcagtggcaggtgttttcagcttggaggaggaagtactgctatctcgcattcttctcaggttgccaggaaatgtttctctaaccctttcaaaagtgtttgtaaaccaagttcaaaggaaaatagacagaatgatttccaaaattgcaaaccacgccatgacccatatacgccaaattccctcgttatgccacgaccagataagaatcaccagtgggtattcaataagaactgtttccctcttgtggatgtagtgattgatccttaccttgtatatcatcttcgaccacatcagaaagaaggaatcatattcctttatgaatgtgtaatgggaatgagaatgaatggcagatgtggagctattcttgctgatgaaatgggtttagggaagacattgcaatgtatttcgctcatctggaccctgcagtgtcagggaccctatggaggcaagccagtaataaagaagacactaattgtcacacctggaagcttggtgaataattggaagaaagaatttcaaaaatggctaggaagtgaaaggatcaagatatttactgttgatcaggaccacaaagttgaagaattcatcaagtctatattttattctgttcttattatcagttatgaaatgttacttcgttccctggatcaaattaagaatataaaatttgatcttctaatctgtgacgaggggcatcgtttgaagaacagtgccattaagacaactacagccctcattagcctttcttgtgagaaaagaataattctaactggtactccaattcagaatgatctgcaagaattttttgcattaattgattttgtaaatccaggaatattaggctctttgtcatcttataggaaaatatatgaagaacccatcattttatcgagagaaccttctgcttctgaggaagaaaaggagttaggagaaagaagagcagctgaacttacttgcctcactggactctttatccttagaagaacccaagaaattataaataaatatctcccacctaaaatagagaatgttgtcttttgccgaccaggagcactacagattgagctttatcgaaagctgttaaattctcaggttgtcaggttctgccttcaagggttgttggaaaatagtccccatctaatatgtataggagctcttaaaaaactgtgcaatcacccctgccttttgttcaactctataaaggaaaaggaatgtagctcaacttgtgataaaaatgaagaaaagagtctatacaaaggcttgctaagtgtgtttcctgctgactacaaccctctcctgtttactgaaaaggagtcaggaaaactacaggtgttgtccaagctcttagcggttatccacgaacttcgacctactgaaaaggtggtgttggtatccaactatacacaaaccttgaacattttacaagaagtatgtaagcgtcatggatatgcttatacaagacttgatggacaaacaccaatctctcaaaggcagcagattgttgatggctttaacagtcaacactcttctttttttatttttttgttaagttcaaaagctggtggtgtaggacttaacctcattggaggatctcacttaattctctatgacattgattggaatccagccactgacattcaggcaatgtctagagtatggagagatggtcagaaatatcctgtacatatttacagactcctaactacaggtacaatagaagaaaagatctatcaaaggcagatcagtaagcaaggtctttgtggggcagttgtcgacctcaccaagacatctgaacatattcagttttcagtagaagaacttaaaaatttgttcacattacatgaaagttcagattgtgttactcatgatctgcttgactgtgagtgtacaggagaagaagttcatacaggtgattcgttggaaaaattcattgtctctagagattgtcagcttggtccacatcaccagaaatctaactccctgaaacctctttctatgtcccagctgaagcaatggaaacatttttctggagatcatttaaatcttacagatccttttcttgaaagaataacagaaaatgtgtcattcatttttcagaatataaccactcaagctactggcacatagtgaaagattacttctgacattccattgctcttcttttgaaaattagtatggtaattaaatgtactttttgaaaattaatagaattatttaaattacagtatatgttgcaaaatatatcacttttgatacaatagtcaaaattgagtggtttaatgttttgtaaatattaagtgtttaaatgaaaaataaagatgtgcttatatcattgta

SEQ ID NO: 25371 - DNA, 1158 bp, Homo sapiens
  source 1..1158: mol_type = unassigned DNA
ttgtgaaaagagctgagcagagctgaaggctgcatggtggtttcagaaactgcctacttaatttgaaaagaacaatggtaggaaaggctagatcttccaattttaccttatccgaaaagcttgatttgctaaagcttgtgaagccatatgtgaaaattctcgaagaacacactaataaacattcagtaatagtagaaaagaatagatgttgggatatcatagcagttaactataatgcaattggagtagaccgccctcctcgaacagcacagggcctacgcaccctttataaaaggctcaaagaatatgccaaacaggagctattgcagcaaaaagagacccaatcagattttaaaagcaatatttctgagccaaccaagaaagttatggagatgattccccagatttccagtttttgcctggtaagagacaggaaccacatacaaagtgcaaacttggatgaggaggcacaggctggtaccagttcactacaggtaatgttggatcaccatcctgttgctattacagtggaggtgaagcaagaagaagacattaaaccacctcctccactggttttaaattctcaacagagtgatactttagagcaaagagaagaacatgaattagtacatgttatggaaagatccttgtcgccttcactttcctctgttgatatgagaatgacatcgtctccatcttctattccaaggagagatgatttttttcggcatgagagtggtgaacactttaggtcactattagggtatgatcctcagatcctgcaaatgttgaaagaggagcatcagataattttagaaaatcaaaaaaattttggattgtatgttcaggagaagagggatggattgaaaagaaggcagcagctagaggaagagctactaagagcaaaaattgaagtggagaagctgaaagcaattcgcttacggcatgatctacctgaatataacagtctctaagtttttttttcaatcttgcaatttgataattttgattttggccaaattactttaatttgggaatatcctgaaacagaatacacgttcttgaaaaatgttgttaatctctattatggaaaaactttttagatataattttctaattattttcttttgagatattaaaatttactggttggttggc

SEQ ID NO: 25372 - DNA, 472 bp, Homo sapiens
  source 1..472: mol_type = unassigned DNA
tcctccaggcctctgaagaagaaattcagaacaaagaataatagcagttagagttcagtcctgtttcccctaatctgaggtcacgactgctgaatatgagacgatctgcagcaccaagtcagttgcaggggaattccttcaaaaaaccaaaatttatacctccaggaagaagtaatccaggtctgaatgaagagattacaaaactgaatccagatataaaattatttgagggtgttgcaattaataacacctttctcccgtcacaaaatgatcttagaatatgcagtttaaatctgcctagtgaagaaagtactagagaaatcaataacagagataattgcagtggaaaatattgttttgaagcacctacactggcaacattagatccacctcatacagttcattcggctcctaaagaagtagcagtgtccaaggaacaagaagagaaatctgatagcctagttaaatattt

SEQ ID NO: 25373 - DNA, 1879 bp, Homo sapiens
  source 1..1879: mol_type = unassigned DNA
ggatagctggttaccagaaggacttctttgcagggccagtggtttctgtcagattttcgccggtcacgactgctgaatatgagacgatctgcagcaccaagtcagttgcaggggaattccttcaaaaaaccaaaatttatacctccaggaagaagtaatccaggtctgaatgaagagattacaaaactgaatccagatataaaattatttgagggtgttgcaattaataacacctttctcccgtcacaaaatgatcttagaatatgcagtttaaatctgcctagtgaagaaagtactagagaaatcaataacagagataattgcagtggaaaatattgttttgaagcacctacactggcaacattagatccacctcatacagtgcaaacttggatgaggaggcacaggctggtaccagttcactacaggtaatgttggatcaccatcctgttgctattacagtggaggtgaagcaagaagaagacattaaaccacctcctccactggttttaaattctcaacagagtgatactttagagcaaagagaagaacatgaattagtacatgttatggaaagatccttgtcgccttcactttcctctgttgatatgagaatgacatcgtctccatcttctattccaaggagagatgatttttttcggcatgagagtggtgaacactttaggtcactattagggtatgatcctcagatcctgcaaatgttgaaagaggagcatcagataattttagaaaatcaaaaaaattttggattgtatgttcaggagaagagggatggattgaaaagaaggcagcagctagaggaagagctactaagagcaaaaattgaagtggagaagctgaaagcaattcgcttacggcatgatctacctgaatataacagtctctaagtttttttttcaatcttgcaatttgataattttgattttggccaaattactttaatttgggaatatcctgaaacagaatacacgttcttgaaaaatgttgttaatctctattatggaaaaactttttagatataattttctaattattttcttttgagatattaaaatttactggttggttggcatggttatagtttttattgtcttcttttttttttccctaagtttaattgttgaccttacaaaagatattttattctgatcactaagatatacacaaatgcatatacaaacacatattctttcaaagttctgagtcttcaacatttttagttagaactttgaaagctataattagagatttttaagtcagtctaatttaggagctatactaacctaataccaagaagcttgtctgtatgacattggtttttatgcttttatcttttgaaggagtaaatcctaggattttagagatggaagatatttggagaacactttttttccatctctgcagtttaggggtaatgaaacaggtccagggagaactcaatgacttacttagggtaacaaagctatttatggcagagcagagaccagcacttagtttttctttgtgtaatttccatcccgctattcgatagaagtaaatatccactaaaacattctctagatttaaatattagaagcatttctttcattaaaattgcctttaaagattgttaggttgtgaaatcaggataattacatcaattacccccattctctctctatttttgttccagcaaaatagataaggtattccattgaagctattatatattttggctgtgtgatttaaagacatgtcttaattcattttgaatgtcctgttctggaaaaaatttctttcacagtaaaaatcagaatgaacaaaattaaaattttatgtattttataagtattgttattttagtattcatggaaataaa

SEQ ID NO: 25374 - DNA, 1879 bp, Homo sapiens; identical to SEQ ID NO: 25373
  source 1..1879: mol_type = unassigned DNA

SEQ ID NO: 25375 - DNA, 3040 bp, Homo sapiens
  source 1..3040: mol_type = unassigned DNA
cttgagcttctccggcggcgaggggatagctggttaccagaaggacttctttgcagggccagtggtttctgtcagattttcgccggtcacgactgctgaatatgagacgatctgcagcaccaagtcagttgcaggggaattccttcaaaaaaccaaaatttatacctccaggaagaagtaatccaggtctgaatgaagagattacaaaactgaatccagatataaaattatttgagggtgttgcaattaataacacctttctcccgtcacaaaatgatcttagaatatgcagtttaaatctgcctagtgaagaaagtactagagaaatcaataacagagataattgcagtggaaaatattgttttgaagcacctacactggcaacattagatccacctcatacagttcattcggctcctaaagaagtagcagtgtccaaggaacaagaagagaaatctgatagcctagttaaatatttcagtgttgtttggtgtaagccttcaaagaaaaaacataaaaagtgggaaggtgatgctgttcttattgtaaaaggaaagtcatttatattaaagaatttggaaggcaaagacattggaagaggcattggttataaattcaaagagcttgaaaagattgaagagggccaaacactgatgatttgtggaaaagaaatagaagtcatgggtgtaatctctccagatgacttcagcagtggcaggtgttttcagcttggaggaggaagtactgctatctcgcattcttctcaggttgccaggaaatgtttctctaaccctttcaaaagtgtttgtaaaccaagttcaaaggaaaatagacagaatgatttccaaaattgcaaaccacgccatgacccatatacgccaaattccctcgttatgccacgaccagataagaatcaccagtgggtattcaataagaactgtttccctcttgtggatgtagtgattgatccttaccttgtatatcatcttcgaccacatcagaaagaaggaatcatattcctttatgaatgtgtaatgggaatgagaatgaatggcagatgtggagctattcttgctgatgaaatgggtttagggaagacattgcaatgtatttcgctcatctggaccctgcagtgtcagggaccctatggaggcaagccagtaataaagaagacactaattgtcacacctggaagcttggtgaataattggaagaaagaatttcaaaaatggctaggaagtgaaaggatcaagatatttactgttgatcaggaccacaaagttgaagaattcatcaagtctatattttattctgttcttattatcagttatgaaatgttacttcgttccctggatcaaattaagaatataaaatttgatcttctaatctgtgacgaggggcatcgtttgaagaacagtgccattaagacaactacagccctcattagcctttcttgtgagaaaagaataattctaactggtactccaattcagaatgatctgcaagaattttttgcattaattgattttgtaaatccaggaatattaggctctttgtcatcttataggaaaatatatgaagaacccatcattttatcgagagaaccttctgcttctgaggaagaaaaggagttaggagaaagagagcagctgaacttacttgcctcactggactctttacttagaagaacccaagaaattataaataaatatctcccacctaaaatagagaatgttgtcttttgccgaccaggagcactacagattgagctttatcgaaagctgttaaattctcaggttgtcaggttctgccttcaagggttgttggaaaatagtccccatctaatatgtataggagctcttaaaaaactgtgcaatcacccctgccttttgttcaactctataaaggaaaaggaatgtagctcaacttgtgataaaaatgaagaaaagagtctatacaaaggcttgctaagtgtgtttcctgctgactacaaccctctcctgtttactgaaaaggagtcaggaaaactacaggtgttgtccaagctcttagcggttatccacgaacttcgacctactgaaaaggtggtgttggtatccaactatacacaaaccttgaacattttacaagaagtatgtaagcgtcatggatatgcttatacaagacttgatggacaaacaccaatctctcaaaggcagcagattgttgatggctttaacagtcaacactcttctttttttatttttttgttaagttcaaaagctggtggtgtaggacttaacctcattggaggatctcacttaattctctatgacattgattggaatccagccactgacattcaggcaatgtctagagtatggagagatggtcagaaatatcctgtacatatttacagactcctaactacaggtacaatagaagaaaagatctatcaaaggcagatcagtaagcaaggtctttgtggggcagttgtcgacctcaccaagacatctgaacatattcagttttcagtagaagaacttaaaaatttgttcacattacatgaaagttcagattgtgttactcatgatctgcttgactgtgagtgtacaggagaagaagttcatacaggtgattcgttggaaaaattcattgtctctagagattgtcagcttggtccacatcaccagaaatctaactccctgaaacctctttctatgtcccagctgaagcaatggaaacatttttctggagatcatttaaatcttacagatccttttcttgaaagaataacagaaaatgtgtcattcatttttcagaatataaccactcaagctactggcacatagtgaaagattacttctgacattccattgctcttcttttgaaaattagtatggtaattaaatgtactttttgaaaattaatagaattatttaaattacagtatatgttgcaaaatatatcacttttgatacaatagtcaaaattgagtggtttaatgttttgtaaatattaagtgtttaaatgaaaaataaagatgtgcttatatcattgt

SEQ ID NO: 25376 - DNA, 1846 bp, Homo sapiens
  source 1..1846: mol_type = unassigned DNA
gcagagacgagatcgcgaagctttgaaaagcgcgggcaacatccgggcacctgggccgtcgagctgaggcgcgccttccgagcctgctttttagggcggatggcagccatgctgaagtgcgtgatgagcggcagtcaggtgaaagtatttgggaaagcagttcaagctctatcacgaattagtgacgagttctggctagacccatctaaaaaaggtcttgctctaagatgtgtgaattcttctcggtcagcatatggatgtgtcctgttctctcctgtgttttttcagcattatcaatggtcagctttagtgaaaatgagtgaaaatgaacttgacacaacactgcatttaaaatgcaaattgggaatgaagtcaattttgcccatctttagatgtctgaattcccttgaaagaaatatagagaagtgcagaatattcaccagatctgataaatgcaaagtagttattcaattcttctacagacatggtattaaaagaactcataatatatgttttcaagaaagtcagcctttgcaagttatttttgacaagaatgtttgtactaatacgctaatgattcaaccaagattgcttgctgatgccattgttctttttacatcaagtcaagaggaagttactcttgctgttactccactgaatttttgcctcaagagttctaatgaggaatcaatggatttgagcaatgctgtacacagtgagatgtttgttggctcagatgagtttgacttctttcaaattggaatggacactgagataacattttgtttcaaagaattgaagggaatactgacattttcagaagctacacatgctcctatatccatttattttgatttccctgggaaacctctggctttgagtattgatgatatgttagtggaagctaactttattttggccacattagctgatgaacaaagtagagcatcttcaccacagtcactgtgtctttcacagaaacgaaaaaggtcagatctgattgaaaaaaaggctggcaaaaatgtaactggccaggccctggaatgtatttcaaaaaaagcagcaccaagaaggctttatcctaaggagactctcacaaacatatctgcattggaaaactgtggcagccctgcaatgaaaagagtggatggagatgtcagtgaagtatcagaaagcagtgtcagcaacacagaggaagtgccagggtctctgtgtctcagaaagttttcttgcatgttctttggagcagtttcttctgaccagcaagaacacttcaaccaccctttcgacagtctggcaagagcaagtgacagtgaagaggacatgaataatgtgtgctgcaggaaagaatttaatggaagtgatgccaaatatttctgtattatctgacatagaacagtatcctccactgccaagacagcctgagtttggagtggaataaggtggaagacaaatgtctctgttctttggccctttaagagttagctttttacctgcacaaatggactaaaaaatctggcacaaaacattgttatgtaatgtcttatgatgtgtgcctctccctcccccaaacctgtttacagtcaattataacctgacaaacgagacttttgtaacatattattgttacatctttctgaaaccttcaaaccgtaaggaagtgttaactggcaagcagttgtactttagactttgtgagaaattcataaaggtggctgagtggatttgcatgctttagaactgtgaatagagttctaactgaaaccagaattaatttggctcttgtagcttagtaatgagtcatagctacccacaataacctaataaaaactcaagttcatcccaa

SEQ ID NO: 25377 - DNA, 2794 bp, Homo sapiens
  source 1..2794: mol_type = unassigned DNA
aaagccgtttgggaacttgtggaggcggggtggtagagtgcagagacgagatcgcgaagctttgaaaagcgcgggcaacatccgggcacctgggccgtcgagctgaggcgcgccttccgagcctgctttttagggcggatggcagccatgctgaatatttgggaaagcagttcaagctctatcacgaattagtgacgagttctggctagacccatctaaaaaaggtcttgctctaagatgtgtgaattcttctcggtcagcatatggatgtgtcctgttctctcctgtgttttttcagcattatcaatggtcagctttagtgaaaatgagtgaaaatgaacttgacacaacactgcatttaaaatgcaaattgggaatgaagtcaattttgcccatctttagatgtctgaattcccttgaaagaaatatagagaagtgcagaatattcaccagatctgataaatgcaaagtagttattcaattcttctacagacatggtattaaaagaactcataatatatgttttcaagaaagtcagcctttgcaagttatttttgacaagaatgtttgtactaatacgctaatgattcaaccaagattgcttgctgatgccattgttctttttacatcaagtcaagaggaagttactcttgctgttactccactgaatttttgcctcaagagttctaatgaggaatcaatggatttgagcaatgctgtacacagtgagatgtttgttggctcagatgagtttgacttctttcaaattggaatggacactgagataacattttgtttcaaagaattgaagggaatactgacattttcagaagctacacatgctcctatatccatttattttgatttccctgggaaacctctggctttgagtattgatgatatgttagtggaagctaactttattttggccacattagctgatgaacaaagtagagcatcttcaccacagtcactgtgtctttcacagaaacgaaaaaggtcagatctgattgaaaaaaaggctggcaaaaatgtaactggccaggccctggaatgtatttcaaaaaaagcagcaccaagaaggctttatcctaaggagactctcacaaacatatctgcattggaaaactgtggcagccctgcaatgaaaagagtggatggagatgtcagtgaagtatcagaaagcagtgtcagcaacacagaggaagtgccagggtctctgtgtctcagaaagttttcttgcatgttctttggagcagtttcttctgaccagcaagaacacttcaaccaccctttcgacagtctggcaagagcaagtgacagtgaagaggacatgaataatggcagtttctctatattctaatgcttaatgatggctgagctgggccccagcccagtgactggctcatttgcccctcaagcacgagtttgcatgtttagtgtctaaaagaggttgtccaggacttccttttaatggaggatgggcttttaaaccacatcatcttgtacaacaaccatatctagaaatagctgtttgtcaagtgtatgtaacttgctttaaatccattatgctacttgtgaggcagaagagttttctgtgaaggaaaaaagcccattagagttcttcaattcaatgcacgttcaccctagagcttttaacatctttgctagttttataaaggtatttaaactttattcaacagccatttagagtgccatcaagatggcttgaaatggaattttgtgatttgtagtcaggtatcttttgtatttgattgcaaacatttggattttagttttctcatgtaataccatggccttttttgtgcattgttttttatattttaagactttaagtagaataaaccctggaaaaaagatcaagagtaaaaatatatagtcactttcacttggcttttttagacggagtctcactttgtcactcaggctcaagtgcagtggtgcaatctctgctcactgcaacatctgcctcccaggtccaagcgattctcctgcctcagcctcccgtgcagctgggattgcaggtgcgtgccaccatgcctggctaatttctggtattttgtagagacagggtttcgccatgttggccagggtggtcttgaactcctggcctcaagtgatctgcccacctcggcctcccaaagtgctgggattacagacttgagccactgcgcccaacctggagtgtttttacatattgtaaaattttatttcctaacctcaaattgttctgattttcagatgtgattttttattttgcagtgtgctgcaggaaagaatttaatggaagtgatgccaaatatttctgtattatctgacatagaacagtatcctccactgccaagacagcctgagtttggagtggaataaggtggaagacaaatgtctctgttctttggccctttaagagttagctttttacctgcacaaatggactaaaaaatctggcacaaaacattgttatgtaatgtcttatgatgtgtgcctctccctcccccaaacctgtttacagtcaattataacctgacaaacgagacttttgtaacatattattgttacatctttctgaaaccttcaaaccgtaaggaagtgttaactggcaagcagttgtactttagactttgtgagaaattcataaaggtggctgagtggatttgcatgctttagaactgtgaatagagttctaactgaaaccagaattaatttggctcttgtagcttagtaatgagtcatagctacccacaataacctaataaaaactcaagttcatccc

SEQ ID NO: 25378 - DNA, 2727 bp, Homo sapiens
  source 1..2727: mol_type = unassigned DNA
gggccgtcgagctgaggcgcgccttccgagcctgctttttagggcggatggcagccatgctgaagtgcgtgatgagcggcagtcagtatttgggaaagcagttcaagctctatcacgaattagtgacgagttctggctagacccatctaaaaaaggtcttgctctaagatgtgtgaattcttctcggtcagcatatggatgtgtcctgttctctcctgtgttttttcagcattatcaatggtcagctttagtgaaaatgagtgaaaatgaacttgacacaacactgcatttaaaatgcaaattgggaatgaagtcaattttgcccatctttagatgtctgaattcccttgaaagaaatatagagaagtgcagaatattcaccagatctgataaatgcaaagtagttattcaattcttctacagacatggtattaaaagaactcataatatatgttttcaagaaagtcagcctttgcaagttatttttgacaagaatgtttgtactaatacgctaatgattcaaccaagattgcttgctgatgccattgttctttttacatcaagtcaagaggaagttactcttgctgttactccactgaatttttgcctcaagagttctaatgaggaatcaatggatttgagcaatgctgtacacagtgagatgtttgttggctcagatgagtttgacttctttcaaattggaatggacactgagataacattttgtttcaaagaattgaagggaatactgacattttcagaagctacacatgctcctatatccatttattttgatttccctgggaaacctctggctttgagtattgatgatatgttagtggaagctaactttattttggccacattagctgatgaacaaagtagagcatcttcaccacagtcactgtgtctttcacagaaacgaaaaaggtcagatctgattgaaaaaaaggctggcaaaaatgtaactggccaggccctggaatgtatttcaaaaaaagcagcaccaagaaggctttatcctaaggagactctcacaaacatatctgcattggaaaactgtggcagccctgcaatgaaaagagtggatggagatgtcagtgaagtatcagaaagcagtgtcagcaacacagaggaagtgccagggtctctgtgtctcagaaagttttcttgcatgttctttggagcagtttcttctgaccagcaagaacacttcaaccaccctttcgacagtctggcaagagcaagtgacagtgaagaggacatgaataatggcagtttctctatattctaatgcttaatgatggctgagctgggccccagcccagtgactggctcatttgcccctcaagcacgagtttgcatgtttagtgtctaaaagaggttgtccaggacttccttttaatggaggatgggcttttaaaccacatcatcttgtacaacaaccatatctagaaatagctgtttgtcaagtgtatgtaacttgctttaaatccattatgctacttgtgaggcagaagagttttctgtgaaggaaaaaagcccattagagttcttcaattcaatgcacgttcaccctagagcttttaacatctttgctagttttataaaggtatttaaactttattcaacagccatttagagtgccatcaagatggcttgaaatggaattttgtgatttgtagtcaggtatcttttgtatttgattgcaaacatttggattttagttttctcatgtaataccatggccttttttgtgcattgttttttatattttaagactttaagtagaataaaccctggaaaaaagatcaagagtaaaaatatatagtcactttcacttggcttttttagacggagtctcactttgtcactcaggctcaagtgcagtggtgcaatctctgctcactgcaacatctgcctcccaggtccaagcgattctcctgcctcagcctcccgtgcagctgggattgcaggtgcgtgccaccatgcctggctaatttctggtattttgtagagacagggtttcgccatgttggccagggtggtcttgaactcctggcctcaagtgatctgcccacctcggcctcccaaagtgctgggattacagacttgagccactgcgcccaacctggagtgtttttacatattgtaaaattttatttcctaacctcaaattgttctgattttcagatgtgattttttattttgcagtgtgctgcaggaaagaatttaatggaagtgatgccaaatatttctgtattatctgacatagaacagtatcctccactgccaagacagcctgagtttggagtggaataaggtggaagacaaatgtctctgttctttggccctttaagagttagctttttacctgcacaaatggactaaaaaatctggcacaaaacattgttatgtaatgtcttatgatgtgtgcctctccctcccccaaacctgtttacagtcaattataacctgacaaacgagacttttgtaacatattattgttacatctttctgaaaccttcaaaccgtaaggaagtgttaactggcaagcagttgtactttagactttgtgagaaattcataaaggtggctgagtggatttgcatgctttagaactgtgaatagagttctaactgaaaccagaattaatttggctcttgtagcttagtaatgagtcatagctacccacaataacctaataaaaactcaagttcatcccaa

SEQ ID NO: 25379 - DNA, 2825 bp, Homo sapiens
  source 1..2825: mol_type = unassigned DNA
aggacgcagcaactcacagagcaaccaggacccagaaatcgcttaagagaccgcggcaaagtaacttaactgagttgccttcttccatattttcacgcccctttcatccagaacattttttttcttgaactgcttccatggaggactcaacctccccgaagcaagaaaaagaaaaccaagaagaactaggggaaacaaggcggccatgggaaggaaagacagcagcttctccccaatattctgagcctgagtcgtctgagcccttggaggcgaagcaggggccagaaactggacgccagtcccgaagcagccgtccttggagcccgcagtctagagccaagacgcctctgggtggccccgcgggaccagaaacatcatcacctgctcctgtctctccgcgggagccctcttcctctccttctcccctggctccggccagacaagacctcgcggcaccacctcagtcggacaggaccacgagtgtgattcctgaagctgggacaccttatcctgatcctttggaacaatcatctgataaaagagaatcaactcctcatcacacaagccagtcagaaggaaacacctttcaacagtctcagcaacccaaaccccacctgtgtggacgaagggacgtgagctataacaacgctaaacagaaagagctgagatttgacgtttttcaggaggaagactcaaacagtgactatgatttacagcagccggcgcctgggggctctgaagtggcccccagcatgcttgagatcaccattcagaatgctaaggcttacctgctgaagactagcagcaattcgggctttaatctatatgatcatctttctaatatgttgaccaagatattaaatgagcgtcctgaaaatgctgttgacatctttgaaaatattagccaagatgtgaagatggcacattttagtaaaaaatttgatgcactacaaaatgagaatgagttgcttccaacatatgaaatagcagaaaagcaaaaggctctttttctccagggacatttggaaggagttgaccaagaattggaagatgaaatagcagaaaacgctcttccaaatgtaatggagtcagctttttattttgaacaagctggagttggtttgggcacagatgagacataccgcatatttcttgccctcaagcagcttactgatacccacccaatccaaagatgccgcttctggggaaagatcttgggtctggaaatgaattatattgtagctgaagtggaatttcgtgagggggaagatgaagaggaagtggaagaggaagatgtagctgaagagagggacaatggagaaagtgaagctcatgaagatgaggaagatgaattaccaaagtccttttacaaggccccacaggctataccaaaagaagaaagtagaacaggtgccaacaaatatgtctattttgtttgcaatgaaccaggaagaccatgggtgaagttaccaccagttatacctgcacaaattgttattgcaagaaaaatcaagaaatttttcactgggcgattggatgctcccatcataagctacccacctttcccaggaaatgagagtaattatttacgagcacaaattgcccgaatttcagcaggaacccacgtcagtcctctaggattttatcagtttggtgaagaggaaggagaggaggaggaagaggcagaaggtgggcgaaatagctttgaggaaaaccctgattttgaaggcatccaagtgattgatctagtagaatccctatccaattgggttcatcatgtacagcatattctctctcagggtcgctgtaattggttcaactccatacaaaaaaatgaggaagaagaagaggaagaagatgaagaaaaagacgattctgactacatagaacaggaagtggggcttcctcttttgacaccaatctctgaagatttagagattcagaatatacccccctggacaacacggttatcctcaaatctcattccacaatatgctattgcagtccttcaatccaacctttggcctggagcatatgccttctccaatggcaaaaagtttgaaaatttctacataggctggggtcataagtatagtccagacaattatacacccccagttccaccaccagtttatcaagaataccccagtggaccagaaattacagaaatggatgatcctagtgtggaggaggagcaggctttcagggctgcacaagaagcagttctactcgcagctgagaatgaagaatctgaggaagatgaagatgaggaagatgattatgactaataaacataaaattagcctggttttatgtgacactgatacacacacaccccttatatgggactaattttacacttttctgtgttatgtgtgtatatacatacacatgtaagaaattattcaactgcaaaatctcaatcttgaaaatcaagcttgaaatttcataggtagaaatattagcatttttattgaaagatactcacaggattttccagaggctaaataacatgcaattgcataattgttctgagggttatggataatggaatatgtgtttgtacattcctgtttttaaaagggctcaggtttcacatggtccaggtgaggtaaaacaattaaaataaataaataaatggtctcaggtttaatttgtaatacgacaaacactggaagatataacccacaggaaattcttggaaacatcaatactttttaaagagtgtcaaggggtatgaagacaaaaaatattgatagtcactagagtaatgtattcttaacctttgtaagaactgatctcagcatgtattcttaaacctttgt

SEQ ID NO: 25380 - DNA, 1410 bp, Homo sapiens
  source 1..1410: mol_type = unassigned DNA
atggaggactcaacctccccgaagcaagaaaaagaaaaccaagaagaactaggggaaacaaggcggccatgggaaggaaagacagcagcttctccccaatattctgagcctgagtcgtctgagcccttggaggcgaagcaggggccagaaactggacgccagtcccgaagcagccgtccttggagcccgcagtctagagccaagacgcctctgggtggccccgcgggaccagaaacatcatcacctgctcctgtctctccgcgggagccctcttcctctccttctcccctggctccggccagacaagacctcgcggcaccacctcagtcggacaggaccacgagtgtgattcctgaagctgggacaccttatcctgatcctttggaacaatcatctgataaaagagaatcaactcctcatcacacaagccagtcagaaggaaacacctttcaacagtctcagcaacccaaaccccacctgtgtggacgaagggacgtgagctataacaacgctaaacagaaagagctgagatttgacgtttttcaggaggaagactcaaacagtgactatgatttacagcagccggcgcctgggggctctgaagtggcccccagcatgcttgagatcaccattcagaatgctaaggcttacctgctgaagactagcagcaattcgggctttaatctatatgatcatctttctaatatgttgaccaagatattaaatgagcgtcctgaaaatgctgttgacatctttgaaaatattagccaagatgtgaagatggcacattttagtaaaaaatttgatgcactacaaaatgagaatgagttgcttccaacatatgaaatagcagaaaagcaaaaggctctttttctccagggacatttggaaggagttgaccaagaattggaagatgaaataggtcgctgtaattggttcaactccatacaaaaaaatgaggaagaagaagaggaagaagatgaagaaaaagacgattctgactacatagaacaggaagtggggcttcctcttttgacaccaatctctgaagatttagagattcagaatatacccccctggacaacacggttatcctcaaatctcattccacaatatgctattgcagtccttcaatccaacctttggcctggagcatatgccttctccaatggcaaaaagtttgaaaatttctacataggctggggtcataagtatagtccagacaattatacacccccagttccaccaccagtttatcaagaataccccagtggaccagaaattacagaaatggatgatcctagtgtggaggaggagcaggctttcagggctgcacaagaagcagttctactcgcagctgagaatgaagaatctgaggaagatgaagatgaggaagatgattatgactaa

SEQ ID NO: 25381 - DNA, 2704 bp, Homo sapiens
  source 1..2704: mol_type = unassigned DNA
atggagataggacgcagcaactcacagagcaaccaggacccagaaatcgcttaagagaccgcggcaaagtaacttaactgagttgccttcttccatattttcacgcccctttcatccagaacattttttttcttgaactgcttccatggaggactcaacctccccgaagcaagaaaaagaaaaccaagaagaactaggggaaacaaggcggccatgggaaggaaagacagcagcttctccccaatattctgagcctgagtcgtctgagcccttggaggcgaagcaggggccagaaactggacgccagtcccgaagcagccgtccttggagcccgcagtctagagccaagacgcctctgggtggccccgcgggaccagaaacatcatcacctgctcctgtctctccgcgggagccctcttcctctccttctcccctggctccggccagacaagacctcgcggcaccacctcagtcggacaggaccacgagtgtgattcctgaagctgggacaccttatcctgatcctttggaacaatcatctgataaaagagaatcaactcctcatcacacaagccagtcagaaggaaacacctttcaacagtctcagcaacccaaaccccacctgtgtggacgaagggacgtgagctataacaacgctaaacagaaagagctgagatttgacgtttttcaggaggaagactcaaacagtgactatgatttacagcagccggcgcctgggggctctgaagtggcccccagcatgcttgagatcaccattcagaatgctaaggcttacctgctgaagactagcagcaattcgggctttaatctatatgatcatctttctaatatgttgaccaagatattaaatgagcgtcctgaaaatgctgttgacatctttgaaaatattagccaagatgtgaagatggcacattttagtaaaaaatttgatgcactacaaaatgagaatgagttgcttccaacatatgaaatagcagaaaagcaaaaggctctttttctccagggacatttggaaggagttgaccaagaattggaagatgaaatagcagaaaacgctcttccaaatgtaatggagtcagctttttattttgaacaagctggagttggtttgggcacagatgagacataccgcatatttcttgccctcaagcagcttactgatacccacccaatccaaagatgccgcttctggggaaagatcttgggtctggaaatgaattatattgtagctgaagtggaatttcgtgagggggaagatgaagaggaagtggaagaggaagatgtagctgaagagagggacaatggagaaagtgaagctcatgaagatgaggaagatgaattaccaaagtccttttacaaggccccacaggctataccaaaagaagaaagtagaacaggtgccaacaaatatgtctattttgtttgcaatgaaccaggaagaccatgggtgaagttaccaccagttatacctgcacaaattgttattgcaagaaaaatcaagaaatttttcactgggcgattggatgctcccatcataagctacccacctttcccaggaaatgagagtaattatttacgagcacaaattgcccgaatttcagcaggaacccacgtcagtcctctaggattttatcagtttggtgaagaggaaggagaggaggaggaagaggcagaaggtgggcgaaatagctttgaggaaaaccctgattttgaaggcatccaagtgattgatctagtagaatccctatccaattgggttcatcatgtacagcatattctctctcagagattcagaatatacccccctggacaacacggttatcctcaaatctcattccacaatatgctattgcagtccttcaatccaacctttggcctggagcatatgccttctccaatggcaaaaagtttgaaaatttctacataggctggggtcataagtatagtccagacaattatacacccccagttccaccaccagtttatcaagaataccccagtggaccagaaattacagaaatggatgatcctagtgtggaggaggagcaggctttcagggctgcacaagaagcagttctactcgcagctgagaatgaagaatctgaggaagatgaagatgaggaagatgattatgactaataaacataaaattagcctggttttatgtgacactgatacacacacaccccttatatgggactaattttacacttttctgtgttatgtgtgtatatacatacacatgtaagaaattattcaactgcaaaatctcaatcttgaaaatcaagcttgaaatttcataggtagaaatattagcatttttattgaaagatactcacaggattttccagaggctaaataacatgcaattgcataattgttctgagggttatggataatggaatatgtgtttgtacattcctgtttttaaaagggctcaggtttcacatggtccaggtgaggtaaaacaattaaaataaataaataaatggtctcaggtttaatttgtaatacgacaaacactggaagatataacccacaggaaattcttggaaacatcaatactttttaaagagtgtcaaggggtatgaagacaaaaaatattgatagtcactagagtaatgtattcttaacctttgtaagaactgatctcagcatgtattcttaaacctttgtaattacc

SEQ ID NO: 25382 - DNA, 2489 bp, Homo sapiens
  source 1..2489: mol_type = unassigned DNA
cagaaatcgcttaagagaccgcggcaaagtaacttaactgagttgccttcttccatattttcacgcccctttcatccagaacattttttttcttgaactgcttccatggaggactcaacctccccgaagcaagaaaaagaaaaccaagaagaactaggggaaacaaggcggccatgggaaggaaagacagcagcttctccccaatattctgagcctgagtcgtctgagcccttggaggcgaagcaggggccagaaactggacgccagtcccgaagcagccgtccttggagcccgcagtctagagccaagacgcctctgggtggccccgcgggaccagaaacatcatcacctgctcctgtctctccgcgggagccctcttcctctccttctcccctggctccggccagacaagacctcgcggcaccacacaagccagtcagaaggaaacacctttcaacagtctcagcaacccaaaccccacctgtgtggacgaagggacgtgagctataacaacgctaaacagaaagagctgagatttgacgtttttcaggaggaagactcaaacagtgactatgatttacagcagccggcgcctgggggctctgaagtggcccccagcatgcttgagatcaccattcagaatgctaaggcttacctgctgaagactagcagcaattcgggctttaatctatatgatcatctttctaatatgttgaccaagatattaaatgagcgtcctgaaaatgctgttgacatctttgaaaatattagccaagatgtgaagatggcacattttagtaaaaaatttgatgcactacaaaatgagaatgagttgcttccaacatatgaaatagcagaaaagcaaaaggctctttttctccagggacatttggaaggagttgaccaagaattggaagatgaaatagcagaaaacgctcttccaaatgtaatggagtcagctttttattttgaacaagctggagttggtttgggcacagatgagacataccgcatatttcttgccctcaagcagcttactgatacccacccaatccaaagatgccgcttctggggaaagatcttgggtctggaaatgaattatattgtagctgaagtggaatttcgtgagggggaagatgaagaggaagtggaagaggaagatgtagctgaagagagggacaatggagaaagtgaagctcatgaagatgaggaagatgaattaccaaagtccttttacaaggccccacaggctataccaaaagaagaaagtagaacaggtgccaacaaatatgtctattttgtttgcaatgaaccaggaagaccatgggtgaagttaccaccagttatacctgcacaaattgttattgcaagaaaaatcaagaaatttttcactgggcgattggatgctcccatcataagctacccacctttcccaggaaatgagagtaattatttacgagcacaaattgcccgaatttcagcaggaacccacgtcagtcctctaggattttatcagtttggtgaagaggaaggagaggaggaggaagaggcagaaggtgggcgaaatagctttgaggaaaaccctgattttgaaggcatccaagtgattgatctagtagaatccctatccaattgggttcatcatgtacagcatattctctctcagggtcgctgtaattggttcaactccatacaaaaaaatgaggaagaagaagaggaagaagatgaagaaaaagacgattctgactacatagaacaggaagtggggcttcctcttttgacaccaatctctgaagatttagagattcagaatatacccccctggacaacacggttatcctcaaatctcattccacaatatgctattgcagtccttcaatccaacctttggcctggagcatatgccttctccaatggcaaaaagtttgaaaatttctacataggctggggtcataagtatagtccagacaattatacacccccagttccaccaccagtttatcaagaataccccagtggaccagaaattacagaaatggatgatcctagtgtggaggaggagcaggctttcagggctgcacaagaagcagttctactcgcagctgagaatgaagaatctgaggaagatgaagatgaggaagatgattatgactaataaacataaaattagcctggttttatgtgacactgatacacacacaccccttatatgggactaattttacacttttctgtgttatgtgtgtatatacatacacatgtaagaaattattcaactgcaaaatctcaatcttgaaaatcaagcttgaaatttcataggtagaaatattagcatttttattgaaagatactcacaggattttccagaggctaaataacatgcaattgcataattgttctgagggttatggataatggaatatgtgtttgtacattcctgtttttaaaagggctcaggtttcacatggtccaggtgaggtaaaacaatt

SEQ ID NO: 25383 - DNA, 669 bp, Homo sapiens
  source 1..669: mol_type = unassigned DNA
ctcctagcaactcgacgggcgttgagcggagccgctgacctgatggacgccgacagcctcctgctgtctctggagctggcgtccggcagtgggcagggcctcagcccggaccgtcgggcctcgctgctcacgtctcttatgctggttaagcgcgactaccgctatgatcgggttctcttctggggccgcatccttggcctcgtcgccgattactacatcgcgcagggcctgagtgaggaccagctcgcaccgcgcaagacgctctatagcctgaactgcacagagtggagcctcttgccccctgccacagaggagatggtggcgcagtcgtctgtggtgaagggccgcttcatgggggacccatcatacgaatatgaacacactgagctgcagaaggtgaatgaaggtgaaaaagtctttgaagaagaaatagtggtccagatcaaggaagagacccgcttggtgtctgtcattgaccagattgacaaggctgtggccatcatcccccgaggcgccctcttcaagaccccttttggacccacccatgtcaatcggacctttgaagggtactataactggtataagacccctgcccctcacccaacctgtgatgggaatcaaggggtaagggcccgtgggcgcagccctagcctaggaaggttcctgtaa

SEQ ID NO: 25384 - DNA, 2534 bp, Homo sapiens
  source 1..2534: mol_type = unassigned DNA
ggaggcggcttctcctagcaactcgacgggcgttgagcggagccgctgacctgatggacgccgacagcctcctgctgtctctggagctggcgtccggcagtgggcagggcctcagcccggaccgtcgggcctcgctgctcacgtctcttatgctggttaagcgcgactaccgctatgatcgggttctcttctggggccgcatccttggcctcgtcgccgattactacatcgcgcagggcctgagtgaggaccagctcgcaccgcgcaagacgctctatagcctgaactgcacagagtggagcctcttgccccctgccacagaggagatggtggcgcagtcgtctgtggtgaagggccgcttcatgggggacccatcatacgaatatgaacacactgagctgcagaaggtgaatgaaggtgaaaaagtctttgaagaagaaatagtggtccagatcaaggaagagacccgcttggtgtctgtcattgaccagattgacaaggctgtggccatcatcccccgaggcgccctcttcaagaccccttttggacccacccatgtcaatcggacctttgaaggactgtccttgtctgaggccaagaagctcagctcctacttccatttcagggagcctgttgagctaaagaataagaccttgcttgagaaggctgacctggacccctccctggatttcatggactccttggagcatgacattcccaaagggtcctggagcatccagatggagaggggcaatgccctggtggtgctgcgcagcctgctctggccgggcctcaccttctaccatgctccccgcaccaagaactatggctacgtctacgtgggcactggcgagaagaacatggacttgcccttcatgctatagaatgggagccagcctggatgtttttaaacagagtctaaacatgattttcttaagcttcagtgaacttggcctgcctgttctgtcctatcttcttaactccacctccgtctggttccagattctgaaaggcccactgagccagggagctcatttctaaaccaagtggcagaggggttggaatgtgctaatgaaagagattctagacaacgatgggtggaaatggctgtgggagaaggtgacaaccagggcccctttgaggaacgcagtttcttggattcacacgagagcggcaagtgtgtcaggcagcccaccttggctccctgcagctctcccacagtaaggagctcacagctgtcatgaagaggatgggacctgtttggcccatgaattcaattgactcattggccccatcacaagagatcagtgactcaatgctcagcacccagctggcaatgtgcccaggaccccctgcacttcccaagcagtgagcgcacacccaatgggtaagcccatgaacccagtttatgacactgcgttgggcaaaactcctgtccccagcactgagcatggcctaagccccatagcagctggcaagggacccaactgccctgcctgcctctagctcccagcattgctactgtgcaggccaagggtactgaagttagtcccactgtcccctgtccatgcatgttggagggaccaggccatcgtggtggggtgggacaggagtatagttgtggccaagggcttgtgagtgggcctcctactccccagcacaggtgcaggaggaactctggaagcactgctctctgtcagtgatacagcttccaaggtgttcttgagtagcagacattgtccctcagaaggggtgaccccacgggcatgcgcaccctgttccagcgggggccttttttgtagatgggcttgacggagccaggagcccagcgcgtcaggtacctgtggagggagaacaaagaggtgcctgtgagggctgggggcccaagctggacgtgggagagtggagcactacctcctcaggccaggccacggttgggcaagcaaatcctttcaccagtttccctttcctgaagtgcagggattttcctgggagtaactgctgagcgtcctgtaaacagatgggctgggctcttgctgccgcaagcctgtgtggccaggttcaggcagcccagggccacaagctcccttgatctttgtaaatgtcaatgttggtgtgtgtttgctgaggaaaaggtggcgaagaggctgcctgaagagcagatcattcctctctggcctcagccatggggcgagaagagctgatgtaaggctctggaggaacccattgctcttccccatttggctcactcagctaccccaaccttcagggaactccccagggtactataactggtataagacccctgcccctcacccaacctgtgatgggaatcaaggggtaagggcccgtgggcgcagccctagcctaggaaggttcctgtaaataggaggggggtggggaaagatggctgccgcccatggacctttggcctcctttggggatggccagggccctgatagttcccagaaaagtggctcatgccggctaggattgggttttactctgtccagaataaaacttggatcctgtcc

SEQ ID NO: 25385 - DNA, 2586 bp, Homo sapiens
  source 1..2586: mol_type = unassigned DNA
ggaggcggcttctcctagcaactcgacgggcgttgagcggagccgctgacctgatggacgccgacagcctcctgctgtctctggagctggcgtccggcagtgggcagggcctcagcccggaccgtcgggcctcgctgctcacgtctcttatgctggttaagcgcgactaccgctatgatcgggttctcttctggggccgcatccttggcctcgtcgccgattactacatcgcgcagggcctgagtgaggaccagctcgcaccgcgcaagacgctctatagcctgaactgcacagagtggagcctcttgccccctgccacagaggagatggtggcgcagtcgtctgtggtgaagggccgcttcatgggggacccatcatacgaatatgaacacactgagctgcagaaggtgaatgaaggtgaaaaagtctttgaagaagaaatagtgattgacaaggctgtggccatcatcccccgaggcgccctcttcaagaccccttttggacccacccatgtcaatcggacctttgaaggactgtccttgtctgaggccaagaagctcagctcctacttccatttcagggagcctgttgagctaaagaataagaccttgcttgagaaggctgacctggacccctccctggatttcatggactccttggagcatgacattcccaaagggtctgaggcagttgttcagggtgacttcacgtggcttctgagcaggtgtggttttggttggccctgttcctgggactcctgctctgtgtccatgagggtcctggagcatccagatggagaggggcaatgccctggtggtgctgcgcagcctgctctggccgggcctcaccttctaccatgctccccgcaccaagaactatggctacgtctacgtgggcactggcgagaagaacatggacttgcccttcatgctatagaatgggagccagcctggatgtttttaaacagagtctaaacatgattttcttaagcttcagtgaacttggcctgcctgttctgtcctatcttcttaactccacctccgtctggttccagattctgaaaggcccactgagccagggagctcatttctaaaccaagtggcagaggggttggaatgtgctaatgaaagagattctagacaacgatgggtggaaatggctgtgggagaaggtgacaaccagggcccctttgaggaacgcagtttcttggattcacacgagagcggcaagtgtgtcaggcagcccaccttggctccctgcagctctcccacagtaaggagctcacagctgtcatgaagaggatgggacctgtttggcccatgaattcaattgactcattggccccatcacaagagatcagtgactcaatgctcagcacccagctggcaatgtgcccaggaccccctgcacttcccaagcagtgagcgcacacccaatgggtaagcccatgaacccagtttatgacactgcgttgggcaaaactcctgtccccagcactgagcatggcctaagccccatagcagctggcaagggacccaactgccctgcctgcctctagctcccagcattgctactgtgcaggccaagggtactgaagttagtcccactgtcccctgtccatgcatgttggagggaccaggccatcgtggtggggtgggacaggagtatagttgtggccaagggcttgtgagtgggcctcctactccccagcacaggtgcaggaggaactctggaagcactgctctctgtcagtgatacagcttccaaggtgttcttgagtagcagacattgtccctcagaaggggtgaccccacgggcatgcgcaccctgttccagcgggggccttttttgtagatgggcttgacggagccaggagcccagcgcgtcaggtacctgtggagggagaacaaagaggtgcctgtgagggctgggggcccaagctggacgtgggagagtggagcactacctcctcaggccaggccacggttgggcaagcaaatcctttcaccagtttccctttcctgaagtgcagggattttcctgggagtaactgctgagcgtcctgtaaacagatgggctgggctcttgctgccgcaagcctgtgtggccaggttcaggcagcccagggccacaagctcccttgatctttgtaaatgtcaatgttggtgtgtgtttgctgaggaaaaggtggcgaagaggctgcctgaagagcagatcattcctctctggcctcagccatggggcgagaagagctgatgtaaggctctggaggaacccattgctcttccccatttggctcactcagctaccccaaccttcagggaactccccagggtactataactggtataagacccctgcccctcacccaacctgtgatgggaatcaaggggtaagggcccgtgggcgcagccctagcctaggaaggttcctgtaaataggaggggggtggggaaagatggctgccgcccatggacctttggcctcctttggggatggccagggccctgatagttcccagaaaagtggctcatgccggctaggattgggttttactctgtccagaataaaacttggatcctgtcc

SEQ ID NO: 25386 - DNA, 550 bp, Homo sapiens
  source 1..550: mol_type = unassigned DNA
cctgaactgcacagagtggagcctcttgccccctgccacagaggagatggtggcgcagtcgtctgtggtgaagggccgcttcatgggggacccatcatacgaatatgaacacactgagctgcagaaggtgaatgaaggtgaaaaagtctttgaagaagaaatagtggtccagatcaaggaagagacccgcttggtgtctgtcattgaccagattgacaaggctgtggccatcatcccccgaggcgccctcttcaagaccccttttggacccacccatgtcaatcggacctttgaagggtactataactggtataagacccctgcccctcacccaacctgtgatgggaatcaaggggtaagggcccgtgggcgcagccctagcctaggaaggttcctgtaaataggaggggggtggggaaagatggctgccgcccatggacctttggcctcctttggggatggccagggccctgatagttcccagaaaagtggctcatgccggctaggattgggttttactctgtccagaataaaacttggatcctgtcca

SEQ ID NO: 25387 - DNA, 3519 bp, Homo sapiens
  source 1..3519: mol_type = unassigned DNA
aactcagctgagtgttagtcaaagaaggtgtgtcctgctccccaatgacaggttgctcagagactgctgatttccatccctatataaagagagtccctggcatacagagactgctctgctccaggcatctgccacaatgtgggtgcttacacctgctgcttttgctgggaagctcttgagtgtgttcaggcaacctctgagctctctgtggaggagcctggtcccgctgttctgctggctgagggcaaccttctggctgctagctaccaagaggagaaagcagcagctggtcctgagagggccagatgagaccaaagaggaggaagaggaccctcctctgcccaccaccccaaccagcgtcaactatcacttcactcgccagtgcaactacaaatgcggcttctgtttccacacagccaaaacatcctttgtgctgccccttgaggaagcaaagagaggattgcttttgcttaaggaagctggtatggagaagatcaacttttcaggtggagagccatttcttcaagaccggggagaatacctgggcaagttggtgaggttctgcaaagtagagttgcggctgcccagcgtgagcatcgtgagcaatggaagcctgatccgggagaggtggttccagaattatggtgagtatttggacattctcgctatctcctgtgacagctttgacgaggaagtcaatgtccttattggccgtggccaaggaaagaagaaccatgtggaaaaccttcaaaagctgaggaggtggtgtagggattatagagtcgctttcaagataaattctgtcattaatcgtttcaacgtggaagaggacatgacggaacagatcaaagcactaaaccctgtccgctggaaagtgttccagtgcctcttaattgagggtgagaattgtggagaagatgctctaagagaagcagaaagatttgttattggtgatgaagaatttgaaagattcttggagcgccacaaagaagtgtcctgcttggtgcctgaatctaaccagaagatgaaagactcctaccttattctggatgaatatatgcgctttctgaactgtagaaagggacggaaggacccttccaagtccatcctggatgttggtgtagaagaagctataaaattcagtggatttgatgaaaagatgtttctgaagcgaggaggaaaatacatatggagtaaggctgatctgaagctggattggtagagcggaaagtggaacgagacttcaacacaccagtgggaaaactcctagagtaactgccattgtctgcaatactatcccgttggtatttcccagtggctgaaaacctgattttctgctgcacgtggcatctgattacctgtggtcactgaacacacgaataacttggatagcaaatcctgagacaatggaaaaccattaactttacttcattggcttataaccttgttgttattgaaacagcacttctgtttttgagtttgttttagctaaaaagaaggaatacacacaggaataatgaccccaaaaatgcttagataaggcccctatacacaggacctgacatttagctcaatgatgcgtttgtaagaaataagctctagtgatatctgtgggggcaaaatttaatttggatttgattttttaaaacaatgtttactgcgatttctatatttccattttgaaactatttcttgttccaggtttgttcatttgacagagtcagtattttttgccaaatatccagataaccagttttcacatctgagacattacaaagtatctgcctcaattatttctgctggttataatgcttttttttttttgcctttatgccattgcagtcttgtactttttactgtgatgtacagaaatagtcaacagatgtttccaagaacatatgatatgataatcctaccaattttcaagaagtctctagaaagagataacacatggaaagacggtgtggtgcagcccagcccacggtggctgttccatgaatgctggctacctatgtgtgtggtacctgttgtgtccctttctcttcaaagatcctgagcaaaacaaagatacgctttccatttgatgatggagttgacatggaggcagtgcttgcattgctttgttcgcctatcatctggccacatgaggctgtcaagcaaaagaataggagtgtagttgagtagctggttggccctacatctctgagaagtgacggcacactgggttggcataagatatcctaaaatcacgctggaaccttgggcaaggaagaatgtgagcaagagtagagagagtgcctggatttcatgtcagtgaagccaagtcaccatatcatatttttgaatgaactctgagtcagttgaaatagggtaccatctaggtcagtttaagaagagtcagctcagagaaagcaagcataagggaaaatgtcacgtaaactagatcagggaacaaaatcctctccttgtggaaatatcccatgcagtttgttgatacaacttagtatcttattgcctaaaaaaaaatttcttatcattgtttcaaaaaagcaaaatcatggaaaatttttgttgtccaggcaaataaaaggtcattttaatttagctgcaatttcagtgttcctcactaggtggcatttaaatgtcgcctgatgtcattaagcaccatccaaaaagtctgcttcataatctattttcaagacttggtgattctgaaagttttggtttttgtgactttgtttctcaggaaaaaaaatattcctacttaaattttaagtctataattcaatttaaatatgtgtgtgtctcatccaggataggataggttgtcttctattttccattttacctatttactttttttgtaagaaaagagaaaaatgaattctaaagatgttccccatgggttttgattgtgtctaagctatgatgaccttcatataatcagcataaacataaaacaaattttttacttaacatgagtgcactttactaatcctcatggcacagtggctcacgcctgtaatcccagcacttgggaggacaatgtgggtggatcacgaggtcaggagttcgagaacagcctggccaacatggtgaaaccccgtctccactaaaaatacaaaaattagccaggcatggtggcgtacacttgtaattccagctactcaagaggctgaggcaggaggattgcttgaaccctgaaggcagaggttacagagccaagatagcgccactgcactccagcctggatgacagagcaagactccgtctcaaaaaaaaaaaaaaaaaaaagcaagagagttcaactaagaaaggtcacatatgtgaaagcccaaggacactgtttgatatacagcaggtattcaatcagtgttatttgaaaccaaatctgaatttgaagtttgaatcttctgagttggaatgaatttttttctagctgagggaaactgtatttttctttccccaaagaggaatgtaatgtaaagtgaaataaaactataagctatgttaaataca

SEQ ID NO: 25388 - DNA, 1355 bp, Homo sapiens
  source 1..1355: mol_type = unassigned DNA
gtccttgtcttcctgtctttcctagagtaccttctcaactagtaacttcagcaacatctctagcttctttccctccttgtttaactttttaacaaaagcatagcatacatgcaccagattacacatattctggatgtgcaccctgatgaatttcacaaagcaatcacagccaggtaaatagcctgcagattcagagagaaagcatcaccagcgccagaagtgcatgctgcactccagccactaccctggtatggagaagatcaacttttcaggtggagagccatttcttcaagaccggggagaatacctgggcaagttggtgaggttctgcaaagtagagttgcggctgcccagcgtgagcatcgtgagcaatggaagcctgatccgggagaggtggttccagaattatggtgagtatttggacattctcgctatctcctgtgacagctttgacgaggaagtcaatgtccttattggccgtggccaaggaaagaagaaccatgtggaaaaccttcaaaagctgaggaggtggtgtagggattatagagtcgctttcaagataaattctgtcattaatcgtttcaacgtggaagaggacatgacggaacagatcaaagcactaaaccctgtccgctggaaagtgttccagtgcctcttaattgagggtgagaattgtggagaagatgctctaagagaagcagaaagatttgttattggtgatgaagaatttgaaagattcttggagcgccacaaagaagtgtcctgcttggtgcctgaatctaaccagaagatgaaagactcctaccttattctggatgaatatatgcgctttctgaactgtagaaagggacggaaggacccttccaagtccatcctggatgttggtgtagaagaagctataaaattcagtggatttgatgaaaagatgtttctgaagcgaggaggaaaatacatatggagtaaggctgatctgaagctggattggtagagcggaaagtggaacgagacttcaacacaccagtgggaaaactcctagagtaactgccattgtctgcaatactatcccgttggtatttcccagtggctgaaaacctgattttctgctgcacgtggcatctgattacctgtggtcactgaacacacgaataacttggatagcaaatcctgagacaatggaaaaccattaactttacttcattggcttataaccttgttgttattgaaacagcacttctgtttttgagtttgttttagctaaaaagaaggaatacacacaggaataatgaccccaaaaatgcttagataaggcccctatacacaggacctgacatttagctcaatgatgcgtttgtaag

SEQ ID NO: 25389 - DNA, 6336 bp, Homo sapiens
  source 1..6336: mol_type = unassigned DNA
cgccgctcaggccctggagcggacggttcctactgcggctgggcaccggctccgctcccgcgtctgcccgcgctccagctgcgcctggcccggccccggcccggctcggcgtggccccggcctccaagcgaaggcgccgctgccgctgggccgctcccagggccatgaggaagcggcggcagccactgcggcccgcgtcaaggacttctccagacaggttatgttacctgcagaggctgccctgaagctccctgtggcctggagactatgtacaagaggaatggtctgatggctagcgtgttggtcacctctgccactccacagggcagcagcagctcggactctctggagggccagagctgcgactatgccagcaagagctatgatgccgttgtcttcgatgtcttgaaagtgaccccagaggagtttgctagccagattacattaatggatatacctgtgtttaaagctatccagccggaggaactagccagctgtggatggagtaagaaggagaaacacagtcttgcccctaacgttgtggcctttacccggaggtttaaccaggtcagtttttgggttgtacgagaaattctaacagcacagactttaaaaataagggcagaaatcctcagccattttgtgaaaatagccaagaaacttctagaactcaacaaccttcattctctcatgtctgtggtatcagcattacaaagtgctcccatcttcaggctgacaaaaacctgggctcttttaaatcgaaaagacaagactacctttgagaaattggactacctgatgtcgaaagaagataattacaagcggacacgggaatatatccgaagcctgaagatggttccaagtattccctatctaggaatctatcttctggatttaatctacattgattctgcatatcctgcctcaggcagtatcatggaaaatgaacaaagatccaatcagatgaacaatattcttcgaataattgctgatttacaagtttcctgcagctatgatcacctcaccaccctgccccatgtgcagaagtacctgaagtccgtacgctacattgaagagctccagaagtttgtggaagacgacaactacaaactgtcgctcagaatcgaaccaggaagcagctctccaagactagtctcttccaaggaagatcttgcaggtccctctgctggctccggttctgcgaggttcagccggaggcccacctgtcctgacacatctgttgctggcagcctccccacacctccagtccccagacacaggaagagccacagcctaggcaacaatatgatgtgtcagttgagtgtagttgagagtaaaagtgcgacattcccatcggagaaagcaaggcacctactggacgacagtgtcctagagtcccgcagcccccgaaggggcctggctctgacctcctcctctgctgtcaccaatggactctccctaggcagtagtgagagctcagagtttagtgaagagatgtcttcagggctggaaagccccaccggcccgtgcatctgttctctggggaactccgcagctgtgcccaccatggaggggcctctgagaagaaaaaccctgctcaaggaagggcggaagcctgcgctgtcctcgtggaccaggtactgggtcatactctcaggatccaccctcctgtactacggagccaagtccttgcggggcacagacagaaaacactataaatccacacctggcaaaaaggtttccatcgtgggctggatggtgcagctgcccgatgaccccgagcacccagatatcttccagctgaacaaccctgacaaaggcaatgtttacaagtttcagactggttcccgatttcatgcaatactgtggcacaagcatttggatgatgcatgtaaaagcaacaggcctcaggtacctgcaaaccttatgtcatttgagtaagtctctgcaggacgtggcatgacttcagaggcttctgggaacccaggctgggcctggtggtgaagagcagtcctgggcacaggctgtgagccagggtgctgggaaactcacagctggactcaggggacacggcctgtggcctcaccatcccagagggcttcaccagtgtgggatccacctgtcagtccccagcgactctcatgacactcattctgcagcaccgcctcttggggcagtggtcagaccccacacgccctctctgggcccaccacctgcatctgcgactagagagcacccggcccacgttgggttctcagtgctttctactgcacagagtggacagcgctaactaacctgtgagaggggcccgagagaaggaacagctgtggaacaggctttttacaccccaagtgcatggggttgctcgcccacagggctgcctcagattttgtacaaccccgaagcgtcctctgcgtgtgcgtgctgtacgtgtgtgtgtgtgtgtgagcgagtgtgaactcttcaagaaacatgcattttggcacaagactcgtgacatcacacacttcattcgctttgaggccctgctttaaccttaagttatagccctgtccaccgaggaaggtcagggtgagagcctagattcctcctgtgtcaagggtccctcgcattcttttactgtaaacaaacaatgccttaaattgtgtcttgttttctgttcctatgggtgctattcatctggaaggcctgcttccaggcctctttgctgtcagcccttctgagacaggacctggcttcaggactgtggactgggctgctggcctgcttgcttcctcccttccccattcctagcagggcctgaggccctcctcttctcgcccttcccaccatgccagaatgggaagttgtgacgttgcagctccaaccgacgtgctcatagtgatcagctgtgcaggagccatgaggcaccaacctctccccgcagggcaaagcctgtgcccccatcatctcactcctttgcctgcactgccagggtggggcccaccaagattcctgatcatgacgggaagctgagtgaccctgaggccttaagcttccccagtcttggccccaaatgcagtcaccagcaagttttccattttccaagtccaagggcacaattgttgatgaccgtgtgacaatagagcgaagccccggggagtgaacggtccaacctctgcattcagttaggagctcttcacatgaatcacatccttatctgtcaccttgtgtcacattttaaagtgacttttattttgcacaaataatttttattcagaataataaatcactctttatcatagtatcttctcttccctcttcccctttagtttggatagcctaactctgagaagttaacccttaaacagttttctggaagagactgaatttctgggtccttgcagctgtgatggtttcagagctcagactgatcaggcatcaagctaccctcaagagtttctgggctggatgtttcagaacaacatctacaccagtaaagtgtaataggtcagtttcaaaacgaccaaaagacccaccactgtattttgaccaaataatgacaacttctttagaaatttgaatggcttggtgaggaaagtagttgtcaccagggcctcattttgtagttgagccttacaatgcttagtagttcatcttctttttgagcaaagactagaatactttcctcctaagagaaactcccaggtgataaaagttgatgccatcaaaccttgacaccgggtgctctgcacacccacgcggatgttgcacctcattctcccgatgactattcaaatcagcatctagaggctgaatgacaatgccaaacactccacctctgatcagaaccatgcagtgttaacactttaacctacattgaatctgattctacctgttaacttttaaaaagtcgtaagtttggatgaaagtgcaagatgtggaacatcaactacctattttccttgggtttttccactctgcaaactgtcctggtttttcacaccaatgaagtattatagatgccaatccaaaacctcagaatttcaggcaccacaaaaacaggtaattttctatcccttataagtttgtcttttctttcagaaacatctcttagcctaatttgaaatagcacaatcacaattcaaaatgtttagtcttctcactaattgagtctgcttccacgtcctctcccaggaacattcttagctcggactcttgaagaatctctttagattttgttggcaaaagccttatagaagcagtaagaggcttgaccacgccggaagagtcctggagctaaagctggaagacactcagctctctaagcaggggctcggccaaacatgggagttaagtgctgcttgtcttcccagtgttggtttgaaccctgtgagcctgagacagagagggccaggcaccaaccacaaggcgggaaagtccatgggtagaccctccccctggagggaagcatttctagtttttgctccttgactgtccagagtgtacaaatgttcataacgccattgaagggattatttcttgcatgcatatgctgaatttttttaagcaaatggatcatggcaccccaaaatgaaagttatagaaagctgtctacaactgtggagttggtagctggtaacattgttgtctcaagaacaactcacctctctccctaggactaatttttgtctctctcagttgaacatgttttgtcattcaagatcagtcaggtgcattctggcaactgacatacttgatggaggattgattcggtagagagcagtagaaatcttgttctaactgtgcctggtgagagactttggccccctccctccctataaggctgtggaacctgaggaagtagatacttgaagagattctgtttaggaagaaactcactctcttttgccagttgaatttatagagcattttttttcttaccaagatggccagtatcattttacccccacctcccaagccccaagaggtgtaccttttcagatgccattttacaggcggaaatgctccatgaaacaggaagccacttgcaagcaacatctgctctgttcctcaggtggggcccagagcccttccccgagactgctgatgtctgtaaccactggggagcactgccaaaaatacagctttctggtttgtgagcccataaatgacttaaatcagctttacatcatttttacatatcaagtggtttcatgttaaaaaacaaactcctagtcctttagaaataacagattctctgcacaaaaccacccattcattcatttattcattcacagcactagcaagtgctgcctatgctgagaacaagtcagatctgatccctgccctcatggacctgaccactcaacaaacagtccccaccacacctatctccttaggcaagactttgcctctctcctagtcctgagtataaatcctgtgcatagattcctctagaaaggcatcaaaaggctcaacagactgaatggcctcttggtctgcgaaaattcagttgcaatgaggatgaagtcactatcctagaggctgcttggcccagaagagccaggcacagagctgcagttgggcacgccaaggattccaaaggtggaatgagagagtagggtcaaactgtcacagtatctgctccataggtttctgtttttaatttcaatgttaaatacaactacaatatgagcgagaactgcattttcttgggtgttgagaacttgtaccatggacttcagaccgccttgcagccgtatgctgcacaagcgtgtacaccccctgggcagcctcaaaaccccgcttacagcagcaacacaggagatcatctgtccattttagaaccattaatctctttatccattgctgaacgactgtgactattcagtaacgaagtaatagtaattaattagtatggtataatctttaataaatttcgtgccaaaatgcatggttttccacttagcattcaaaatgttgcatagagagtagttttcaatttcttatgtactcttcgaagtaagttgaaaatcagtttctacattttaattcgtttcctgttaaatctgttgcactctcctgggctgtctttttctccagcagacccctgcatgcagttgtgtaaggactttctctaattcttgtgaatcgtctcacccgcagtaaccactgaacgtcaatcagccctccatggggttctttcgatttttggtgaagtattttgttacctcagtcttgtatcaagttgctgtatttttcagcttgttacattgataataattatttcactaattaaatactttaatgtacaaacatctttgtttactttgaaattaaatgtgttttccaatg

SEQ ID NO: 25390 - DNA, 770 bp, Homo sapiens
  source 1..770: mol_type = unassigned DNA
gctcccgcgtctgcccgcgctccagctgcgcctggcccggccccggcccggctcggcgtggccccggcctccaagcgaaggcgccgctgccgctgggccgctcccagggccatgaggaagcggcggcagccactgcggcccgcgtcaaggtgaccggccgggactgcggcggcggggagagcggcggacttctccagacaggttatgttacctgcagaggctgccctgaagctccctgtggcctggagactatgtacaagaggaatggtctgatggctagcgtgttggtcacctctgccactccacagggcagcagcagctcggactctctggagggccagagctgcgactatgccagcaagagctatgatgccgttgtcttcgatgtcttgaaagtgaccccagaggagtttgctagccagattacattaatggatatacctgtgtttaaagctatccagccggaggaactagccagctgtggatggagtaagaaggagaaacacagtcttgcccctaacgttgtggcctttacccggaggtttaaccagaaacttctagaactcaacaaccttcattctctcatgtctgtggtatcagcattacaaagtgctcccatcttcaggctgacaaaaacctgggctcttttaaatcgaaaagacaagactacctttgagaaattggactacctgatgtcgaaagaagataattacaagcggacacgggaatatatccgaagcctgaagatggttccaagtattccctatcta

SEQ ID NO: 25391 - DNA, 2466 bp, Homo sapiens
  source 1..2466: mol_type = unassigned DNA
gacttctccagacaggttatgttacctgcagaggctgccctgaagctccctgtggcctggagactatgtacaagaggaatggtctgatggctagcgtgttggtcacctctgccactccacagggcagcagcagctcggactctctggagggccagagctgcgactatgccagcaagagctatgatgccgttgtcttcgatgtcttgaaagtgaccccagaggagtttgctagccagattacattaatggatatacctgtgtttaaagctatccagccggaggaactagccagctgtggatggagtaagaaggagaaacacagtcttgcccctaacgttgtggcctttacccggaggtttaaccaggtcagtttttgggttgtacgagaaattctaacagcacagactttaaaaataagggcagaaatcctcagccattttgtgaaaatagccaagaaacttctagaactcaacaaccttcattctctcatgtctgtggtatcagcattacaaagtgctcccatcttcaggctgacaaaaacctgggctcttttaaatcgaaaagacaagactacctttgagaaattggactacctgatgtcgaaagaagataattacaagcggacacgggaatatatccgaagcctgaagatggttccaagtattccctatctaggaatctatcttctggatttaatctacattgattctgcatatcctgcctcaggcagtatcatggaaaatgaacaaagatccaatcagatgaacaatattcttcgaataattgctgatttacaagtttcctgcagctatgatcacctcaccaccctgccccatgtgcagaagtacctgaagtccgtacgctacattgaagagctccagaagtttgtggaagacgacaactacaaactgtcgctcagaatcgaaccaggaagcagctctccaagactagtctcttccaaggaagatcttgcaggtccctctgctggctccggttctgcgaggttcagccggaggcccacctgtcctgacacatctgttgctggcagcctccccacacctccagtccccagacacaggaagagccacagcctaggcaacaacaggggacgtctctatgccaccctggggcccaactggcgggttccagttaggaattctcccagaacccggagctgtgtctacagccccaccggcccgtgcatctgttctctggggaactccgcagctgtgcccaccatggaggggcctctgagaagaaaaaccctgctcaaggaagggcggaagcctgcgctgtcctcgtggaccaggtactgggtcatactctcaggatccaccctcctgtactacggagccaagtccttgcggggcacagacagaaaacacgtttccatcgtgggctggatggtgcagctgcccgatgaccccgagcacccagatatcttccagctgaacaaccctgacaaaggcaatgtttacaagtttcagactggttcccgatttcatgcaatactgtggcacaagcatttggatgatgcatgtaaaagcaacaggcctcaggaagccggagcagctccaggtccaacaggaactgacagccacgaggtggaccacctggagggcggtgcggggaaggaggcagggccctgtgcctgaagcctgggcaccatggtggccccagtcaggagcaacagtggtagccctgagtaaaacccattgtccctctttggaggagcggccagaggatgacagcagccccagcaggcagcagtgcctgggcaggctgatccagcagagcactaatgggtcagtttcatgtattggcagatgtggtgtagcatggcaaggctacaagttttaaggatttttgtctgattttcagacctggaggaggggatttttcttcctactttcccccttttttatttctaatttactttcaaccaaatattcccactatgtgctatatgtaataataaaaagttgacaacaactgaaatattcaacagcagaggatgatttaagtgaatcacagtacatccgtgtgatggaatgccaggagggtgtaagaaagagtgtgacagaaatgcatctattcacaaggaaacatcgcagtgactagagtgattttctgttctgtggaactgcatgtcctaaacttgtttttattaacactgaatacacttaaaccttatctataacatatgtataggtataaacaacagcaataaaacaccttattgccaccatgagcctaacagcagagccaccagggccttggaatgctgtccctcaccatggcctcttcctaattcggtttctctccctcccacctgtgccccagcaccactctcctgatttgtttgctgattattcctttagaattgcaggtcacgtacttgattccttcatgtgttgtctggggtgcatttttaaactttcttataaatagaaccataaagatgca

SEQ ID NO: 25392 - DNA, 1667 bp, Homo sapiens
  source 1..1667: mol_type = unassigned DNA
gctgcgcctggcccggccccggcccggctcggcgtggccccggcctccaagcgaaggcgccgctgccgctgggccgctcccagggccatgaggaagcggcggcagccactgcggcccgcgtcaaggtgaccggccgggactgcggcggcggggagagcggcggacttctccagacaggttatgttacctgcagaggctgccctgaagctccctgtggcctggagactatgtacaagaggaatggtctgatggctagcgtgttggtcacctctgccactccacagggcagcagcagctcggactctctggagggccagagctgcgactatgccagcaagagctatgatgccgttgtcttcgatgtcttgaaagtgaccccagaggagtttgctagccagattacattaatggatatacctgtgtttaaagctatccagccggaggaactagccagctgtggatggagtaagaaggagaaacacagtcttgcccctaacgttgtggcctttacccggaggtttaaccaggtcagtttttgggttgtacgagaaattctaacagcacagactttaaaaataagggcagaaatcctcagccattttgtgaaaatagccaagaaacttctagaactcaacaaccttcattctctcatgtctgtggtatcagcattacaaagtgctcccatcttcaggctgacaaaaacctgggctcttttaaatcgaaaagacaagactacctttgagaaattggactacctgatgtcgaaagaagataattacaagcggacacgggaatatatccgaagcctgaagatggttccaagtattccctatctaggaatctatcttctggatttaatctacattgattctgcatatcctgcctcaggcagtatcatggaaaatgaacaaagatccaatcagatgaacaatattcttcgaataattgctgatttacaagtttcctgcagctatgatcacctcaccaccctgccccatgtgcagaagtacctgaagtccgtacgctacattgaagagctccagaagtttgtggaagacgacaactacaaactgtcgctcagaatcgaaccaggaagcagctctccaagactagtctcttccaaggaagatcttgcagccatgtgagaccagaaaccagcaagccagccaacctccagcatcagagccctggcaggggacagaatggaccccagatggttcacatgaagagactttaatgaacagaaccaataaagcatggcgaggcacccatgggccggcccagggtcctggggagggtggagccctaggctaaagggcatggggaagaagtgttaccaatcccagggatggctgagttctggaggatgattggctgtgcagggtctgtgggcagggagggggaagcaggagcgagcagagaaaaatccctggcctccctttcctccagccctcagtctgccaccagagcctttcattggccaaatccaatagaaagctgggggcaaggggtccaggagatgcatctcaggggtcagcctcccccgaacagaagtggcaagtgggcagggcaaaaaatgcagctgaattgtgtgaacagactactcagcatactgccaagcctcagtgtctctatctgtaaagtgggcataaaatcttcctccttca

SEQ ID NO: 25393 - DNA, 1524 bp, Homo sapiens
  source 1..1524: mol_type = unassigned DNA
gagcggacggttcctactgcggctgggcaccggctccgctcccgcgtctgcccgcgctccagctgcgcctggcccggccccggcccggctcggcgtggccccggcctccaagcgaaggcgccgctgccgctgggccgctcccagggccatgaggaagcggcggcagccactgcggcccgcgtcaaggtgaccggccgggactgcggcggacttctccagacaggttatgttacctgcagaggctgccctgaagctccctgtggcctggagactatgtacaagaggaatggtctgatggctagcgtgttggtcacctctgccactccacagggcagcagcagctcggactctctggagggccagagctgcgactatgccagcaagagctatgatgccgttgtcttcgatgtcttgaaagtgaccccagaggagtttgctagccagattacattaatggatatacctgtgtttaaagctatccagccggaggaactagccagctgtggatggagtaagaaggagaaacacagtcttgcccctaacgttgtggcctttacccggaggtttaaccaggtcagtttttgggttgtacgagaaattctaacagcacagactttaaaaataagggcagaaatcctcagccattttgtgaaaatagccaagaaacttctagaactcaacaaccttcattctctcatgtctgtggtatcagcattacaaagtgctcccatcttcaggctgacaaaaacctgggctcttttaaatcgaaaagacaagactacctttgagaaattggactacctgatgtcgaaagaagataattacaagcggacacgggaatatatccgaagcctgaagatggttccaagtattccctatctaggtaggagtttgaattggcttatttttttttaagaaacctactcggtgccaaataagatgtttttacagtttctacctgaaaaatttccaggaagcgacatggcccgtagataaagaggcaattggttggctctttgggttggaacaggctgttggtacttcccaaggttggaaacctggattagggtgatatacaagtgatgttctgctttttatataaaagacctgtgggccccagggttccccaggctgcagcccagatgggtcacaatgagagtgataagactcgtactggttcatccacatcctcctgaactggggcatgtcaggcacaaaccctctgttctggttctctgggcattattagtatatttcatatttgtacaaataaaattatagtaatgtttatttttctggttagaaaataatgcatgttaattgtaaggaattagagaaaaaagttaatatcttttgttatctcacctaaagatatttgcttcatatcttattgatttgggcatatctaaaatatgtatgcttactctatcctaaaaatgttatttttatcttaaaaattttatctacttttcgatgctatgactcattcccatcagatggatttgtcaaactcgaatctgctct

SEQ ID NO: 25394 - DNA, 819 bp, Homo sapiens
  source 1..819: mol_type = unassigned DNA
ctgcggctgggcaccggctccgctcccgcgtctgcccgcgctccagctgcgcctggcccggccccggcccggctcggcgtggccccggcctccaagcgaaggcgccgctgccgctgggccgctcccagggccatgaggaagcggcggcagccactgcggcccgcgtcaaggtgaccggccgggactgcggcggcggggagagcggcggacttctccagacaggttatgttacctgcagaggctgccctgaagctccctgtggcctggagactatgtacaagaggaatggtctgatggctagcgtgttggtcacctctgccactccacagggcagcagcagctcggactctctggagggccagagctgcgactatgccagcaagagctatgatgccgttgtcttcgatgtcttgaaagtgaccccagaggagtttgctagccagattacattaatggatatacctgtgtttaaagctatccagccggagaaaggctggcctgccagaatggaagactccctgcagaagtccacagtttcctccaggccacatgacacgttgcagttcaggaaaacactgcctgtgggtccaggaacctgaccctctggccttttgtctggatgccgtttgcctgctctgaagaagcgggcgttccagaaagccgaggtcaatgttggacgtcggacaaaccctgtgtgtctttgctgctccttggaatcagtgtttggccctcggagagggaagaatgtggccagcaggcagtcatttgtaaagtggagattggtttccctgacatcattaaaacccctctctcaggtca

SEQ ID NO: 25395 - DNA, 1672 bp, Homo sapiens
  source 1..1672: mol_type = unassigned DNA
cctggagcggacggttcctactgcggctgggcaccggctccgctcccgcgtctgcccgcgctccagctgcgcctggcccggccccggcccggctcggcgtggccccggcctccaagcgaaggcgccgctgccgctgggccgctcccagggccatgaggaagcggcggcagccactgcggcccgcgtcaaggtgaccggccgggactgcggcggcggggagagcggcggacttctccagacaggttatgttacctgcagaggctgccctgaagctccctgtggcctggagactatgtacaagaggaatggtctgatggctagcgtgttggtcacctctgccactccacagggcagcagcagctcggactctctggagggccagagctgcgactatgccagcaagagctatgatgccgttgtcttcgatgtcttgaaagtgaccccagaggagtttgctagccagattacattaatggatatacctgtgtttaaagctatccagccggaggaactagccagctgtggatggagtaagaaggagaaacacagtcttgcccctaacgttgtggcctttacccggaggtttaaccaggtcagtttttgggttgtacgagaaattctaacagcacagactttaaaaataagggcagaaatcctcagccattttgtgaaaatagccaagaaacttctagaactcaacaaccttcattctctcatgtctgtggtatcagcattacaaagtgctcccatcttcaggctgacaaaaacctgggctcttttaaatcgaaaagacaagactacctttgagaaattggactacctgatgtcgaaagaagataattacaagcggacacgggaatatatccgaagcctgaagatggttccaagtattccctatctaggaatctatcttctggatttaatctacattgattctgcatatcctgcctcaggcagtatcatggaaaatgaacaaagatccaatcagatgaacaatattcttcgaataattgctgatttacaagtttcctgcagctatgatcacctcaccaccctgccccatgtgcagaagtacctgaagtccgtacgctacattgaagagctccagaagtttgtggaagacgacaactacaaactgtcgctcagaatcgaaccaggaagcagctctccaagactagtctcttccaaggaagatcttgcagtctcccatctcagcagcctgtcacatcaaggtcaagcagaagaggcaagactcaaacccacctctggccaacaccctgcctggatgtggcccagctcctcacgagtaccagcggctcccccagcatctgctgctccgcgctccccgtggcctaggaatctaagaaatgatcaaggtcaaccaggtgcagtggctctcacctgtaatcccagcactttgggaagccgaagcaggaggatcacttgagcccaggagttcaagaccagcctgggcaacatggcaaaaccccatctctacaaaagtatataaatgatctgggcatggtggtgcgtgcctacagccccagctcctcagggcttaggcgagatcgcttgatcccaggagggggaggctacagtgagccgtgatcgcgccaccgcgctccagcttgggtgacagagcaagaccttgtctcaggaaaaaaaaaaaaaa

SEQ ID NO: 25396 - DNA, 2362 bp, Homo sapiens
  source 1..2362: mol_type = unassigned DNA
cgccgctcaggccctggagcggacggttcctactgcggctgggcaccggctccgctcccgcgtctgcccgcgctccagctgcgcctggcccggccccggcccggctcggcgtggccccggcctccaagcgaaggcgccgctgccgctgggccgctcccagggccatgaggaagcggcggcagccactgcggcccgcgtcaaggtgaccggccgggactgcggcggcggggagagcggcggacttctccagacaggttatgttacctgcagaggctgccctgaagctccctgtggcctggagactatgtacaagaggaatggtctgatggctagcgtgttggtcacctctgccactccacagggcagcagcagctcggactctctggagggccagagctgcgactatgccagcaagagctatgatgccgttgtcttcgatgtcttgaaagtgaccccagaggagtttgctagccagattacattaatggatatacctgtgtttaaagctatccagccggaggaactagccagctgtggatggagtaagaaggagaaacacagtcttgcccctaacgttgtggcctttacccggaggtttaaccaggtcagtttttgggttgtacgagaaattctaacagcacagactttaaaaataagggcagaaatcctcagccattttgtgaaaatagccaagaaacttctagaactcaacaaccttcattctctcatgtctgtggtatcagcattacaaagtgctcccatcttcaggctgacaaaaacctgggctcttttaaatcgaaaagacaagactacctttgagaaattggactacctgatgtcgaaagaagataattacaagcggacacgggaatatatccgaagcctgaagatggttccaagtattccctatctaggaatctatcttctggatttaatctacattgattctgcatatcctgcctcaggcagtatcatggaaaatgaacaaagatccaatcagatgaacaatattcttcgaataattgctgatttacaagtttcctgcagctatgatcacctcaccaccctgccccatgtgcagaagtacctgaagtccgtacgctacattgaagagctccagaagtttgtggaagacgacaactacaaactgtcgctcagaatcgaaccaggaagcagctctccaagactagtctcttccaaggaagatcttgcaggtccctctgctggctccggttctgcgaggttcagccggaggcccacctgtcctgacacatctgttgctggcagcctccccacacctccagtccccagacacaggaagagccacagcctaggcaacaacaggggacgtctctatgccaccctggggcccaactggcgggttccagttaggaattctcccagaacccggagctgtgtctacagccccaccggcccgtgcatctgttctctggggaactccgcagctgtgcccaccatggaggggcctctgagaagaaaaaccctgctcaaggaagggcggaagcctgcgctgtcctcgtggaccaggtactgggtcatactctcaggatccaccctcctgtactacggagccaagtccttgcggggcacagacagaaaacactataaatccacacctggcaaaaaggtttccatcgtgggctggatggtgcagctgcccgatgaccccgagcacccagatatcttccagctgaacaaccctgacaaaggcaatgtttacaagtttcagactggttcccgatttcatgcaatactgtggcacaagcatttggatgatgcatgtaaaagcaacaggcctcaggaagccggagcagctccaggtccaacaggaactgacagccacgaggtggaccacctggagggcggtgcggggaaggaggcagggccctgtgcctgaagcctgggcaccatggtggccccagtcaggagcaacagtggtagccctgagtaaaacccattgtccctctttggaggagcggccagaggatgacagcagccccagcaggcagcagtgcctgggcaggctgatccagcagagcactaatgggtcagtttcatgtattggcagatgtggtgtagcatggcaaggctacaagttttaaggatttttgtctgattttcagacctggaggaggggatttttcttcctactttcccccttttttatttctaatttactttcaaccaaatattcccactatgtgctatatgtaataataaaaagttgacaacaactgaaatattcaacagcagaggatgatttaagtgaatcacagtacatccgtgtgatggaatgccaggagggtgtaagaaagagtgtgacagaaatgcatctattcac

SEQ ID NO: 25397 - DNA, 4858 bp, Homo sapiens
  source 1..4858: mol_type = unassigned DNA
ggaattctcccagaacccggagctgtgtctacagccccaccggcccgtgcatctgttctctggggaactccgcagctgtgcccaccatggaggggcctctgagaagaaaaaccctgctcaaggaagggcggaagcctgcgctgtcctcgtggaccaggtactgggtcatactctcaggatccaccctcctgtactacggagccaagtccttgcggggcacagacagaaaacactataaatccacacctggcaaaaaggtttccatcgtgggctggatggtgcagctgcccgatgaccccgagcacccagatatcttccagctgaacaaccctgacaaaggcaatgtttacaagtttcagactggttcccgatttcatgcaatactgtggcacaagcatttggatgatgcatgtaaaagcaacaggcctcaggtacctgcaaaccttatgtcatttgagtaagtctctgcaggacgtggcatgacttcagaggcttctgggaacccaggctgggcctggtggtgaagagcagtcctgggcacaggctgtgagccagggtgctgggaaactcacagctggactcaggggacacggcctgtggcctcaccatcccagagggcttcaccagtgtgggatccacctgtcagtccccagcgactctcatgacactcattctgcagcaccgcctcttggggcagtggtcagaccccacacgccctctctgggcccaccacctgcatctgcgactagagagcacccggcccacgttgggttctcagtgctttctactgcacagagtggacagcgctaactaacctgtgagaggggcccgagagaaggaacagctgtggaacaggctttttacaccccaagtgcatggggttgctcgcccacagggctgcctcagattttgtacaaccccgaagcgtcctctgcgtgtgcgtgctgtacgtgtgtgtgtgtgtgtgagcgagtgtgaactcttcaagaaacatgcattttggcacaagactcgtgacatcacacacttcattcgctttgaggccctgctttaaccttaagttatagccctgtccaccgaggaaggtcagggtgagagcctagattcctcctgtgtcaagggtccctcgcattcttttactgtaaacaaacaatgccttaaattgtgtcttgttttctgttcctatgggtgctattcatctggaaggcctgcttccaggcctctttgctgtcagcccttctgagacaggacctggcttcaggactgtggactgggctgctggcctgcttgcttcctcccttccccattcctagcagggcctgaggccctcctcttctcgcccttcccaccatgccagaatgggaagttgtgacgttgcagctccaaccgacgtgctcatagtgatcagctgtgcaggagccatgaggcaccaacctctccccgcagggcaaagcctgtgcccccatcatctcactcctttgcctgcactgccagggtggggcccaccaagattcctgatcatgacgggaagctgagtgaccctgaggccttaagcttccccagtcttggccccaaatgcagtcaccagcaagttttccattttccaagtccaagggcacaattgttgatgaccgtgtgacaatagagcgaagccccggggagtgaacggtccaacctctgcattcagttaggagctcttcacatgaatcacatccttatctgtcaccttgtgtcacattttaaagtgacttttattttgcacaaataatttttattcagaataataaatcactctttatcatagtatcttctcttccctcttcccctttagtttggatagcctaactctgagaagttaacccttaaacagttttctggaagagactgaatttctgggtccttgcagctgtgatggtttcagagctcagactgatcaggcatcaagctaccctcaagagtttctgggctggatgtttcagaacaacatctacaccagtaaagtgtaataggtcagtttcaaaacgaccaaaagacccaccactgtattttgaccaaataatgacaacttctttagaaatttgaatggcttggtgaggaaagtagttgtcaccagggcctcattttgtagttgagccttacaatgcttagtagttcatcttctttttgagcaaagactagaatactttcctcctaagagaaactcccaggtgataaaagttgatgccatcaaaccttgacaccgggtgctctgcacacccacgcggatgttgcacctcattctcccgatgactattcaaatcagcatctagaggctgaatgacaatgccaaacactccacctctgatcagaaccatgcagtgttaacactttaacctacattgaatctgattctacctgttaacttttaaaaagtcgtaagtttggatgaaagtgcaagatgtggaacatcaactacctattttccttgggtttttccactctgcaaactgtcctggtttttcacaccaatgaagtattatagatgccaatccaaaacctcagaatttcaggcaccacaaaaacaggtaattttctatcccttataagtttgtcttttctttcagaaacatctcttagcctaatttgaaatagcacaatcacaattcaaaatgtttagtcttctcactaattgagtctgcttccacgtcctctcccaggaacattcttagctcggactcttgaagaatctctttagattttgttggcaaaagccttatagaagcagtaagaggcttgaccacgccggaagagtcctggagctaaagctggaagacactcagctctctaagcaggggctcggccaaacatgggagttaagtgctgcttgtcttcccagtgttggtttgaaccctgtgagcctgagacagagagggccaggcaccaaccacaaggcgggaaagtccatgggtagaccctccccctggagggaagcatttctagtttttgctccttgactgtccagagtgtacaaatgttcataacgccattgaagggattatttcttgcatgcatatgctgaatttttttaagcaaatggatcatggcaccccaaaatgaaagttatagaaagctgtctacaactgtggagttggtagctggtaacattgttgtctcaagaacaactcacctctctccctaggactaatttttgtctctctcagttgaacatgttttgtcattcaagatcagtcaggtgcattctggcaactgacatacttgatggaggattgattcggtagagagcagtagaaatcttgttctaactgtgcctggtgagagactttggccccctccctccctataaggctgtggaacctgaggaagtagatacttgaagagattctgtttaggaagaaactcactctcttttgccagttgaatttatagagcattttttttcttaccaagatggccagtatcattttacccccacctcccaagccccaagaggtgtaccttttcagatgccattttacaggcggaaatgctccatgaaacaggaagccacttgcaagcaacatctgctctgttcctcaggtggggcccagagcccttccccgagactgctgatgtctgtaaccactggggagcactgccaaaaatacagctttctggtttgtgagcccataaatgacttaaatcagctttacatcatttttacatatcaagtggtttcatgttaaaaaacaaactcctagtcctttagaaataacagattctctgcacaaaaccacccattcattcatttattcattcacagcactagcaagtgctgcctatgctgagaacaagtcagatctgatccctgccctcatggacctgaccactcaacaaacagtccccaccacacctatctccttaggcaagactttgcctctctcctagtcctgagtataaatcctgtgcatagattcctctagaaaggcatcaaaaggctcaacagactgaatggcctcttggtctgcgaaaattcagttgcaatgaggatgaagtcactatcctagaggctgcttggcccagaagagccaggcacagagctgcagttgggcacgccaaggattccaaaggtggaatgagagagtagggtcaaactgtcacagtatctgctccataggtttctgtttttaatttcaatgttaaatacaactacaatatgagcgagaactgcattttcttgggtgttgagaacttgtaccatggacttcagaccgccttgcagccgtatgctgcacaagcgtgtacaccccctgggcagcctcaaaaccccgcttacagcagcaacacaggagatcatctgtccattttagaaccattaatctctttatccattgctgaacgactgtgactattcagtaacgaagtaatagtaattaattagtatggtataatctttaataaatttcgtgccaaaatgcatggttttccacttagcattcaaaatgttgcatagagagtagttttcaatttcttatgtactcttcgaagtaagttgaaaatcagtttctacattttaattcgtttcctgttaaatctgttgcactctcctgggctgtctttttctccagcagacccctgcatgcagttgtgtaaggactttctctaattcttgtgaatcgtctcacccgcagtaaccactgaacgtcaatcagccctccatggggttctttcgatttttggtgaagtattttgttacctcagtcttgtatcaagttgctgtatttttcagcttgttacattgataataattatttcactaattaaatactttaatgtacaaacatctttgtttactttgaaattaaatgtgttttccaatgaa

SEQ ID NO: 25398 - DNA, 8004 bp, Homo sapiens
  source 1..8004: mol_type = unassigned DNA
agggagagagttgtgctcctgccgccgagagctccaccttcgtggctctgggtccggggccccggcctgtggcggcgagcggcggccgctggagacgagcggcggcggcaggcggccagcccgggtctgcctcgctccgtgcagggccgggagagggatccgccatattggagctggggccgaaggtgccttggagccgcggcgcgaggcgggtggaggtggcggccctggcctggatcgggaaggagtcggctctgccctggcccgcaaggctggggagctaatgagcctctctggctagtctcctccccgtccactccctccactttctgccgccgggacccggctgggagccggctgtggcagtggcagtggcagtggcagcgacaggatgttctccaagaagccgcacggggacgtgaagaagtccacccagaaggtgctagacaccaagaaggacgcactgactcgcctcaagcacctgcgcatcgtcatcgagaatgcagaatctattgatcttaaacagtttttcgaccaacatttttcacatatatactatgtgttctttgaaaattttgtgactattgaagctagtcttaaacagaaaggtcacaagtctcaaagagaggaattggatgctatactttttatttttgagaaaattttacaacttcttccagaaagaattcatcagcgatggcagtttcatagtattggattgattttaaagaagctacttcacacaggaaactccttaaagattaggcgggaaggtgttcgtcttttcttactatggttgcaagctcttcagaataactgtagcaaagaacagctctggatgttttcatgcttaatccctggattttcagcaccacagtctgaacatggacctcgaactttagataatctcattaatcctccactcaaccttcaagaaactcaagtcactatagaagaaatcactcctcttgtccccccacaatcaggagataaagggcaagaagatctcacaagctattttcttgaagcacttctaaaatacatagtcattcaggtaaaaagtttagaatggaagaacaaagaaaaccaagaaaggggattttcatttttgttttcacattttaagaaatattacttgccttatatttttccaaacatctgtaaggaaaacagtttatatcatcctatacttgacatcccgcagatgagaccaaagccacattatgtcgtgataaagaaagatgctgaaaccaatgaagcaatctattgtacaaaggagcctttcattaaggctcgtgttattgtcattcgttggctggtttctttctggctggagccaaaaccacatacaggacctcatattcctgggatggaaggtgaagtcttgccaaagaatattcagagagcagctgctagtttagtatccagagaagaaagcaaaaatgataatgctgataaaacagacagaactacagaacccgaacagtctcattccaatacaagcactctcacggagcgagaacctagctcatctagtctctgtagtattgatgaagaacatctcacagacattgaaatagttcgcagagttttttcttctaaaaggagtaatgtaaactttgtgacagagatatttcgtcaggcatttttattaccaatttgtgaagcagcagctatgagaaaagtggtaaaagtatatcaagaatggatccaacaagaggaaaaacctttgttcatgcaagagcctgaagaaattgtgatcacttcttcagacctcccttgcattgaaaatgtcacagaccatgatatttcaatggaagaaggagaaaaaagagaagaggaaaatgggaccaatactgctgatcatgttcgaaattccagttgggcaaaaaacggctcctaccaaggtgctcttcataacgcctctgaagaagccacagaacaaaacatacgagctggtacccaggcagttttgcaggtgtttattataaactcatcaaatatatttcttcttgaacctgcaaatgaaataaaaaatcttctggatgaacacacagatatgtgtaaacgcattcttaacatttatcggtacatggttgtacaagtatcaatggacaaaaagacttgggaacagatgctgcttgtgttgctcagagtcacggaatctgtactgaagatgccatcacaagcttttctacagttccaagggaaaaaaaatatgaccttggcaggtcgacttgcaggaccacttttccagacccttatagttgcctggatcaaagcaaacctaaatgtgtacatctcccgagaactttgggatgacttactgtcagtattgtcatcgctgacctattgggaagagttggccactgagtggtcactgactatggagacattaactaaagttttagctaggaatttatatagtttggatctcagtgatttaccattggataagctgagtgaacagaaacaaaaaaagcacaaagggaaaggagttggacatgaatttcagaaagtttcagttgacaagtcattttctagaggatggagtcgtgatcagcctggccaagccccaatgagacagaggagtgcaacaaccactggttctccaggaaccgaaaaggcgaggagtatagtacggcaaaaaactgtcgccatgagaagccgatccattggtgaatgtgctctgccatcggcctatatacgcagtgctaaaagtgctcctgttctgatccatacttccaaacccttcttgcctgatattgttctcactcccctttctgatgagctttcagatattgatgatgctcaaatacttccccgctcaactagagtcagacatttttcacaaagtgaagaaactggaaatgaagtttttggtgctttgaatgaggagcagccattgcctcgaagtagcagcacttctgacatcttggaaccattcactgttgaacgagccaaagtcaataaagaggacatgagccaaaaactgcctcctcttaatagtgatattggcggcagcagtgctaatgttcctgatctgatggatgagtttatagcagaacgacttcgaagtggtaatgcctcgactatgacaagaagaggaagtagtccaggcagcctggaaattcccaaagacctccctgatattctaaacaagcagaaccagatgcgccctattgatgacccaggtgtgccctcagaatggacttctcctgccagtgcagggagcagtgatcttatcagctcagatagtcattcggattctttcagcgctttccaatatgatggccgaaaatttgacaattttggctttggaaccgacactggggttacgtcctctgctgatgtggattcaggttctggccatcatcagagtgctgaagagcaggaagtggctagtctaactactcttcatatagattctgaaacaagcagtcttaatcagcaagctttctctgctgaagttgcaactattactggttcagaaagtgcttccccagtccactcacctctgggctccaggtcacagactccttccccttctacattgaatatagatcacatggaacagaaggatctgcagctcgacgagaagctccaccactctgttcttcagacaccagatgatctagaaattagtgaatttccatcagaatgttgtagtgtgatggcaggaggtactctgactggatggcatgctgatgttgctactgtaatgtggcgaagaatgctaggcattttgggagatgtaaattcaatcatggatcctgaaatacatgctcaagtttttgattacctctgtgaactttggcagaatctagctaagattagagataaccttggcatttcaactgataacctgacctccccttctccaccagttttaattcctccactgagaattcttacaccttggctttttaaggcaaccatgttgactgataaatataaacaaggtaaattacatgcatataaacttatttgtaatacaatgaaaagaagacaagatgtttctccaaatagagattttctaacacatttctacaatataatgcattgtggattacttcatattgaccaggatattgtcaatacaatcatcaaacactgctcacctcaatttttttcacttggtttgcctggtgccacaatgcttattatggattttattgtagcagctggtagagtggcttcttcagcttttctcaatgcaccaagagtagaagcacaagttcttctgggatctttggtttgctttcccaacttatattgtgaactgccttctcttcatcccaacattcctgatgttgctgtgtctcagtttacagatgttaaggaacttataatcaaaactgtattaagctcggcaagagatgagccctctggtcctgcacgatgtgtagcactttgtagtttaggtatttggatttgtgaagaactagtccatgagtctcatcatcctcaaattaaggaagctctgaatgtgatttgtgtttccttaaagtttactaataaaacagtagcccacgtagcttgtaacatgcttcacatgctggttcattatgtacctagacttcagatttaccagcctgattctcccttgaaaattattcaaatcctaatagctaccatcacccatcttttaccaagtacagaggcttcatcttatgaaatggacaagaggttggtagtatctttacttctctgccttctggactggatcatggccttacctctaaagacactgctccaaccatttcatgctacgggagcagaaagcgataaaacagaaaaatctgttctcaattgcatttataaggttttacatgggtgtgtttatggagctcagtgttttagcaatccaaggtattttcccatgagcctctctgatttggcatctgtagattatgatccttttatgcatttggaaagtctgaaagagcctgagcctctgcactctcctgactcagaacgatcttctaaactccagccagtaacagaagtgaaaactcaaatgcagcatggattaatctctatagcagcccgcactgttattacacatctggtaaatcacctgggccattatccaatgagcggtggtcctgctatgctaacaagtcaggtgtgtgaaaatcacgacaatcattacagtgaaagtactgaactttctcctgaactctttgagagtccaaatatccagttctttgtgttaaataatacaaccttagtgtcctgtatccagatcagatcagaagagaatatgcctggaggaggtttatctgctggccttgcatcagccaattcaaatgtcagaatcatagtacgtgatctctctggaaaatattcatgggattctgctatactgtatggcccacctcctgtaagtggcttgtcagaacctacatctttcatgctttcattgtctcaccaagagaagccagaagagcctccgacatctaatgaatgcttagaagatataaccgtaaaagatggactttctctccagtttaaaagatttagagaaactgtaccaacttgggatacaataagagatgaagaagatgttcttgatgagctcttgcagtatttgggtgttactagtcctgaatgcttacagagaactggaatctcacttaatattcctgctccacaacctgtgtgcatttctgaaaaacaagaaaatgatgttattaatgctatccttaagcaacatacagaagaaaaagaatttgttgagaagcactttaatgacttaaacatgaaagctgtggaacaagatgaaccaatacctcaaaaacctcagtcagcattttattattgcagattgcttcttagtatattgggaatgaattcctgggacaaacggaggagctttcatctcctgaagaaaaatgaaaagctacttagagaacttaggaacttggattcaaggcagtgccgagagacacacaagattgcagtattttatgttgctgaaggacaagaagacaaacactccattctcaccaatacaggaggaagtcaagcatatgaagattttgtagctggtcttggttgggaggtaaatcttacaaaccattgtggttttatgggaggactacaaaaaaacaaaagcactggattgaccactccatattttgctacctctacagtagaggtaatatttcacgtgtcaacaagaatgccttctgattctgatgattctttgaccaaaaaattgagacatttgggaaatgatgaagtgcacattgtttggtcagagcatactagagactacaggagaggaattattcccacagaatttggtgatgtccttattgtaatatatccaatgaaaaatcacatgttcagtattcagataatgaaaaaaccagaggttcccttctttggtcccctttttgatggtgctattgtgaatggaaaggttctacccattatggttagagcaacagctataaatgcaagccgtgctctgaaatctctgattccattgtatcaaaacttctatgaggagagagcacgatacctgcaaacaattgtccagcaccacttagaaccaacaacatttgaagattttgcagcacaggttttttctccagctccctaccaccatttaccatctgatgccgatcattaaatatcagttctgtttatctgaaggctcctacccagagattctacccagtgaaactcccacagcaacgcaggtagatggggctgacctggcctctccaatgtctcctcgaactagcaaaagccgcatgtccatgaagctgcgtcgttcctctggctcagccaataaatcctaaggagacaagcagcccagcagtgatcagcagtagccaccttagcacgaacatagggttaaccctttcaggccttcatgtctgccataacatgcatgtttcttcctgtacatttatttgagaaaacactggatttaaataattttaaataatttgtagcttaatattaaagatttaagttatttattgtttcattttttttcccacaatccaagctgccatattttgagggcagggggagttttattctacaccctttaccttcctagataattatgtctaagtagttttatctttaatttcatggttaactgtgagccaaaatacaattggacaattagtctcattatttattgtgccccattgcaactttatggttcaataaatatataattttttacaaatgtaaaattttacatttaagcatttgtaaagttacagcaaaagatgtacctgttaatacacagaatgtgtacagattatttgttatgacaataaaacactcaaaataaatggtctttagcatctcaaattccaactgaaatcattttagtattaactcttcttcccaaagcaatgtctcatttcttggctgtgcaggtgatgccatgttatatccaataactagaaaaatcactgtgctgaacttttatgtttagcttccaagtatttttctaatgttttgcatttcaagtggtatcactgttaaatgccatttgttttcagattgtggccttttattattggctgctagatcctggtgtttctatgttcttttttaagcaccaaaaagaagatggggaagaaaagaaggaaaattttctgatataaatatgttgttcaaattatgagtattatttaaaaaagaaaaaggaacataacccaggagtctaagttaaatctaatattgttaatactgaacttgcaggtccaggttggtatacattccaccctctagaagtattttcttacagtagataagctgctcacattttgttttgaatgggcatctcctgaggaaatgtagcatgacattggtactaactgcatgtgtaaatacatcatactggcaaaccgtaaaatataaattatgtatcatcattcatgtagtatctataatttgtaacagtgggggggaaagatgacatggtatttaataatacaataaaaatattcttatcacttcctatcc

SEQ ID NO: 25399 - DNA, 7911 bp, Homo sapiens
  source 1..7911: mol_type = unassigned DNA
atcactaccacactcgtctccgtttcggcctctgcagggtgtaagctgctaaagaagcttcaaccttaagggggcctcagggagagagttgtgctcctgccgccgagagctccaccttcgtggctctgggtccggggccccggcctgtggcggcgagcggcggccgctggagacgagcggcggcggcaggcggccagcccgggtctgcctcgctccgtgcagggccgggagagggatccgccatattggagctggggccgaaggtgccttggagccgcggcgcgaggcgggtggaggtggcggccctggcctggatcgggaaggagtcggctctgccctggcccgcaaggctggggagctaatgagcctctctggctagtctcctccccgtccactccctccactttctgccgccgggacccggctgggagccggctgtggcagtggcagtggcagtggcagcgacaggatgttctccaagaagccgcacggggacgtgaagaagtccacccagaaggtgctagacaccaagaaggacgcactgactcgcctcaagcacctgcgcatcgtcatcgagaatgcagaatctattgatcttaaacagtttttcgaccaacatttttcacatatatactatgtgttctttgaaaattttgtgactattgaagctagtcttaaacagaaaggtcacaagtctcaaagagaggaattggatgctatactttttatttttgagaaaattttacaacttcttccagaaagaattcatcagcgatggcagtttcatagtattggattgattttaaagaagctacttcacacaggaaactccttaaagattaggcgggaaggtgttcgtcttttcttactatggttgcaagctcttcagaataactgtagcaaagaacagctctggatgttttcatgcttaatccctggattttcagcaccacagtctgaacatggacctcgaactttagataatctcattaatcctccactcaaccttcaagaaactcaagtcactatagaagaaatcactcctcttgtccccccacaatcaggagataaagggcaagaagatctcacaagctattttcttgaagcacttctaaaatacatagtcattcaggtaaaaagtttagaatggaagaacaaagaaaaccaagaaaggggattttcatttttgttttcacattttaagaaatattacttgccttatatttttccaaacatctgtaaggaaaacagtttatatcatcctatacttgacatcccgcagatgagaccaaagccacattatgtcgtgataaagaaagatgctgaaaccaatgaagcaatctattgtacaaaggagcctttcattaaggctcgtgttattgtcattcgttggctggtttctttctggctggagccaaaaccacatacaggacctcatattcctgggatggaaggtgaagtcttgccaaagaatattcagagagcagctgctagtttagtatccagagaagaaagcaaaaatgataatgctgataaaacagacagaactacagaacccgaacagtctcattccaatacaagcactctcacggagcgagaacctagctcatctagtctctgtagtattgatgaagaacatctcacagacattgaaatagttcgcagagttttttcttctaaaaggagtaatgtaaactttgtgacagagatatttcgtcaggcatttttattaccaatttgtgaagcagcagctatgagaaaagtggtaaaagtatatcaagaatggatccaacaagaggaaaaacctttgttcatgcaagagcctgaagaaattgtgatcacttcttcagacctcccttgcattgaaaatgtcacagaccatgatatttcaatggaagaaggagaaaaaagagaagaggaaaatgggaccaatactgctgatcatgttcgaaattccagttgggcaaaaaacggctcctaccaaggtgctcttcataacgcctctgaagaagccacagaacaaaacatacgagctggtacccaggcagttttgcaggtgtttattataaactcatcaaatatatttcttcttgaacctgcaaatgaaataaaaaatcttctggatgaacacacagatatgtgtaaacgcattcttaacatttatcggtacatggttgtacaagtatcaatggacaaaaagacttgggaacagatgctgcttgtgttgctcagagtcacggaatctgtactgaagatgccatcacaagcttttctacagttccaagggaaaaaaaatatgaccttggcaggtcgacttgcaggaccacttttccagacccttatagttgcctggatcaaagcaaacctaaatgtgtacatctcccgagaactttgggatgacttactgtcagtattgtcatcgctgacctattgggaagagttggccactgagtggtcactgactatggagacattaactaaagttttagctaggaatttatatagtttggatctcagtgatttaccattggataagctgagtgaacagaaacaaaaaaagcacaaagggaaaggagttggacatgaatttcagaaagtttcagttgacaagtcattttctagaggatggagtcgtgatcagcctggccaagccccaatgagacagaggagtgcaacaaccactggttctccaggaaccgaaaaggcgaggagtatagtacggcaaaaaactgtcgatattgatgatgctcaaatacttccccgctcaactagagtcagacatttttcacaaagtgaagaaactggaaatgaagtttttggtgctttgaatgaggagcagccattgcctcgaagtagcagcacttctgacatcttggaaccattcactgttgaacgagccaaagtcaataaagaggacatgagccaaaaactgcctcctcttaatagtgatattggcggcagcagtgctaatgttcctgatctgatggatgagtttatagcagaacgacttcgaagtggtaatgcctcgactatgacaagaagaggaagtagtccaggcagcctggaaattcccaaagacctccctgatattctaaacaagcagaaccagatgcgccctattgatgacccaggtgtgccctcagaatggacttctcctgccagtgcagggagcagtgatcttatcagctcagatagtcattcggattctttcagcgctttccaatatgatggccgaaaatttgacaattttggctttggaaccgacactggggttacgtcctctgctgatgtggattcaggttctggccatcatcagagtgctgaagagcaggaagtggctagtctaactactcttcatatagattctgaaacaagcagtcttaatcagcaagctttctctgctgaagttgcaactattactggttcagaaagtgcttccccagtccactcacctctgggctccaggtcacagactccttccccttctacattgaatatagatcacatggaacagaaggatctgcagctcgacgagaagctccaccactctgttcttcagacaccagatgatctagaaattagtgaatttccatcagaatgttgtagtgtgatggcaggaggtactctgactggatggcatgctgatgttgctactgtaatgtggcgaagaatgctaggcattttgggagatgtaaattcaatcatggatcctgaaatacatgctcaagtttttgattacctctgtgaactttggcagaatctagctaagattagagataaccttggcatttcaactgataacctgacctccccttctccaccagttttaattcctccactgagaattcttacaccttggctttttaaggcaaccatgttgactgataaatataaacaaggtaaattacatgcatataaacttatttgtaatacaatgaaaagaagacaagatgtttctccaaatagagattttctaacacatttctacaatataatgcattgtggattacttcatattgaccaggatattgtcaatacaatcatcaaacactgctcacctcaatttttttcacttggtttgcctggtgccacaatgcttattatggattttattgtagcagctggtagagtggcttcttcagcttttctcaatgcaccaagagtagaagcacaagttcttctgggatctttggtttgctttcccaacttatattgtgaactgccttctcttcatcccaacattcctgatgttgctgtgtctcagtttacagatgttaaggaacttataatcaaaactgtattaagctcggcaagagatgagccctctggtcctgcacgatgtgtagcactttgtagtttaggtatttggatttgtgaagaactagtccatgagtctcatcatcctcaaattaaggaagctctgaatgtgatttgtgtttccttaaagtttactaataaaacagtagcccacgtagcttgtaacatgcttcacatgctggttcattatgtacctagacttcagatttaccagcctgattctcccttgaaaattattcaaatcctaatagctaccatcacccatcttttaccaagtacagaggcttcatcttatgaaatggacaagaggttggtagtatctttacttctctgccttctggactggatcatggccttacctctaaagacactgctccaaccatttcatgctacgggagcagaaagcgataaaacagaaaaatctgttctcaattgcatttataaggttttacatgggtgtgtttatggagctcagtgttttagcaatccaaggtattttcccatgagcctctctgatttggcatctgtagattatgatccttttatgcatttggaaagtctgaaagagcctgagcctctgcactctcctgactcagaacgatcttctaaactccagccagtaacagaagtgaaaactcaaatgcagcatggattaatctctatagcagcccgcactgttattacacatctggtaaatcacctgggccattatccaatgagcggtggtcctgctatgctaacaagtcaggtgtgtgaaaatcacgacaatcattacagtgaaagtactgaactttctcctgaactctttgagagtccaaatatccagttctttgtgttaaataatacaaccttagtgtcctgtatccagatcagatcagaagagaatatgcctggaggaggtttatctgctggccttgcatcagccaattcaaatgtcagaatcatagtacgtgatctctctggaaaatattcatgggattctgctatactgtatggcccacctcctgtaagtggcttgtcagaacctacatctttcatgctttcattgtctcaccaagagaagccagaagagcctccgacatctaatgaatgcttagaagatataaccgtaaaagatggactttctctccagtttaaaagatttagagaaactgtaccaacttgggatacaataagagatgaagaagatgttcttgatgagctcttgcagtatttgggtgttactagtcctgaatgcttacagagaactggaatctcacttaatattcctgctccacaacctgtgtgcatttctgaaaaacaagaaaatgatgttattaatgctatccttaagcaacatacagaagaaaaagaatttgttgagaagcactttaatgacttaaacatgaaagctgtggaacaagatgaaccaatacctcaaaaacctcagtcagcattttattattgcagattgcttcttagtatattgggaatgaattcctgggacaaacggaggagctttcatctcctgaagaaaaatgaaaagctacttagagaacttaggaacttggattcaaggcagtgccgagagacacacaagattgcagtattttatgttgctgaaggacaagaagacaaacactccattctcaccaatacaggaggaagtcaagcatatgaagattttgtagctggtcttggttgggaggtaaatcttacaaaccattgtggttttatgggaggactacaaaaaaacaaaagcactggattgaccactccatattttgctacctctacagtagaggtaatatttcacgtgtcaacaagaatgccttctgattctgatgattctttgaccaaaaaattgagacatttgggaaatgatgaagtgcacattgtttggtcagagcatactagagactacaggagaggaattattcccacagaatttggtgatgtccttattgtaatatatccaatgaaaaatcacatgttcagtattcagataatgaaaaaaccagaggttcccttctttggtcccctttttgatggtgctattgtgaatggaaaggttctacccattatggttagagcaacagctataaatgcaagccgtgctctgaaatctctgattccattgtatcaaaacttctatgaggagagagcacgatacctgcaaacaattgtccagcaccacttagaaccaacaacatttgaagattttgcagcacaggttttttctccagctccctaccaccatttaccatctgatgccggctcctacccagagattctacccagtgaaactcccacagcaacgcaggtagatggggctgacctggcctctccaatgtctcctcgaactagcaaaagccgcatgtccatgaagctgcgtcgttcctctggctcagccaataaatcctaaggagacaagcagcccagcagtgatcagcagtagccaccttagcacgaacatagggttaaccctttcaggccttcatgtctgccataacatgcatgtttcttcctgtacatttatttgagaaaacactggatttaaataattttaaataatttgtagcttaatattaaagatttaagttatttattgtttcattttttttcccacaatccaagctgccatattttgagggcagggggagttttattctacaccctttaccttcctagataattatgtctaagtagttttatctttaatttcatggttaactgtgagccaaaatacaattggacaattagtctcattatttattgtgccccattgcaactttatggttcaataaatatataattttttacaaatgtaaaattttacatttaagcatttgtaaagttacagcaaaagatgtacctgttaatacacagaatgtgtacagattatttgttatgacaataaaacactcaaaataaatggtctttagcatctcaaattccaactgaaatcattttagtattaactcttcttcccaaagcaatgtctcatttcttggctgtgcaggtgatgccatgttatatccaataactagaaaaatcactgtgctgaacttttatgtttagcttccaagtatttttctaatgttttgcatttcaagtggtatcactgttaaatgccatttgttttcagattgtggccttttattattggctgctagatcctggtgtttctatgttcttttttaagcaccaaaaagaagatggggaagaaaagaaggaaaattttctgatataaatatgttgttcaaattatgagtattatttaaaaaagaaaaaggaacataacccaggagtctaagttaaatctaatattgttaatactgaacttgcaggtccaggttggtatacattccaccctctagaagtattttcttacagtagataagctgctcacattttgttttgaatgggcatctcctgaggaaatgtagcatgacattggtactaactgcatgtgtaaatacatcatactggcaaaccgtaaaatataaattatgtatcatcattcatgtagtatctataatttgtaacagtgggggggaaagatgacatggtatttaataatacaataaaaatattcttatcacttcctatcca

SEQ ID NO: 25400 - DNA, 7900 bp, Homo sapiens
  source 1..7900: mol_type = unassigned DNA
agggagagagttgtgctcctgccgccgagagctccaccttcgtggctctgggtccggggccccggcctgtggcggcgagcggcggccgctggagacgagcggcggcggcaggcggccagcccgggtctgcctcgctccgtgcagggccgggagagggatccgccatattggagctggggccgaaggtgccttggagccgcggcgcgaggcgggtggaggtggcggccctggcctggatcgggaaggagtcggctctgccctggcccgcaaggctggggagctaatgagcctctctggctagtctcctccccgtccactccctccactttctgccgccgggacccggctgggagccggctgtggcagtggcagtggcagtggcagcgacaggatgttctccaagaagccgcacggggacgtgaagaagtccacccagaaggtgctagacaccaagaaggacgcactgactcgcctcaagcacctgcgcatcgtcatcgagaatgcagaatctattgatcttaaacagtttttcgaccaacatttttcacatatatactatgtgttctttgaaaattttgtgactattgaagctagtcttaaacagaaaggtcacaagtctcaaagagaggaattggatgctatactttttatttttgagaaaattttacaacttcttccagaaagaattcatcagcgatggcagtttcatagtattggattgattttaaagaagctacttcacacaggaaactccttaaagattaggcgggaaggtgttcgtcttttcttactatggttgcaagctcttcagaataactgtagcaaagaacagctctggatgttttcatgcttaatccctggattttcagcaccacagtctgaacatggacctcgaactttagataatctcattaatcctccactcaaccttcaagaaactcaagtcactatagaagaaatcactcctcttgtccccccacaatcaggagataaagggcaagaagatctcacaagctattttcttgaagcacttctaaaatacatagtcattcaggtaaaaagtttagaatggaagaacaaagaaaaccaagaaaggggattttcatttttgttttcacattttaagaaatattacttgccttatatttttccaaacatctgtaaggaaaacagtttatatcatcctatacttgacatcccgcagatgagaccaaagccacattatgtcgtgataaagaaagatgctgaaaccaatgaagcaatctattgtacaaaggagcctttcattaaggctcgtgttattgtcattcgttggctggtttctttctggctggagccaaaaccacatacaggacctcatattcctgggatggaaggtgaagtcttgccaaagaatattcagagagcagctgctagtttagtatccagagaagaaagcaaaaatgataatgctgataaaacagacagaactacagaacccgaacagtctcattccaatacaagcactctcacggagcgagaacctagctcatctagtctctgtagtattgatgaagaacatctcacagacattgaaatagttcgcagagttttttcttctaaaaggagtaatgtaaactttgtgacagagatatttcgtcaggcatttttattaccaatttgtgaagcagcagctatgagaaaagtggtaaaagtatatcaagaatggatccaacaagaggaaaaacctttgttcatgcaagagcctgaagaaattgtgatcacttcttcagacctcccttgcattgaaaatgtcacagaccatgatatttcaatggaagaaggagaaaaaagagaagaggaaaatgggaccaatactgctgatcatgttcgaaattccagttgggcaaaaaacggctcctaccaaggtgctcttcataacgcctctgaagaagccacagaacaaaacatacgagctggtacccaggcagttttgcaggtgtttattataaactcatcaaatatatttcttcttgaacctgcaaatgaaataaaaaatcttctggatgaacacacagatatgtgtaaacgcattcttaacatttatcggtacatggttgtacaagtatcaatggacaaaaagacttgggaacagatgctgcttgtgttgctcagagtcacggaatctgtactgaagatgccatcacaagcttttctacagttccaagggaaaaaaaatatgaccttggcaggtcgacttgcaggaccacttttccagacccttatagttgcctggatcaaagcaaacctaaatgtgtacatctcccgagaactttgggatgacttactgtcagtattgtcatcgctgacctattgggaagagttggccactgagtggtcactgactatggagacattaactaaagttttagctaggaatttatatagtttggatctcagtgatttaccattggataagctgagtgaacagaaacaaaaaaagcacaaagggaaaggagttggacatgaatttcagaaagtttcagttgacaagtcattttctagaggatggagtcgtgatcagcctggccaagccccaatgagacagaggagtgcaacaaccactggttctccaggaaccgaaaaggcgaggagtatagtacggcaaaaaactgtcgatattgatgatgctcaaatacttccccgctcaactagagtcagacatttttcacaaagtgaagaaactggaaatgaagtttttggtgctttgaatgaggagcagccattgcctcgaagtagcagcacttctgacatcttggaaccattcactgttgaacgagccaaagtcaataaagaggacatgagccaaaaactgcctcctcttaatagtgatattggcggcagcagtgctaatgttcctgatctgatggatgagtttatagcagaacgacttcgaagtggtaatgcctcgactatgacaagaagaggaagtagtccaggcagcctggaaattcccaaagacctccctgatattctaaacaagcagaaccagatgcgccctattgatgacccaggtgtgccctcagaatggacttctcctgccagtgcagggagcagtgatcttatcagctcagatagtcattcggattctttcagcgctttccaatatgatggccgaaaatttgacaattttggctttggaaccgacactggggttacgtcctctgctgatgtggattcaggttctggccatcatcagagtgctgaagagcaggaagtggctagtctaactactcttcatatagattctgaaacaagcagtcttaatcagcaagctttctctgctgaagttgcaactattactggttcagaaagtgcttccccagtccactcacctctgggctccaggtcacagactccttccccttctacattgaatatagatcacatggaacagaaggatctgcagctcgacgagaagctccaccactctgttcttcagacaccagatgatctagaaattagtgaatttccatcagaatgttgtagtgtgatggcaggaggtactctgactggatggcatgctgatgttgctactgtaatgtggcgaagaatgctaggcattttgggagatgtaaattcaatcatggatcctgaaatacatgctcaagtttttgattacctctgtgaactttggcagaatctagctaagattagagataaccttggcatttcaactgataacctgacctccccttctccaccagttttaattcctccactgagaattcttacaccttggctttttaaggcaaccatgttgactgataaatataaacaaggtaaattacatgcatataaacttatttgtaatacaatgaaaagaagacaagatgtttctccaaatagagattttctaacacatttctacaatataatgcattgtggattacttcatattgaccaggatattgtcaatacaatcatcaaacactgctcacctcaatttttttcacttggtttgcctggtgccacaatgcttattatggattttattgtagcagctggtagagtggcttcttcagcttttctcaatgcaccaagagtagaagcacaagttcttctgggatctttggtttgctttcccaacttatattgtgaactgccttctcttcatcccaacattcctgatgttgctgtgtctcagtttacagatgttaaggaacttataatcaaaactgtattaagctcggcaagagatgagccctctggtcctgcacgatgtgtagcactttgtagtttaggtatttggatttgtgaagaactagtccatgagtctcatcatcctcaaattaaggaagctctgaatgtgatttgtgtttccttaaagtttactaataaaacagtagcccacgtagcttgtaacatgcttcacatgctggttcattatgtacctagacttcagatttaccagcctgattctcccttgaaaattattcaaatcctaatagctaccatcacccatcttttaccaagtacagaggcttcatcttatgaaatggacaagaggttggtagtatctttacttctctgccttctggactggatcatggccttacctctaaagacactgctccaaccatttcatgctacgggagcagaaagcgataaaacagaaaaatctgttctcaattgcatttataaggttttacatgggtgtgtttatggagctcagtgttttagcaatccaaggtattttcccatgagcctctctgatttggcatctgtagattatgatccttttatgcatttggaaagtctgaaagagcctgagcctctgcactctcctgactcagaacgatcttctaaactccagccagtaacagaagtgaaaactcaaatgcagcatggattaatctctatagcagcccgcactgttattacacatctggtaaatcacctgggccattatccaatgagcggtggtcctgctatgctaacaagtcaggtgtgtgaaaatcacgacaatcattacagtgaaagtactgaactttctcctgaactctttgagagtccaaatatccagttctttgtgttaaataatacaaccttagtgtcctgtatccagatcagatcagaagagaatatgcctggaggaggtttatctgctggccttgcatcagccaattcaaatgtcagaatcatagtacgtgatctctctggaaaatattcatgggattctgctatactgtatggcccacctcctgtaagtggcttgtcagaacctacatctttcatgctttcattgtctcaccaagagaagccagaagagcctccgacatctaatgaatgcttagaagatataaccgtaaaagatggactttctctccagtttaaaagatttagagaaactgtaccaacttgggatacaataagagatgaagaagatgttcttgatgagctcttgcagtatttgggtgttactagtcctgaatgcttacagagaactggaatctcacttaatattcctgctccacaacctgtgtgcatttctgaaaaacaagaaaatgatgttattaatgctatccttaagcaacatacagaagaaaaagaatttgttgagaagcactttaatgacttaaacatgaaagctgtggaacaagatgaaccaatacctcaaaaacctcagtcagcattttattattgcagattgcttcttagtatattgggaatgaattcctgggacaaacggaggagctttcatctcctgaagaaaaatgaaaagctacttagagaacttaggaacttggattcaaggcagtgccgagagacacacaagattgcagtattttatgttgctgaaggacaagaagacaaacactccattctcaccaatacaggaggaagtcaagcatatgaagattttgtagctggtcttggttgggaggtaaatcttacaaaccattgtggttttatgggaggactacaaaaaaacaaaagcactggattgaccactccatattttgctacctctacagtagaggtaatatttcacgtgtcaacaagaatgccttctgattctgatgattctttgaccaaaaaattgagacatttgggaaatgatgaagtgcacattgtttggtcagagcatactagagactacaggagaggaattattcccacagaatttggtgatgtccttattgtaatatatccaatgaaaaatcacatgttcagtattcagataatgaaaaaaccagaggttcccttctttggtcccctttttgatggtgctattgtgaatggaaaggttctacccattatggttagagcaacagctataaatgcaagccgtgctctgaaatctctgattccattgtatcaaaacttctatgaggagagagcacgatacctgcaaacaattgtccagcaccacttagaaccaacaacatttgaagattttgcagcacaggttttttctccagctccctaccaccatttaccatctgatgccgaagaaagaaatgcagtgatagttctcttcctcccaaaacctccgctagaaaacattggccatctcaaggctcctacccagagattctacccagtgaaactcccacagcaacgcaggtagatggggctgacctggcctctccaatgtctcctcgaactagcaaaagccgcatgtccatgaagctgcgtcgttcctctggctcagccaataaatcctaaggagacaagcagcccagcagtgatcagcagtagccaccttagcacgaacatagggttaaccctttcaggccttcatgtctgccataacatgcatgtttcttcctgtacatttatttgagaaaacactggatttaaataattttaaataatttgtagcttaatattaaagatttaagttatttattgtttcattttttttcccacaatccaagctgccatattttgagggcagggggagttttattctacaccctttaccttcctagataattatgtctaagtagttttatctttaatttcatggttaactgtgagccaaaatacaattggacaattagtctcattatttattgtgccccattgcaactttatggttcaataaatatataattttttacaaatgtaaaattttacatttaagcatttgtaaagttacagcaaaagatgtacctgttaatacacagaatgtgtacagattatttgttatgacaataaaacactcaaaataaatggtctttagcatctcaaattccaactgaaatcattttagtattaactcttcttcccaaagcaatgtctcatttcttggctgtgcaggtgatgccatgttatatccaataactagaaaaatcactgtgctgaacttttatgtttagcttccaagtatttttctaatgttttgcatttcaagtggtatcactgttaaatgccatttgttttcagattgtggccttttattattggctgctagatcctggtgtttctatgttcttttttaagcaccaaaaagaagatggggaagaaaagaaggaaaattttctgatataaatatgttgttcaaattatgagtattatttaaaaaagaaaaaggaacataacccaggagtctaagttaaatctaatattgttaatactgaacttgcaggtccaggttggtatacattccaccctctagaagtattttcttacagtagataagctgctcacattttgttttgaatgggcatctcctgaggaaatgtagcatgacattggtactaactgcatgtgtaaatacatcatactggcaaaccgtaaaatataaattatgtatcatcattcatgtagtatctataatttgtaacagtgggggggaaagatgacatggtatttaataatacaataaaaatattcttatcacttcctatcc

SEQ ID NO: 25401 - DNA, 6328 bp, Homo sapiens
  source 1..6328: mol_type = unassigned DNA
tctggctagtctcctccccgtccactccctccactttctgccgccgggacccggctgggagccggctgtggcagtggcagtggcagtggcagcgacaggatgttctccaagaagccgcacggggacgtgaagaagtccacccagaaggtgctagacaccaagaaggacgcactgactcgcctcaagcacctgcgcatcgtcatcgagaatgcagaatctattgatcttaaacagtttttcgaccaacatttttcacatatatactatgtgttctttgaaaattttgtgactattgaagctagtcttaaacagaaaggtcacaagtctcaaagagaggaattggatgctatactttttatttttgagaaaattttacaacttcttccagaaagaattcatcagcgatggcagtttcatagtattggattgattttaaagaagctacttcacacaggaaactccttaaagattaggcgggaaggtgttcgtcttttcttactatggttgcaagctcttcagaataactgtagcaaagaacagctctggatgttttcatgcttaatccctggattttcagcaccacagtctgaacatggacctcgaactttagataatctcattaatcctccactcaaccttcaagaaactcaagtcactatagaagaaatcactcctcttgtccccccacaatcaggagataaagggcaagaagatctcacaagctattttcttgaagcacttctaaaatacatagtcattcaggtaaaaagtttagaatggaagaacaaagaaaaccaagaaaggggattttcatttttgttttcacattttaagaaatattacttgccttatatttttccaaacatctgtaaggaaaacagtttatatcatcctatacttgacatcccgcagatgagaccaaagccacattatgtcgtgataaagaaagatgctgaaaccaatgaagcaatctattgtacaaaggagcctttcattaaggctcgtgttattgtcattcgttggctggtttctttctggctggagccaaaaccacatacaggacctcatattcctgggatggaaggtgaagtcttgccaaagaatattcagagagcagctgctagtttagtatccagagaagaaagcaaaaatgataatgctgataaaacagacagaactacagaacccgaacagtctcattccaatacaagcactctcacggagcgagaacctagctcatctagtctctgtagtattgatgaagaacatctcacagacattgaaatagttcgcagagttttttcttctaaaaggagtaatgtaaactttgtgacagagatatttcgtcaggcatttttattaccaatttgtgaagcagcagctatgagaaaagtggtaaaagtatatcaagaatggatccaacaagaggaaaaacctttgttcatgcaagagcctgaagaaattgtgatcacttcttcagacctcccttgcattgaaaatgtcacagaccatgatatttcaatggaagaaggagaaaaaagagaagaggaaaatgggaccaatactgctgatcatgttcgaaattccagttgggcaaaaaacggctcctaccaaggtgctcttcataacgcctctgaagaagccacagaacaaaacatacgagctggtacccaggcagttttgcaggtgtttattataaactcatcaaatatatttcttcttgaacctgcaaatgaaataaaaaatcttctggatgaacacacagatatgtgtaaacgcattcttaacatttatcggtacatggttgtacaagtatcaatggacaaaaagacttgggaacagatgctgcttgtgttgctcagagtcacggaatctgtactgaagatgccatcacaagcttttctacagttccaagggaaaaaaaatatgaccttggcaggtcgacttgcaggaccacttttccagacccttatagttgcctggatcaaagcaaacctaaatgtgtacatctcccgagaactttgggatgacttactgtcagtattgtcatcgctgacctattgggaagagttggccactgagtggtcactgactatggagacattaactaaagttttagctaggaatttatatagtttggatctcagtgatttaccattggataagctgagtgaacagaaacaaaaaaagcacaaagggaaaggagttggacatgaatttcagaaagtttcagttgacaagtcattttctagaggatggagtcgtgatcagcctggccaagccccaatgagacagaggagtgcaacaaccactggttctccaggaaccgaaaaggcgaggagtatagtacggcaaaaaactgtcgatattgatgatgctcaaatacttccccgctcaactagagtcagacatttttcacaaagtgaagaaactggaaatgaagtttttggtgctttgaatgaggagcagccattgcctcgaagtagcagcacttctgacatcttggaaccattcactgttgaacgagccaaagaggcagaacagaatgccaccagaggctccactgagggatctgtacagtcatgtaatgggctattttggaaggaaagctgcagtgatattggcggcagcagtgctaatgttcctgatctgatggatgagtttatagcagaacgacttcgaagtggtaatgcctcgactatgacaagaagaggaagtagtccaggcagcctggaaattcccaaagacctccctgatattctaaacaagcagaaccagatgcgccctattgatgacccaggtgtgccctcagaatggacttctcctgccagtgcagggagcagtgatcttatcagctcagatagtcattcggattctttcagcgctttccaatatgatggccgaaaatttgacaattttggctttggaaccgacactggggttacgtcctctgctgatgtggattcaggttctggccatcatcagagtgctgaagagcaggaagtggctagtctaactactcttcatatagattctgaaacaagcagtcttaatcagcaagctttctctgctgaagttgcaactattactggttcagaaagtgcttccccagtccactcacctctgggctccaggtcacagactccttccccttctacattgaatatagatcacatggaacagaaggatctgcagctcgacgagaagctccaccactctgttcttcagacaccagatgatctagaaattagtgaatttccatcagaatgttgtagtgtgatggcaggaggtactctgactggatggcatgctgatgttgctactgtaatgtggcgaagaatgctaggcattttgggagatgtaaattcaatcatggatcctgaaatacatgctcaagtttttgattacctctgtgaactttggcagaatctagctaagattagagataaccttggcatttcaactgataacctgacctccccttctccaccagttttaattcctccactgagaattcttacaccttggctttttaaggcaaccatgttgactgataaatataaacaaggtaaattacatgcatataaacttatttgtaatacaatgaaaagaagacaagatgtttctccaaatagagattttctaacacatttctacaatataatgcattgtggattacttcatattgaccaggatattgtcaatacaatcatcaaacactgctcacctcaatttttttcacttggtttgcctggtgccacaatgcttattatggattttattgtagcagctggtagagtggcttcttcagcttttctcaatgcaccaagagtagaagcacaagttcttctgggatctttggtttgctttcccaacttatattgtgaactgccttctcttcatcccaacattcctgatgttgctgtgtctcagtttacagatgttaaggaacttataatcaaaactgtattaagctcggcaagagatgagccctctggtcctgcacgatgtgtagcactttgtagtttaggtatttggatttgtgaagaactagtccatgagtctcatcatcctcaaattaaggaagctctgaatgtgatttgtgtttccttaaagtttactaataaaacagtagcccacgtagcttgtaacatgcttcacatgctggttcattatgtacctagacttcagatttaccagcctgattctcccttgaaaattattcaaatcctaatagctaccatcacccatcttttaccaagtacagaggcttcatcttatgaaatggacaagaggttggtagtatctttacttctctgccttctggactggatcatggccttacctctaaagacactgctccaaccatttcatgctacgggagcagaaagcgataaaacagaaaaatctgttctcaattgcatttataaggttttacatgggtgtgtttatggagctcagtgttttagcaatccaaggtattttcccatgagcctctctgatttggcatctgtagattatgatccttttatgcatttggaaagtctgaaagagcctgagcctctgcactctcctgactcagaacgatcttctaaactccagccagtaacagaagtgaaaactcaaatgcagcatggattaatctctatagcagcccgcactgttattacacatctggtaaatcacctgggccattatccaatgagcggtggtcctgctatgctaacaagtcaggtgtgtgaaaatcacgacaatcattacagtgaaagtactgaactttctcctgaactctttgagagtccaaatatccagttctttgtgttaaataatacaaccttagtgtcctgtatccagatcagatcagaagagaatatgcctggaggaggtttatctgctggccttgcatcagccaattcaaatgtcagaatcatagtacgtgatctctctggaaaatattcatgggattctgctatactgtatggcccacctcctgtaagtggcttgtcagaacctacatctttcatgctttcattgtctcaccaagagaagccagaagagcctccgacatctaatgaatgcttagaagatataaccgtaaaagatggactttctctccagtttaaaagatttagagaaactgtaccaacttgggatacaataagagatgaagaagatgttcttgatgagctcttgcagtatttgggtgttactagtcctgaatgcttacagagaactggaatctcacttaatattcctgctccacaacctgtgtgcatttctgaaaaacaagaaaatgatgttattaatgctatccttaagcaacatacagaagaaaaagaatttgttgagaagcactttaatgacttaaacatgaaagctgtggaacaagatgaaccaatacctcaaaaacctcagtcagcattttattattgcagattgcttcttagtatattgggaatgaattcctgggacaaacggaggagctttcatctcctgaagaaaaatgaaaagctacttagagaacttaggaacttggattcaaggcagtgccgagagacacacaagattgcagtattttatgttgctgaaggacaagaagacaaacactccattctcaccaatacaggaggaagtcaagcatatgaagattttgtagctggtcttggttgggaggtaaatcttacaaaccattgtggttttatgggaggactacaaaaaaacaaaagcactggattgaccactccatattttgctacctctacagtagaggtaatatttcacgtgtcaacaagaatgccttctgattctgatgattctttgaccaaaaaattgagacatttgggaaatgatgaagtgcacattgtttggtcagagcatactagagactacaggagaggaattattcccacagaatttggtgatgtccttattgtaatatatccaatgaaaaatcacatgttcagtattcagataatgaaaaaaccagaggttcccttctttggtcccctttttgatggtgctattgtgaatggaaaggttctacccattatggttagagcaacagctataaatgcaagccgtgctctgaaatctctgattccattgtatcaaaacttctatgaggagagagcacgatacctgcaaacaattgtccagcaccacttagaaccaacaacatttgaagattttgcagcacaggttttttctccagctccctaccaccatttaccatctgatgccgatcattaaatatcagttctgtttatctgaaggctcctacccagagattctacccagtgaaactcccacagcaacgcaggtagatggg

SEQ ID NO: 25402 - DNA, 7864 bp, Homo sapiens
  source 1..7864: mol_type = unassigned DNA
agggagagagttgtgctcctgccgccgagagctccaccttcgtggctctgggtccggggccccggcctgtggcggcgagcggcggccgctggagacgagcggcggcggcaggcggccagcccgggtctgcctcgctccgtgcagggccgggagagggatccgccatattggagctggggccgaaggtgccttggagccgcggcgcgaggcgggtggaggtggcggccctggcctggatcgggaaggagtcggctctgccctggcccgcaaggctggggagctaatgagcctctctggctagtctcctccccgtccactccctccactttctgccgccgggacccggctgggagccggctgtggcagtggcagtggcagtggcagcgacaggatgttctccaagaagccgcacggggacgtgaagaagtccacccagaaggtgctagacaccaagaaggacgcactgactcgcctcaagcacctgcgcatcgtcatcgagaatgcagaatctattgatcttaaacagtttttcgaccaacatttttcacatatatactatgtgttctttgaaaattttgtgactattgaagctagtcttaaacagaaaggtcacaagtctcaaagagaggaattggatgctatactttttatttttgagaaaattttacaacttcttccagaaagaattcatcagcgatggcagtttcatagtattggattgattttaaagaagctacttcacacaggaaactccttaaagattaggcgggaaggtgttcgtcttttcttactatggttgcaagctcttcagaataactgtagcaaagaacagctctggatgttttcatgcttaatccctggattttcagcaccacagtctgaacatggacctcgaactttagataatctcattaatcctccactcaaccttcaagaaactcaagtcactatagaagaaatcactcctcttgtccccccacaatcaggagataaagggcaagaagatctcacaagctattttcttgaagcacttctaaaatacatagtcattcaggtaaaaagtttagaatggaagaacaaagaaaaccaagaaaggggattttcatttttgttttcacattttaagaaatattacttgccttatatttttccaaacatctgtaaggaaaacagtttatatcatcctatacttgacatcccgcagatgagaccaaagccacattatgtcgtgataaagaaagatgctgaaaccaatgaagcaatctattgtacaaaggagcctttcattaaggctcgtgttattgtcattcgttggctggtttctttctggctggagccaaaaccacatacaggacctcatattcctgggatggaaggtgaagtcttgccaaagaatattcagagagcagctgctagtttagtatccagagaagaaagcaaaaatgataatgctgataaaacagacagaactacagaacccgaacagtctcattccaatacaagcactctcacggagcgagaacctagctcatctagtctctgtagtattgatgaagaacatctcacagacattgaaatagttcgcagagttttttcttctaaaaggagtaatgtaaactttgtgacagagatatttcgtcaggcatttttattaccaatttgtgaagcagcagctatgagaaaagtggtaaaagtatatcaagaatggatccaacaagaggaaaaacctttgttcatgcaagagcctgaagaaattgtgatcacttcttcagacctcccttgcattgaaaatgtcacagaccatgatatttcaatggaagaaggagaaaaaagagaagaggaaaatgggaccaatactgctgatcatgttcgaaattccagttgggcaaaaaacggctcctaccaaggtgctcttcataacgcctctgaagaagccacagaacaaaacatacgagctggtacccaggcagttttgcaggtgtttattataaactcatcaaatatatttcttcttgaacctgcaaatgaaataaaaaatcttctggatgaacacacagatatgtgtaaacgcattcttaacatttatcggtacatggttgtacaagtatcaatggacaaaaagacttgggaacagatgctgcttgtgttgctcagagtcacggaatctgtactgaagatgccatcacaagcttttctacagttccaagggaaaaaaaatatgaccttggcaggtcgacttgcaggaccacttttccagacccttatagttgcctggatcaaagcaaacctaaatgtgtacatctcccgagaactttgggatgacttactgtcagtattgtcatcgctgacctattgggaagagttggccactgagtggtcactgactatggagacattaactaaagttttagctaggaatttatatagtttggatctcagtgatttaccattggataagctgagtgaacagaaacaaaaaaagcacaaagggaaaggagttggacatgaatttcagaaagtttcagttgacaagtcattttctagaggatggagtcgtgatcagcctggccaagccccaatgagacagaggagtgcaacaaccactggttctccaggaaccgaaaaggcgaggagtatagtacggcaaaaaactgtcgatattgatgatgctcaaatacttccccgctcaactagagtcagacatttttcacaaagtgaagaaactggaaatgaagtttttggtgctttgaatgaggagcagccattgcctcgaagtagcagcacttctgacatcttggaaccattcactgttgaacgagccaaagtcaataaagaggacatgagccaaaaactgcctcctcttaatagtgatattggcggcagcagtgctaatgttcctgatctgatggatgagtttatagcagaacgacttcgaagtggtaatgcctcgactatgacaagaagaggaagtagtccaggcagcctggaaattcccaaagacctccctgatattctaaacaagcagaaccagatgcgccctattgatgacccaggtgtgccctcagaatggacttctcctgccagtgcagggagcagtgatcttatcagctcagatagtcattcggattctttcagcgctttccaatatgatggccgaaaatttgacaattttggctttggaaccgacactggggttacgtcctctgctgatgtggattcaggttctggccatcatcagagtgctgaagagcaggaagtggctagtctaactactcttcatatagattctgaaacaagcagtcttaatcagcaagctttctctgctgaagttgcaactattactggttcagaaagtgcttccccagtccactcacctctgggctccaggtcacagactccttccccttctacattgaatatagatcacatggaacagaaggatctgcagctcgacgagaagctccaccactctgttcttcagacaccagatgatctagaaattagtgaatttccatcagaatgttgtagtgtgatggcaggaggtactctgactggatggcatgctgatgttgctactgtaatgtggcgaagaatgctaggcattttgggagatgtaaattcaatcatggatcctgaaatacatgctcaagtttttgattacctctgtgaactttggcagaatctagctaagattagagataaccttggcatttcaactgataacctgacctccccttctccaccagttttaattcctccactgagaattcttacaccttggctttttaaggcaaccatgttgactgataaatataaacaaggtaaattacatgcatataaacttatttgtaatacaatgaaaagaagacaagatgtttctccaaatagagattttctaacacatttctacaatataatgcattgtggattacttcatattgaccaggatattgtcaatacaatcatcaaacactgctcacctcaatttttttcacttggtttgcctggtgccacaatgcttattatggattttattgtagcagctggtagagtggcttcttcagcttttctcaatgcaccaagagtagaagcacaagttcttctgggatctttggtttgctttcccaacttatattgtgaactgccttctcttcatcccaacattcctgatgttgctgtgtctcagtttacagatgttaaggaacttataatcaaaactgtattaagctcggcaagagatgagccctctggtcctgcacgatgtgtagcactttgtagtttaggtatttggatttgtgaagaactagtccatgagtctcatcatcctcaaattaaggaagctctgaatgtgatttgtgtttccttaaagtttactaataaaacagtagcccacgtagcttgtaacatgcttcacatgctggttcattatgtacctagacttcagatttaccagcctgattctcccttgaaaattattcaaatcctaatagctaccatcacccatcttttaccaagtacagaggcttcatcttatgaaatggacaagaggttggtagtatctttacttctctgccttctggactggatcatggccttacctctaaagacactgctccaaccatttcatgctacgggagcagaaagcgataaaacagaaaaatctgttctcaattgcatttataaggttttacatgggtgtgtttatggagctcagtgttttagcaatccaaggtattttcccatgagcctctctgatttggcatctgtagattatgatccttttatgcatttggaaagtctgaaagagcctgagcctctgcactctcctgactcagaacgatcttctaaactccagccagtaacagaagtgaaaactcaaatgcagcatggattaatctctatagcagcccgcactgttattacacatctggtaaatcacctgggccattatccaatgagcggtggtcctgctatgctaacaagtcaggtgtgtgaaaatcacgacaatcattacagtgaaagtactgaactttctcctgaactctttgagagtccaaatatccagttctttgtgttaaataatacaaccttagtgtcctgtatccagatcagatcagaagagaatatgcctggaggaggtttatctgctggccttgcatcagccaattcaaatgtcagaatcatagtacgtgatctctctggaaaatattcatgggattctgctatactgtatggcccacctcctgtaagtggcttgtcagaacctacatctttcatgctttcattgtctcaccaagagaagccagaagagcctccgacatctaatgaatgcttagaagatataaccgtaaaagatggactttctctccagtttaaaagatttagagaaactgtaccaacttgggatacaataagagatgaagaagatgttcttgatgagctcttgcagtatttgggtgttactagtcctgaatgcttacagagaactggaatctcacttaatattcctgctccacaacctgtgtgcatttctgaaaaacaagaaaatgatgttattaatgctatccttaagcaacatacagaagaaaaagaatttgttgagaagcactttaatgacttaaacatgaaagctgtggaacaagatgaaccaatacctcaaaaacctcagtcagcattttattattgcagattgcttcttagtatattgggaatgaattcctgggacaaacggaggagctttcatctcctgaagaaaaatgaaaagctacttagagaacttaggaacttggattcaaggcagtgccgagagacacacaagattgcagtattttatgttgctgaaggacaagaagacaaacactccattctcaccaatacaggaggaagtcaagcatatgaagattttgtagctggtcttggttgggaggtaaatcttacaaaccattgtggttttatgggaggactacaaaaaaacaaaagcactggattgaccactccatattttgctacctctacagtagaggtaatatttcacgtgtcaacaagaatgccttctgattctgatgattctttgaccaaaaaattgagacatttgggaaatgatgaagtgcacattgtttggtcagagcatactagagactacaggagaggaattattcccacagaatttggtgatgtccttattgtaatatatccaatgaaaaatcacatgttcagtattcagataatgaaaaaaccagaggttcccttctttggtcccctttttgatggtgctattgtgaatggaaaggttctacccattatggttagagcaacagctataaatgcaagccgtgctctgaaatctctgattccattgtatcaaaacttctatgaggagagagcacgatacctgcaaacaattgtccagcaccacttagaaccaacaacatttgaagattttgcagcacaggttttttctccagctccctaccaccatttaccatctgatgccgatcattaaatatcagttctgtttatctgaaggctcctacccagagattctacccagtgaaactcccacagcaacgcaggtagatggggctgacctggcctctccaatgtctcctcgaactagcaaaagccgcatgtccatgaagctgcgtcgttcctctggctcagccaataaatcctaaggagacaagcagcccagcagtgatcagcagtagccaccttagcacgaacatagggttaaccctttcaggccttcatgtctgccataacatgcatgtttcttcctgtacatttatttgagaaaacactggatttaaataattttaaataatttgtagcttaatattaaagatttaagttatttattgtttcattttttttcccacaatccaagctgccatattttgagggcagggggagttttattctacaccctttaccttcctagataattatgtctaagtagttttatctttaatttcatggttaactgtgagccaaaatacaattggacaattagtctcattatttattgtgccccattgcaactttatggttcaataaatatataattttttacaaatgtaaaattttacatttaagcatttgtaaagttacagcaaaagatgtacctgttaatacacagaatgtgtacagattatttgttatgacaataaaacactcaaaataaatggtctttagcatctcaaattccaactgaaatcattttagtattaactcttcttcccaaagcaatgtctcatttcttggctgtgcaggtgatgccatgttatatccaataactagaaaaatcactgtgctgaacttttatgtttagcttccaagtatttttctaatgttttgcatttcaagtggtatcactgttaaatgccatttgttttcagattgtggccttttattattggctgctagatcctggtgtttctatgttcttttttaagcaccaaaaagaagatggggaagaaaagaaggaaaattttctgatataaatatgttgttcaaattatgagtattatttaaaaaagaaaaaggaacataacccaggagtctaagttaaatctaatattgttaatactgaacttgcaggtccaggttggtatacattccaccctctagaagtattttcttacagtagataagctgctcacattttgttttgaatgggcatctcctgaggaaatgtagcatgacattggtactaactgcatgtgtaaatacatcatactggcaaaccgtaaaatataaattatgtatcatcattcatgtagtatctataatttgtaacagtgggggggaaagatgacatggtatttaataatacaataaaaatattcttatcacttcctatcca

SEQ ID NO: 25403 - DNA, 6250 bp, Homo sapiens
  source 1..6250: mol_type = unassigned DNA
atgttctccaagaagccgcacggggacgtgaagaagtccacccagaaggtgctagacaccaagaaggacgcactgactcgcctcaagcacctgcgcatcgtcatcgagaatgcagaatctattgatcttaaacagtttttcgaccaacatttttcacatatatactatgtgttctttgaaaattttgtgactattgaagctagtcttaaacagaaaggtcacaagtctcaaagagaggaattggatgctatactttttatttttgagaaaattttacaacttcttccagaaagaattcatcagcgatggcagtttcatagtattggattgattttaaagaagctacttcacacaggaaactccttaaagattaggcgggaaggtgttcgtcttttcttactatggttgcaagctcttcagaataactgtagcaaagaacagctctggatgttttcatgcttaatccctggattttcagcaccacagtctgaacatggacctcgaactttagataatctcattaatcctccactcaaccttcaagaaactcaagtcactatagaagaaatcactcctcttgtccccccacaatcaggagataaagggcaagaagatctcacaagctattttcttgaagcacttctaaaatacatagtcattcaggtaaaaagtttagaatggaagaacaaagaaaaccaagaaaggggattttcatttttgttttcacattttaagaaatattacttgccttatatttttccaaacatctgtaaggaaaacagtttatatcatcctatacttgacatcccgcagatgagaccaaagccacattatgtcgtgataaagaaagatgctgaaaccaatgaagcaatctattgtacaaaggagcctttcattaaggctcgtgttattgtcattcgttggctggtttctttctggctggagccaaaaccacatacaggacctcatattcctgggatggaaggtgaagtcttgccaaagaatattcagagagcagctgctagtttagtatccagagaagaaagcaaaaatgataatgctgataaaacagacagaactacagaacccgaacagtctcattccaatacaagcactctcacggagcgagaacctagctcatctagtctctgtagtattgatgaagaacatctcacagacattgaaatagttcgcagagttttttcttctaaaaggagtaatgtaaactttgtgacagagatatttcgtcaggcatttttattaccaatttgtgaagcagcagctatgagaaaagtggtaaaagtatatcaagaatggatccaacaagaggaaaaacctttgttcatgcaagagcctgaagaaattgtgatcacttcttcagacctcccttgcattgaaaatgtcacagaccatgatatttcaatggaagaaggagaaaaaagagaagaggaaaatgggaccaatactgctgatcatgttcgaaattccagttgggcaaaaaacggctcctaccaaggtgctcttcataacgcctctgaagaagccacagaacaaaacatacgagctggtacccaggcagttttgcaggtgtttattataaactcatcaaatatatttcttcttgaacctgcaaatgaaataaaaaatcttctggatgaacacacagatatgtgtaaacgcattcttaacatttatcggtacatggttgtacaagtatcaatggacaaaaagacttgggaacagatgctgcttgtgttgctcagagtcacggaatctgtactgaagatgccatcacaagcttttctacagttccaagggaaaaaaaatatgaccttggcaggtcgacttgcaggaccacttttccagacccttatagttgcctggatcaaagcaaacctaaatgtgtacatctcccgagaactttgggatgacttactgtcagtattgtcatcgctgacctattgggaagagttggccactgagtggtcactgactatggagacattaactaaagttttagctaggaatttatatagtttggatctcagtgatttaccattggataagctgagtgaacagaaacaaaaaaagcacaaagggaaaggagttggacatgaatttcagaaagtttcagttgacaagtcattttctagaggatggagtcgtgatcagcctggccaagccccaatgagacagaggagtgcaacaaccactggttctccaggaaccgaaaaggcgaggagtatagtacggcaaaaaactgtcgccatgagaagccgatccattggtgaatgtgctctgccatcggcctatatacgcagtgctaaaagtgctcctgttctgatccatacttccaaacccttcttgcctgatattgttctcactcccctttctgatgagctttcagatattgatgatgctcaaatacttccccgctcaactagagtcagacatttttcacaaagtgaagaaactggaaatgaagtttttggtgctttgaatgaggagcagccattgcctcgaagtagcagcacttctgacatcttggaaccattcactgttgaacgagccaaagtcaataaagaggacatgagccaaaaactgcctcctcttaatagtgatattggcggcagcagtgctaatgttcctgatctgatggatgagtttatagcagaacgacttcgaagtggtaatgcctcgactatgacaagaagaggaagtagtccaggcagcctggaaattcccaaagacctccctgatattctaaacaagcagaaccagatgcgccctattgatgacccaggtgtgccctcagaatggacttctcctgccagtgcagggagcagtgatcttatcagctcagatagtcattcggattctttcagcgctttccaatatgatggccgaaaatttgacaattttggctttggaaccgacactggggttacgtcctctgctgatgtggattcaggttctggccatcatcagagtgctgaagagcaggaagtggctagtctaactactcttcatatagattctgaaacaagcagtcttaatcagcaagctttctctgctgaagttgcaactattactggttcagaaagtgcttccccagtccactcacctctgggctccaggtcacagactccttccccttctacattgaatatagatcacatggaacagaaggatctgcagctcgacgagaagctccaccactctgttcttcagacaccagatgatctagaaattagtgaatttccatcagaatgttgtagtgtgatggcaggaggtactctgactggatggcatgctgatgttgctactgtaatgtggcgaagaatgctaggcattttgggagatgtaaattcaatcatggatcctgaaatacatgctcaagtttttgattacctctgtgaactttggcagaatctagctaagattagagataaccttggcatttcaactgataacctgacctccccttctccaccagttttaattcctccactgagaattcttacaccttggctttttaaggcaaccatgttgactgataaatataaacaaggtaaattacatgcatataaacttatttgtaatacaatgaaaagaagacaagatgtttctccaaatagagattttctaacacatttctacaatataatgcattgtggattacttcatattgaccaggatattgtcaatacaatcatcaaacactgctcacctcaatttttttcacttggtttgcctggtgccacaatgcttattatggattttattgtagcagctggtagagtggcttcttcagcttttctcaatgcaccaagagtagaagcacaagttcttctgggatctttggtttgctttcccaacttatattgtgaactgccttctcttcatcccaacattcctgatgttgctgtgtctcagtttacagatgttaaggaacttataatcaaaactgtattaagctcggcaagagatgagccctctggtcctgcacgatgtgtagcactttgtagtttaggtatttggatttgtgaagaactagtccatgagtctcatcatcctcaaattaaggaagctctgaatgtgatttgtgtttccttaaagtttactaataaaacagtagcccacgtagcttgtaacatgcttcacatgctggttcattatgtacctagacttcagatttaccagcctgattctcccttgaaaattattcaaatcctaatagctaccatcacccatcttttaccaagtacagaggcttcatcttatgaaatggacaagaggttggtagtatctttacttctctgccttctggactggatcatggccttacctctaaagacactgctccaaccatttcatgctacgggagcagaaagcgataaaacagaaaaatctgttctcaattgcatttataaggttttacatgggtgtgtttatggagctcagtgttttagcaatccaaggtattttcccatgagcctctctgatttggcatctgtagattatgatccttttatgcatttggaaagtctgaaagagcctgagcctctgcactctcctgactcagaacgatcttctaaactccagccagtaacagaagtgaaaactcaaatgcagcatggattaatctctatagcagcccgcactgttattacacatctggtaaatcacctgggccattatccaatgagcggtggtcctgctatgctaacaagtcaggtgtgtgaaaatcacgacaatcattacagtgaaagtactgaactttctcctgaactctttgagagtccaaatatccagttctttgtgttaaataatacaaccttagtgtcctgtatccagatcagatcagaagagaatatgcctggaggaggtttatctgctggccttgcatcagccaattcaaatgtcagaatcatagtacgtgatctctctggaaaatattcatgggattctgctatactgtatggcccacctcctgtaagtggcttgtcagaacctacatctttcatgctttcattgtctcaccaagagaagccagaagagcctccgacatctaatgaatgcttagaagatataaccgtaaaagatggactttctctccagtttaaaagatttagagaaactgtaccaacttgggatacaataagagatgaagaagatgttcttgatgagctcttgcagtatttgggtgttactagtcctgaatgcttacagagaactggaatctcacttaatattcctgctccacaacctgtgtgcatttctgaaaaacaagaaaatgatgttattaatgctatccttaagcaacatacagaagaaaaagaatttgttgagaagcactttaatgacttaaacatgaaagctgtggaacaagatgaaccaatacctcaaaaacctcagtcagcattttattattgcagattgcttcttagtatattgggaatgaattcctgggacaaacggaggagctttcatctcctgaagaaaaatgaaaagctacttagagaacttaggaacttggattcaaggcagtgccgagagacacacaagattgcagtattttatgttgctgaaggacaagaagacaaacactccattctcaccaatacaggaggaagtcaagcatatgaagattttgtagctggtcttggttgggaggtaaatcttacaaaccattgtggttttatgggaggactacaaaaaaacaaaagcactggattgaccactccatattttgctacctctacagtagaggtaatatttcacgtgtcaacaagaatgccttctgattctgatgattctttgaccaaaaaattgagacatttgggaaatgatgaagtgcacattgtttggtcagagcatactagagactacaggagaggaattattcccacagaatttggtgatgtccttattgtaatatatccaatgaaaaatcacatgttcagtattcagataatgaaaaaaccagaggttcccttctttggtcccctttttgatggtgctattgtgaatggaaaggttctacccattatggttagagcaacagctataaatgcaagccgtgctctgaaatctctgattccattgtatcaaaacttctatgaggagagagcacgatacctgcaaacaattgtccagcaccacttagaaccaacaacatttgaagattttgcagcacaggttttttctccagctccctaccaccatttaccatctgatgccgatcatt

SEQ ID NO: 25404 - DNA, 3354 bp, Homo sapiens
  source 1..3354: mol_type = unassigned DNA
cagatcctaatagctaccatcacccatcttttaccaagtacagaggcttcatcttatgaaatggacaagaggttggtagtatctttacttctctgccttctggactggatcatggccttacctctaaagacactgctccaaccatttcatgctacgggagcagaaagcgataaaacagaaaaatctgttctcaattgcatttataaggttttacatgggtgtgtttatggagctcagtgttttagcaatccaaggtattttcccatgagcctctctgatttggcatctgtagattatgatccttttatgcatttggaaagtctgaaagagcctgagcctctgcactctcctgactcagaacgatcttctaaactccagccagtaacagaagtgaaaactcaaatgcagcatggattaatctctatagcagcccgcactgttattacacatctggtaaatcacctgggccattatccaatgagcggtggtcctgctatgctaacaagtcaggtgtgtgaaaatcacgacaatcattacagtgaaagtactgaactttctcctgaactctttgagagtccaaatatccagttctttgtgttaaataatacaaccttagtgtcctgtatccagatcagatcagaagagaatatgcctggaggaggtttatctgctggccttgcatcagccaattcaaatgtcagaatcatagtacgtgatctctctggaaaatattcatgggattctgctatactgtatggcccacctcctgtaagtggcttgtcagaacctacatctttcatgctttcattgtctcaccaagagaagccagaagagcctccgacatctaatgaatgcttagaagatataaccgtaaaagatggactttctctccagtttaaaagatttagagaaactgtaccaacttgggatacaataagagatgaagaagatgttcttgatgagctcttgcagtatttgggtgttactagtcctgaatgcttacagagaactggaatctcacttaatattcctgctccacaacctgtgtgcatttctgaaaaacaagaaaatgatgttattaatgctatccttaagcaacatacagaagaaaaagaatttgttgagaagcactttaatgacttaaacatgaaagctgtggaacaagatgaaccaatacctcaaaaacctcagtcagcattttattattgcagattgcttcttagtatattgggaatgaattcctgggacaaacggaggagctttcatctcctgaagaaaaatgaaaagctacttagagaacttaggaacttggattcaaggcagtgccgagagacacacaagattgcagtattttatgttgctgaaggacaagaagacaaacactccattctcaccaatacaggaggaagtcaagcatatgaagattttgtagctggtcttggttgggaggtaaatcttacaaaccattgtggttttatgggaggactacaaaaaaacaaaagcactggattgaccactccatattttgctacctctacagtagaggtaatatttcacgtgtcaacaagaatgccttctgattctgatgattctttgaccaaaaaattgagacatttgggaaatgatgaagtgcacattgtttggtcagagcatactagagactacaggagaggaattattcccacagaatttggtgatgtccttattgtaatatatccaatgaaaaatcacatgttcagtattcagataatgaaaaaaccagaggttcccttctttggtcccctttttgatggtgctattgtgaatggaaaggttctacccattatggttagagcaacagctataaatgcaagccgtgctctgaaatctctgattccattgtatcaaaacttctatgaggagagagcacgatacctgcaaacaattgtccagcaccacttagaaccaacaacatttgaagattttgcagcacaggttttttctccagctccctaccaccatttaccatctgatgccgttggctcctacccagagattctacccagtgaaactcccacagcaacgcaggtagatggggctgacctggcctctccaatgtctcctcgaactagcaaaagccgcatgtccatgaagctgcgtcgttcctctggctcagccaataaatcctaaggagacaagcagcccagcagtgatcagcagtagccaccttagcacgaacatagggttaaccctttcaggccttcatgtctgccataacatgcatgtttcttcctgtacatttatttgagaaaacactggatttaaataattttaaataatttgtagcttaatattaaagatttaagttatttattgtttcattttttttcccacaatccaagctgccatattttgagggcagggggagttttattctacaccctttaccttcctagataattatgtctaagtagttttatctttaatttcatggttaactgtgagccaaaatacaattggacaattagtctcattatttattgtgccccattgcaactttatggttcaataaatatataattttttacaaatgtaaaattttacatttaagcatttgtaaagttacagcaaaagatgtacctgttaatacacagaatgtgtacagattatttgttatgacaataaaacactcaaaataaatggtctttagcatctcaaattccaactgaaatcattttagtattaactcttcttcccaaagcaatgtctcatttcttggctgtgcaggtgatgccatgttatatccaataactagaaaaatcactgtgctgaacttttatgtttagcttccaagtatttttctaatgttttgcatttcaagtggtatcactgttaaatgccatttgttttcagattgtggccttttattattggctgctagatcctggtgtttctatgttcttttttaagcaccaaaaagaagatggggaagaaaagaaggaaaattttctgatataaatatgttgttcaaattatgagtattatttaaaaaagaaaaaggaacataacccaggagtctaagttaaatctaatattgttaatactgaacttgcaggtccaggttggtatacattccaccctctagaagtattttcttacagtagataagctgctcacattttgttttgaatgggcatctcctgaggaaatgtagcatgacattggtactaactgcatgtgtaaatacatcatactggcaaaccgtaaaatataaattatgtatcatcattcatgtagtatctataatttgtaacagtgggggggaaagatgacatggtatttaataatacaataaaaatattcttatcacttcct

SEQ ID NO: 25405 - DNA, 3598 bp, Homo sapiens
  source 1..3598: mol_type = unassigned DNA
gcgcccgcgctgcgagccttccatggtgcagcgcatgtgggccgaggcggccgggcctgctggcggcgccgagccgctgtttccgggctcccggcggagccgcagcgtgtgggacgccgtgcgcctggaggtgggcgtccccgacagctgcccggtggtgctgcacagcttcacgcagctagaccccgacctgccgcgcccggagagctccacgcaggagatcggtgaggagctgatcaacggagtcatctactccatctccctgcgcaaggtgcagctgcaccacggaggcaacaaggggcagcgctggctcgggtatgagaatgagtcggccctgaacctttatgagacttgcaaggtgcggaccgtgaaggctggcacgctggagaagctggtggagcacctggtgccagccttccagggcagcgacctctcctacgtcaccatcttcctgtgtacctatagagccttcaccaccacccaacaggtcctggacctgctgttcaaaagatacggctgcatcctcccctattccgacgaggatggtggaccccaggaccaacttaaaaatgccatctcctccatcctgggcacctggctggaccagtactcggaggatttctgtcaacctccggactttccctgcctcaagcagctggtggcctacgtgcagctcaacatgccaggctcagacctggagcgccgtgcccaccttctcctggcccagctggagcactcggaacccattgaggcagagcctgaggctctgtcaccagtgccagctctaaaaccaactccagagctcgagctagctctaacaccagctcgagcacccagcccagtgccggctccagccccggagccagagccagctccaacaccagctccaggttcagagctagaagtagctccagcaccagctccggagctccagcaggctccagagccagctgtgggactagaatcggctccagcgccagctctggaactagagccagctccagaacaggatccagctccctcacaaactctagagctggagccagctccagcaccagttccatcattacagccttcctggccttcacctgtggttgcagagaacgggctgagtgaggagaagcctcacctcttggtgttccctccagatctggtggcagagcagtttacactgatggatgcggaactgttcaagaaggtggtgccctaccactgcctgggctccatctggtcccagcgggacaagaagggcaaggagcacctggcgcccaccatccgcgccactgtcacccagttcaacagtgtggccaactgtgtcatcaccacctgcctcgggaaccgaagcacgaaagccccagacagggccagggtggtggagcactggatcgaggtggccagggagtgccggatcctcaagaacttctcgtcactgtatgccatcctctctgccctgcagagcaactccatccaccgtctgaagaagacgtgggaagacgtttccagggacagtttccggatctttcagaagctgtcagagatcttctcagatgagaacaactactcattgagccgggagctgctcatcaaggagggcacctccaagtttgccaccctggagatgaaccccaagagagcccagaaacggccgaaggagacgggcatcatccagggcaccgttccctacctgggcacgttcctcaccgacctggtgatgctggacactgccatgaaggactatctgtatggcagactcatcaactttgagaagaggaggaaggagttcgaggtgatcgcccagatcaagctgctgcagtcggcctgcaacaactacagcatcgcgccagatgagcaatttggggcctggttccgggccgtggagcggctcagcgagactgagagctacaacctgtcgtgcgagctggagcccccatccgagtcagccagcaacaccctcaggaccaagaagaacacagccattgtcaagcgctggagcgaccgccaggcccccagcactgagctcagtaccagtggcagctcccactccaagtcctgtgaccagctcaggtgtggcccctacctcagcagcggggacatcgctgacgcgctcagcgtgcactcggccggctcctctagctccgacgtggaggagatcaacatcagcttcgtcccggagtctcctgatggccaggaaaagaagttctgggaatcagcctcacagtcatccccggagacctccggcatcagctcagcctccagcagcacctcgtcctcctcagcctccaccacgcccgtggctgccacacgcacccacaagcgctctgtctcagggctctgcaactccagctccgcgctgccgctctacaaccagcaggtgggcgactgctgtatcatccgcgtcagcctggacgtggacaatggcaacatgtacaagagcatcctggtgaccagccaagataaggctccggctgtaatccgcaaggccatggacaaacacaacctggaggaggaggagccggaggactatgagctgctgcagattctctcagatgaccggaagctgaagatccctgaaaacgccaacgtcttctatgccatgaactctaccgccaactatgactttgtcctcaagaagcggaccttcaccaagggagtgaaggtcaagcacggagccagctccaccctccctcgcatgaagcagaaaggactcaagattgccaagggcatcttctgagggcatcctcccagggtctggctggctggtagccaagcacttatggaccagagtggcccaggccagctgggcgccttcctcccacctgccagcccagggtaccccagactccagtttcatcctgaacctctcccgctgctgggattgacgcctgccattggtcaggctgacctggcctcccgtggaccactcgctgccttaggtgccttctgctctctggaaccagaggactagctgacttttgccaaggagcagtgccaacgggcatggcatggtgccctgcctgcccccgggcgccacctctgtacacttccctgacaccttcccaggtgtgggtcactgccacctgtgcccatgggcaccccagagcacccactgtgaccactgcagttctctcatgcccacaggcactggcctgtgaccttcgcaggggtcccggcccctcccaccactctagcctttctcaggctgcaccaaagattccatcatcagggccaactgagagtgagggagtctcacccaccgcttaccccagccctcccctgggagcagagagagaaaccctcttcatggaccagactctgcacccggtgagtgaggacagtcccagctgagtcccatcgatgttgaatctcatgccactgcaagtgccattcaccactgcgtcctgggctttacgagaccatgcaagacgggggttagtgaggaaggaggatttggggtgggggtggggtgattgaatatttgtataaaaagcaaaaagaaaaaaaaaatgtttgtttactgattggggaggggcaatatttatttgttgtaaatagcaaatgctagacttgaatattatattaaaatcctgtttctactata

SEQ ID NO: 25406 - DNA, 3634 bp, Homo sapiens
  source 1..3634: mol_type = unassigned DNA
gcgcccgcgctgcgagccttccatggtgcagcgcatgtgggccgaggcggccgggcctgctggcggcgccgagccgctgtttccgggctcccggcggagccgcagcgtgtgggacgccgtgcgcctggaggtgggcgtccccgacagctgcccggtggtgctgcacagcttcacgcagctagaccccgacctgccgcgcccggagagctccacgcaggagatcggtgaggagctgatcaacggagtcatctactccatctccctgcgcaaggtgcagctgcaccacggaggcaacaaggggcagcgctggctcgggtatgagaatgagtcggccctgaacctttatgagacttgcaaggtgcggaccgtgaaggctggcacgctggagaagctggtggagcacctggtgccagccttccagggcagcgacctctcctacgtcaccatcttcctgtgtacctatagagccttcaccaccacccaacaggtcctggacctgctgttcaaaaggtacggtagatgtgacgccctcacggcctcctctagatacggctgcatcctcccctattccgacgaggatggtggaccccaggaccaacttaaaaatgccatctcctccatcctgggcacctggctggaccagtactcggaggatttctgtcaacctccggactttccctgcctcaagcagctggtggcctacgtgcagctcaacatgccaggctcagacctggagcgccgtgcccaccttctcctggcccagctggagcactcggaacccattgaggcagagcctgaggctctgtcaccagtgccagctctaaaaccaactccagagctcgagctagctctaacaccagctcgagcacccagcccagtgccggctccagccccggagccagagccagctccaacaccagctccaggttcagagctagaagtagctccagcaccagctccggagctccagcaggctccagagccagctgtgggactagaatcggctccagcgccagctctggaactagagccagctccagaacaggatccagctccctcacaaactctagagctggagccagctccagcaccagttccatcattacagccttcctggccttcacctgtggttgcagagaacgggctgagtgaggagaagcctcacctcttggtgttccctccagatctggtggcagagcagtttacactgatggatgcggaactgttcaagaaggtggtgccctaccactgcctgggctccatctggtcccagcgggacaagaagggcaaggagcacctggcgcccaccatccgcgccactgtcacccagttcaacagtgtggccaactgtgtcatcaccacctgcctcgggaaccgaagcacgaaagccccagacagggccagggtggtggagcactggatcgaggtggccagggagtgccggatcctcaagaacttctcgtcactgtatgccatcctctctgccctgcagagcaactccatccaccgtctgaagaagacgtgggaagacgtttccagggacagtttccggatctttcagaagctgtcagagatcttctcagatgagaacaactactcattgagccgggagctgctcatcaaggagggcacctccaagtttgccaccctggagatgaaccccaagagagcccagaaacggccgaaggagacgggcatcatccagggcaccgttccctacctgggcacgttcctcaccgacctggtgatgctggacactgccatgaaggactatctgtatggcagactcatcaactttgagaagaggaggaaggagttcgaggtgatcgcccagatcaagctgctgcagtcggcctgcaacaactacagcatcgcgccagatgagcaatttggggcctggttccgggccgtggagcggctcagcgagactgagagctacaacctgtcgtgcgagctggagcccccatccgagtcagccagcaacaccctcaggaccaagaagaacacagccattgtcaagcgctggagcgaccgccaggcccccagcactgagctcagtaccagtggcagctcccactccaagtcctgtgaccagctcaggtgtggcccctacctcagcagcggggacatcgctgacgcgctcagcgtgcactcggccggctcctctagctccgacgtggaggagatcaacatcagcttcgtcccggagtctcctgatggccaggaaaagaagttctgggaatcagcctcacagtcatccccggagacctccggcatcagctcagcctccagcagcacctcgtcctcctcagcctccaccacgcccgtggctgccacacgcacccacaagcgctctgtctcagggctctgcaactccagctccgcgctgccgctctacaaccagcaggtgggcgactgctgtatcatccgcgtcagcctggacgtggacaatggcaacatgtacaagagcatcctggtgaccagccaagataaggctccggctgtaatccgcaaggccatggacaaacacaacctggaggaggaggagccggaggactatgagctgctgcagattctctcagatgaccggaagctgaagatccctgaaaacgccaacgtcttctatgccatgaactctaccgccaactatgactttgtcctcaagaagcggaccttcaccaagggagtgaaggtcaagcacggagccagctccaccctccctcgcatgaagcagaaaggactcaagattgccaagggcatcttctgagggcatcctcccagggtctggctggctggtagccaagcacttatggaccagagtggcccaggccagctgggcgccttcctcccacctgccagcccagggtaccccagactccagtttcatcctgaacctctcccgctgctgggattgacgcctgccattggtcaggctgacctggcctcccgtggaccactcgctgccttaggtgccttctgctctctggaaccagaggactagctgacttttgccaaggagcagtgccaacgggcatggcatggtgccctgcctgcccccgggcgccacctctgtacacttccctgacaccttcccaggtgtgggtcactgccacctgtgcccatgggcaccccagagcacccactgtgaccactgcagttctctcatgcccacaggcactggcctgtgaccttcgcaggggtcccggcccctcccaccactctagcctttctcaggctgcaccaaagattccatcatcagggccaactgagagtgagggagtctcacccaccgcttaccccagccctcccctgggagcagagagagaaaccctcttcatggaccagactctgcacccggtgagtgaggacagtcccagctgagtcccatcgatgttgaatctcatgccactgcaagtgccattcaccactgcgtcctgggctttacgagaccatgcaagacgggggttagtgaggaaggaggatttggggtgggggtggggtgattgaatatttgtataaaaagcaaaaagaaaaaaaaaatgtttgtttactgattggggaggggcaatatttatttgttgtaaatagcaaatgctagacttgaatattatattaaaatcctgtttctactata

SEQ ID NO: 25407 - DNA, 3452 bp, Homo sapiens
  source 1..3452: mol_type = unassigned DNA
cgagcggccggagcgcggcgcggcgcagacaatgggagcggcgctggcggctgccggggcggccccgagggccgcagagtcctgggcccggcggggaccggaggccgcgccatgagccccgcagccgggcgcacccctgcgccgcgcgcgggcccaggcgagcggcctctgcgagccccgggtcccgccctggggccggcgatgtgccaccgaggctgaggatgatggtagattgccagagctccacgcaggagatcggtgaggagctgatcaacggagtcatctactccatctccctgcgcaaggtgcagctgcaccacggaggcaacaaggggcagcgctggctcgggtatgagaatgagtcggccctgaacctttatgagacttgcaaggtgcggaccgtgaaggctggcacgctggagaagctggtggagcacctggtgccagccttccagggcagcgacctctcctacgtcaccatcttcctgtgtacctatagagccttcaccaccacccaacaggtcctggacctgctgttcaaaaggtacggtagatgtgacgccctcacggcctcctctagatacggctgcatcctcccctattccgacgaggatggtggaccccaggaccaacttaaaaatgccatctcctccatcctgggcacctggctggaccagtactcggaggatttctgtcaacctccggactttccctgcctcaagcagctggtggcctacgtgcagctcaacatgccaggctcagacctggagcgccgtgcccaccttctcctggcccagctggagcactcggaacccattgaggcagagcctgaggctctgtcaccagtgccagctctaaaaccaactccagagctcgagctagctctaacaccagctcgagcacccagcccagtgccggctccagccccggagccagagccagctccaacaccagctccaggttcagagctagaagtagctccagcaccagctccggagctccagcaggctccagagccagctgtgggactagaatcggctccagcgccagctctggaactagagccagctccagaacaggatccagctccctcacaaactctagagctggagccagctccagcaccagttccatcattacagccttcctggccttcacctgtggttgcagagaacgggctgagtgaggagaagcctcacctcttggtgttccctccagatctggtggcagagcagtttacactgatggatgcggagtgccggatcctcaagaacttctcgtcactgtatgccatcctctctgccctgcagagcaactccatccaccgtctgaagaagacgtgggaagacgtttccagggacagtttccggatctttcagaagctgtcagagatcttctcagatgagaacaactactcattgagccgggagctgctcatcaaggagggcacctccaagtttgccaccctggagatgaaccccaagagagcccagaaacggccgaaggagacgggcatcatccagggcaccgttccctacctgggcacgttcctcaccgacctggtgatgctggacactgccatgaaggactatctgtatggcagactcatcaactttgagaagaggaggaaggagttcgaggtgatcgcccagatcaagctgctgcagtcggcctgcaacaactacagcatcgcgccagatgagcaatttggggcctggttccgggccgtggagcggctcagcgagactgagagctacaacctgtcgtgcgagctggagcccccatccgagtcagccagcaacaccctcaggaccaagaagaacacagccattgtcaagcgctggagcgaccgccaggcccccagcactgagctcagtaccagtggcagctcccactccaagtcctgtgaccagctcaggtgtggcccctacctcagcagcggggacatcgctgacgcgctcagcgtgcactcggccggctcctctagctccgacgtggaggagatcaacatcagcttcgtcccggagtctcctgatggccaggaaaagaagttctgggaatcagcctcacagtcatccccggagacctccggcatcagctcagcctccagcagcacctcgtcctcctcagcctccaccacgcccgtggctgccacacgcacccacaagcgctctgtctcagggctctgcaactccagctccgcgctgccgctctacaaccagcaggtgggcgactgctgtatcatccgcgtcagcctggacgtggacaatggcaacatgtacaagagcatcctggtgaccagccaagataaggctccggctgtaatccgcaaggccatggacaaacacaacctggaggaggaggagccggaggactatgagctgctgcagattctctcagatgaccggaagctgaagatccctgaaaacgccaacgtcttctatgccatgaactctaccgccaactatgactttgtcctcaagaagcggaccttcaccaagggagtgaaggtcaagcacggagccagctccaccctccctcgcatgaagcagaaaggactcaagattgccaagggcatcttctgagggcatcctcccagggtctggctggctggtagccaagcacttatggaccagagtggcccaggccagctgggcgccttcctcccacctgccagcccagggtaccccagactccagtttcatcctgaacctctcccgctgctgggattgacgcctgccattggtcaggctgacctggcctcccgtggaccactcgctgccttaggtgccttctgctctctggaaccagaggactagctgacttttgccaaggagcagtgccaacgggcatggcatggtgccctgcctgcccccgggcgccacctctgtacacttccctgacaccttcccaggtgtgggtcactgccacctgtgcccatgggcaccccagagcacccactgtgaccactgcagttctctcatgcccacaggcactggcctgtgaccttcgcaggggtcccggcccctcccaccactctagcctttctcaggctgcaccaaagattccatcatcagggccaactgagagtgagggagtctcacccaccgcttaccccagccctcccctgggagcagagagagaaaccctcttcatggaccagactctgcacccggtgagtgaggacagtcccagctgagtcccatcgatgttgaatctcatgccactgcaagtgccattcaccactgcgtcctgggctttacgagaccatgcaagacgggggttagtgaggaaggaggatttggggtgggggtggggtgattgaatatttgtataaaaagcaaaaagaaaaaaaaaatgtttgtttactgattggggaggggcaatatttatttgttgtaaatagcaaatgctagacttgaatattatattaaaatcctgtttctactata

SEQ ID NO: 25408 - DNA, 2919 bp, Homo sapiens
  source 1..2919: mol_type = unassigned DNA
agtgtctgggcgggaagccgggccccagggcctgatgtgcctgtgggggcactccacagcccctgcccacaccctctcctccccgcctctgctgttctgctccctgccctgtgccctccacttgcagccagggactgggcatccacccggccaggttcccaggaagagctccacgcaggagatcggtgaggagctgatcaacggagtcatctactccatctccctgcgcaaggtgcagctgcaccacggaggcaacaaggggcagcgctggctcgggtatgagaatgagtcggccctgaacctttatgagacttgcaaggtgcggaccgtgaaggctggcacgctggagaagctggtggagcacctggtgccagccttccagggcagcgacctctcctacgtcaccatcttcctgtgtacctatagagccttcaccaccacccaacaggtcctggacctgctgttcaaaagatacggctgcatcctcccctattccgacgaggatggtggaccccaggaccaacttaaaaatgccatctcctccatcctgggcacctggctggaccagtactcggaggatttctgtcaacctccggactttccctgcctcaagcagctggtggcctacgtgcagctcaacatgccaggctcagacctggagcgccgtgcccaccttctcctggcccagctggagcactcggaacccattgaggcagagcctgaggctctgtcaccagtgccagctctaaaaccaactccagagctcgagctagctctaacaccagctcgagcacccagcccagtgccggctccagccccggagccagagccagctccaacaccagctccaggttcagagctagaagtagctccagcaccagctccggagctccagcaggctccagagccagctgtgggactagaatcggctccagcgccagctctggaactagagccagctccagaacaggatccagctccctcacaaactctagagctggagccagctccagcaccagttccatcattacagccttcctggccttcacctgtggttgcagagaacgggctgagtgaggagaagcctcacctcttggtgttccctccagatctggtggcagagcagtttacactgatggatgcggaactgttcaagaaggtggtgccctaccactgcctgggctccatctggtcccagcgggacaagaagggcaaggagcacctggcgcccaccatccgcgccactgtcacccagttcaacagtgtggccaactgtgtcatcaccacctgcctcgggaaccgaagcacgaaagccccagacagggccagggtggtggagcactggatcgaggtggccagggagtgccggatcctcaagaacttctcgtcactgtatgccatcctctctgccctgcagagcaactccatccaccgtctgaagaagacgtgggaagacgtttccagggacagtttccggatctttcagaagctgtcagagatcttctcagatgagaacaactactcattgagccgggagctgctcatcaaggagggcacctccaagtttgccaccctggagatgaaccccaagagagcccagaaacggccgaaggagacgggcatcatccagggcaccgttccctacctgggcacgttcctcaccgacctggtgatgctggacactgccatgaaggactatctgtatggcagactcatcaactttgagaagaggaggaaggagttcgaggtgatcgcccagatcaagctgctgcagtcggcctgcaacaactacagcatcgcgccagatgagcaatttggggcctggttccgggccgtggagcggctcagcgagactgagagctacaacctgtcgtgcgagctggagcccccatccgagtcagccagcaacaccctcaggaccaagaagaacacagccattgtcaagcgctggagcgaccgccaggcccccagcactgagctcagtaccagtggcagctcccactccaagtcctgtgaccagctcaggtgtggcccctacctcagcagcggggacatcgctgacgcgctcagcgtgcactcggccggctcctctagctccgacgtggaggagatcaacatcagcttcgtcccggagtctcctgatggccaggaaaagaagttctgggaatcagcctcacagtcatccccggagacctccggcatcagctcagcctccagcagcacctcgtcctcctcagcctccaccacgcccgtggctgccacacgcacccacaagcgctctgtctcagggctctgcaactccagctccgcgctgccgctctacaaccagcaggtgggcgactgctgtatcatccgcgtcagcctggacgtggacaatggcaacatgtacaagagcatcctggtgaccagccaagataaggctccggctgtaatccgcaaggccatggacaaacacaacctggaggaggaggagccggaggactatgagctgctgcagattctctcagatgaccggaagctgaagatccctgaaaacgccaacgtcttctatgccatgaactctaccgccaactatgactttgtcctcaagaagcggaccttcaccaagggagtgaaggtcaagcacggagccagctccaccctccctcgcatgaagcagaaaggactcaagattgccaagggcatcttctgagggcatcctcccagggtctggctggctggtagccaagcacttatggaccagagtggcccaggccagctgggcgccttcctcccacctgccagcccagggtaccccagactccagtttcatcctgaacctctcccgctgctgggattgacgcctgccattggtcaggctgacctggcctcccgtggaccactcgctgccttaggtgccttctgctctctggaaccaga

SEQ ID NO: 25409 - DNA, 3691 bp, Homo sapiens
  source 1..3691: mol_type = unassigned DNA
actccactagggcacgcaggcgacgagcacactggcagagggcctcccgcagggcccactccccacctggctctcgccccaccatggcccgggaagcaggccaggtttgtgccaggcctgccgtgcccagggggaggaagggctctgtgttctttgcctgtgtctctgtggtgaccgccaggagaagggccgtcgcccgtcgtgccgctctccaaagcccgacaccttggctggcacctctgccagcaccggccaccaccgagagctccacgcaggagatcggtgaggagctgatcaacggagtcatctactccatctccctgcgcaaggtgcagctgcaccacggaggcaacaaggggcagcgctggctcgggtatgagaatgagtcggccctgaacctttatgagacttgcaaggtgcggaccgtgaaggctggcacgctggagaagctggtggagcacctggtgccagccttccagggcagcgacctctcctacgtcaccatcttcctgtgtacctatagagccttcaccaccacccaacaggtcctggacctgctgttcaaaaggtacggtagatgtgacgccctcacggcctcctctagatacggctgcatcctcccctattccgacgaggatggtggaccccaggaccaacttaaaaatgccatctcctccatcctgggcacctggctggaccagtactcggaggatttctgtcaacctccggactttccctgcctcaagcagctggtggcctacgtgcagctcaacatgccaggctcagacctggagcgccgtgcccaccttctcctggcccagctggagcactcggaacccattgaggcagagcctgaggctctgtcaccagtgccagctctaaaaccaactccagagctcgagctagctctaacaccagctcgagcacccagcccagtgccggctccagccccggagccagagccagctccaacaccagctccaggttcagagctagaagtagctccagcaccagctccggagctccagcaggctccagagccagctgtgggactagaatcggctccagcgccagctctggaactagagccagctccagaacaggatccagctccctcacaaactctagagctggagccagctccagcaccagttccatcattacagccttcctggccttcacctgtggttgcagagaacgggctgagtgaggagaagcctcacctcttggtgttccctccagatctggtggcagagcagtttacactgatggatgcggaactgttcaagaaggtggtgccctaccactgcctgggctccatctggtcccagcgggacaagaagggcaaggagcacctggcgcccaccatccgcgccactgtcacccagttcaacagtgtggccaactgtgtcatcaccacctgcctcgggaaccgaagcacgaaagccccagacagggccagggtggtggagcactggatcgaggtggccagggagtgccggatcctcaagaacttctcgtcactgtatgccatcctctctgccctgcagagcaactccatccaccgtctgaagaagacgtgggaagacgtttccagggacagtttccggatctttcagaagctgtcagagatcttctcagatgagaacaactactcattgagccgggagctgctcatcaaggagggcacctccaagtttgccaccctggagatgaaccccaagagagcccagaaacggccgaaggagacgggcatcatccagggcaccgttccctacctgggcacgttcctcaccgacctggtgatgctggacactgccatgaaggactatctgtatggcagactcatcaactttgagaagaggaggaaggagttcgaggtgatcgcccagatcaagctgctgcagtcggcctgcaacaactacagcatcgcgccagatgagcaatttggggcctggttccgggccgtggagcggctcagcgagactgagagctacaacctgtcgtgcgagctggagcccccatccgagtcagccagcaacaccctcaggaccaagaagaacacagccattgtcaagcgctggagcgaccgccaggcccccagcactgagctcagtaccagtggcagctcccactccaagtcctgtgaccagctcaggtgtggcccctacctcagcagcggggacatcgctgacgcgctcagcgtgcactcggccggctcctctagctccgacgtggaggagatcaacatcagcttcgtcccggagtctcctgatggccaggaaaagaagttctgggaatcagcctcacagtcatccccggagacctccggcatcagctcagcctccagcagcacctcgtcctcctcagcctccaccacgcccgtggctgccacacgcacccacaagcgctctgtctcagggctctgcaactccagctccgcgctgccgctctacaaccagcaggtgggcgactgctgtatcatccgcgtcagcctggacgtggacaatggcaacatgtacaagagcatcctggtgaccagccaagataaggctccggctgtaatccgcaaggccatggacaaacacaacctggaggaggaggagccggaggactatgagctgctgcagattctctcagatgaccggaagctgaagatccctgaaaacgccaacgtcttctatgccatgaactctaccgccaactatgactttgtcctcaagaagcggaccttcaccaagggagtgaaggtcaagcacggagccagctccaccctccctcgcatgaagcagaaaggactcaagattgccaagggcatcttctgagggcatcctcccagggtctggctggctggtagccaagcacttatggaccagagtggcccaggccagctgggcgccttcctcccacctgccagcccagggtaccccagactccagtttcatcctgaacctctcccgctgctgggattgacgcctgccattggtcaggctgacctggcctcccgtggaccactcgctgccttaggtgccttctgctctctggaaccagaggactagctgacttttgccaaggagcagtgccaacgggcatggcatggtgccctgcctgcccccgggcgccacctctgtacacttccctgacaccttcccaggtgtgggtcactgccacctgtgcccatgggcaccccagagcacccactgtgaccactgcagttctctcatgcccacaggcactggcctgtgaccttcgcaggggtcccggcccctcccaccactctagcctttctcaggctgcaccaaagattccatcatcagggccaactgagagtgagggagtctcacccaccgcttaccccagccctcccctgggagcagagagagaaaccctcttcatggaccagactctgcacccggtgagtgaggacagtcccagctgagtcccatcgatgttgaatctcatgccactgcaagtgccattcaccactgcgtcctgggctttacgagaccatgcaagacgggggttagtgaggaaggaggatttggggtgggggtggggtgattgaatatttgtataaaaagcaaaaagaaaaaaaaaatgtttgtttactgattggggaggggcaatatttatttgttgtaaatagcaaatgctagacttgaatattatattaaaatcctgtttctactat

SEQ ID NO: 25410 - DNA, 3801 bp, Homo sapiens
  source 1..3801: mol_type = unassigned DNA
ccgagcgcgtccccgagctcacgcggcggggcgcgcccctcgcacctgcgggcgggctggggcggggccgcggctgtccccgcccacccgggcccgagcccggggagccggggcggaaccgagcggcgaggcccgagcggccggagcgcggcgcggcgcagacaatgggagcggcgctggcggctgccggggcggccccgagggccgcagagtcctgggcccggcggggaccggaggccgcgccatgagccccgcagccgggcgcacccctgcgccgcgcgcgggcccaggcgagcggcctctgcgagccccgggtcccgccctggggccggcgatgtgccaccgaggctgaggatgatggtagattgccagagctccacgcaggagatcggtgaggagctgatcaacggagtcatctactccatctccctgcgcaaggtgcagctgcaccacggaggcaacaaggggcagcgctggctcgggtatgagaatgagtcggccctgaacctttatgagacttgcaaggtgcggaccgtgaaggctggcacgctggagaagctggtggagcacctggtgccagccttccagggcagcgacctctcctacgtcaccatcttcctgtgtacctatagagccttcaccaccacccaacaggtcctggacctgctgttcaaaaggtacggtagatgtgacgccctcacggcctcctctagatacggctgcatcctcccctattccgacgaggatggtggaccccaggaccaacttaaaaatgccatctcctccatcctgggcacctggctggaccagtactcggaggatttctgtcaacctccggactttccctgcctcaagcagctggtggcctacgtgcagctcaacatgccaggctcagacctggagcgccgtgcccaccttctcctggcccagctggagcactcggaacccattgaggcagagcctgaggctctgtcaccagtgccagctctaaaaccaactccagagctcgagctagctctaacaccagctcgagcacccagcccagtgccggctccagccccggagccagagccagctccaacaccagctccaggttcagagctagaagtagctccagcaccagctccggagctccagcaggctccagagccagctgtgggactagaatcggctccagcgccagctctggaactagagccagctccagaacaggatccagctccctcacaaactctagagctggagccagctccagcaccagttccatcattacagccttcctggccttcacctgtggttgcagagaacgggctgagtgaggagaagcctcacctcttggtgttccctccagatctggtggcagagcagtttacactgatggatgcggaactgttcaagaaggtggtgccctaccactgcctgggctccatctggtcccagcgggacaagaagggcaaggagcacctggcgcccaccatccgcgccactgtcacccagttcaacagtgtggccaactgtgtcatcaccacctgcctcgggaaccgaagcacgaaagccccagacagggccagggtggtggagcactggatcgaggtggccagggagtgccggatcctcaagaacttctcgtcactgtatgccatcctctctgccctgcagagcaactccatccaccgtctgaagaagacgtgggaagacgtttccagggacagtttccggatctttcagaagctgtcagagatcttctcagatgagaacaactactcattgagccgggagctgctcatcaaggagggcacctccaagtttgccaccctggagatgaaccccaagagagcccagaaacggccgaaggagacgggcatcatccagggcaccgttccctacctgggcacgttcctcaccgacctggtgatgctggacactgccatgaaggactatctgtatggcagactcatcaactttgagaagaggaggaaggagttcgaggtgatcgcccagatcaagctgctgcagtcggcctgcaacaactacagcatcgcgccagatgagcaatttggggcctggttccgggccgtggagcggctcagcgagactgagagctacaacctgtcgtgcgagctggagcccccatccgagtcagccagcaacaccctcaggaccaagaagaacacagccattgtcaagcgctggagcgaccgccaggcccccagcactgagctcagtaccagtggcagctcccactccaagtcctgtgaccagctcaggtgtggcccctacctcagcagcggggacatcgctgacgcgctcagcgtgcactcggccggctcctctagctccgacgtggaggagatcaacatcagcttcgtcccggagtctcctgatggccaggaaaagaagttctgggaatcagcctcacagtcatccccggagacctccggcatcagctcagcctccagcagcacctcgtcctcctcagcctccaccacgcccgtggctgccacacgcacccacaagcgctctgtctcagggctctgcaactccagctccgcgctgccgctctacaaccagcaggtgggcgactgctgtatcatccgcgtcagcctggacgtggacaatggcaacatgtacaagagcatcctggtgaccagccaagataaggctccggctgtaatccgcaaggccatggacaaacacaacctggaggaggaggagccggaggactatgagctgctgcagattctctcagatgaccggaagctgaagatccctgaaaacgccaacgtcttctatgccatgaactctaccgccaactatgactttgtcctcaagaagcggaccttcaccaagggagtgaaggtcaagcacggagccagctccaccctccctcgcatgaagcagaaaggactcaagattgccaagggcatcttctgagggcatcctcccagggtctggctggctggtagccaagcacttatggaccagagtggcccaggccagctgggcgccttcctcccacctgccagcccagggtaccccagactccagtttcatcctgaacctctcccgctgctgggattgacgcctgccattggtcaggctgacctggcctcccgtggaccactcgctgccttaggtgccttctgctctctggaaccagaggactagctgacttttgccaaggagcagtgccaacgggcatggcatggtgccctgcctgcccccgggcgccacctctgtacacttccctgacaccttcccaggtgtgggtcactgccacctgtgcccatgggcaccccagagcacccactgtgaccactgcagttctctcatgcccacaggcactggcctgtgaccttcgcaggggtcccggcccctcccaccactctagcctttctcaggctgcaccaaagattccatcatcagggccaactgagagtgagggagtctcacccaccgcttaccccagccctcccctgggagcagagagagaaaccctcttcatggaccagactctgcacccggtgagtgaggacagtcccagctgagtcccatcgatgttgaatctcatgccactgcaagtgccattcaccactgcgtcctgggctttacgagaccatgcaagacgggggttagtgaggaaggaggatttggggtgggggtggggtgattgaatatttgtataaaaagcaaaaagaaaaaaaaaatgtttgtttactgattggggaggggcaatatttatttgttgtaaatagcaaatgctagacttgaatattatattaaaatcctgtttctactata

SEQ ID NO: 25411 - DNA, 926 bp, Homo sapiens
  source 1..926: mol_type = unassigned DNA
gtggttgcagagaacgggctgagtgaggagaagcctcacctcttggtgttccctccagatctggtggcagagcagtttacactgatggatgcggagtgccggatcctcaagaacttctcgtcactgtatgccatcctctctgccctgcagagcaactccatccaccgtctgaagaagacgtgggaagacgtttccagggacagtttccggatctttcagaagctgtcagagatcttctcagatgagaacaactactcattgagccgggagctgctcatcaaggagggcacctccaagtttgccaccctggagatgaaccccaagagagcccagaaacggccgaaggagacgggcatcatccagggcaccgttccctacctgggcacgttcctcaccgacctggtgatgctggacactgccatgaaggactatctgtatggcagactcatcaactttgagaagaggaggaaggagttcgaggtgatcgcccagatcaagctgctgcagtcggcctgcaacaactacagcatcgcgccagatgagcaatttggggcctggttccgggccgtggagcggctcagcgagactgagagctacaacctgtcgtgcgagctggagcccccatccgagtcagccagcaacaccctcaggaccaagaagaacacagccattgtcaagcgctggagcgaccgccaggcccccagcactgagctcagtaccagtggcagctcccactccaagtcctgtgaccagctcaggtgtggcccctacctcagcagcggggacatcgctgacgcgctcagcgtgcactcggccggctcctctagctccgacgtggaggagatcaacatcagcttcgtcccggagtctcctgatggccaggaaaagaagttctgggaatcagcctcacagtcatccccggagac

SEQ ID NO: 25412 - DNA, 3705 bp, Homo sapiens
  source 1..3705: mol_type = unassigned DNA
ctcttttctgtctggcccgcggccccgctgcctgccctgctccaggctccacctgcgccgccgatcgcccgggtatcgcgggggcccaggccagctgagtccgttttccgcgccggggtggcgcccctccaaccgtcctaacgccgggccggcagcaaggagtgttcctgggacctcagagaccaggctcagagcctgacatccctgcgaggggacagcctcatccgcccaggccagtgggggtctctacaagtgcccaggctcaggtgcagcccccagcaatgcatcgccggagactggccctgggtctggggttctgcctgttggcgggcacaagcctcagtgtcctgtgggtgtatcttgagaactggctgccagtctcctatgtcccctattatctcccctgcccagagatcttacccatgatgatggctctttcttgcctctgccaccagcaacatgaagctgcactacaagagggagaagccactccagcccgtggtatggtcacagtaccctcagcccaagctgctggagcacaggcccacacagctgctgacactcacaccctggttggcgcccatcgtctccgagggaaccttcaacccagagcttctgcagcacatctaccagccactgaacctgaccattggggtcacggtgtttgccgtggggaaagctccacgcaggagatcggtgaggagctgatcaacggagtcatctactccatctccctgcgcaaggtgcagctgcaccacggaggcaacaaggggcagcgctggctcgggtatgagaatgagtcggccctgaacctttatgagacttgcaaggtgcggaccgtgaaggctggcacgctggagaagctggtggagcacctggtgccagccttccagggcagcgacctctcctacgtcaccatcttcctgtgtacctatagagccttcaccaccacccaacaggtcctggacctgctgttcaaaaggtacggtagatgtgacgccctcacggcctcctctagatacggctgcatcctcccctattccgacgaggatggtggaccccaggaccaacttaaaaatgccatctcctccatcctgggcacctggctggaccagtactcggaggatttctgtcaacctccggactttccctgcctcaagcagctggtggcctacgtgcagctcaacatgccaggctcagacctggagcgccgtgcccaccttctcctggcccagctggagcactcggaacccattgaggcagagcctgaggctctgtcaccagtgccagctctaaaaccaactccagagctcgagctagctctaacaccagctcgagcacccagcccagtgccggctccagccccggagccagagccagctccaacaccagctccaggttcagagctagaagtagctccagcaccagctccggagctccagcaggctccagagccagctgtgggactagaatcggctccagcgccagctctggaactagagccagctccagaacaggatccagctccctcacaaactctagagctggagccagctccagcaccagttccatcattacagccttcctggccttcacctgtggttgcagagaacgggctgagtgaggagaagcctcacctcttggtgttccctccagatctggtggcagagcagtttacactgatggatgcggaactgttcaagaaggtggtgccctaccactgcctgggctccatctggtcccagcgggacaagaagggcaaggagcacctggcgcccaccatccgcgccactgtcacccagttcaacagtgtggccaactgtgtcatcaccacctgcctcgggaaccgaagcacgaaagccccagacagggccagggtggtggagcactggatcgaggtggccagggagtgccggatcctcaagaacttctcgtcactgtatgccatcctctctgccctgcagagcaactccatccaccgtctgaagaagacgtgggaagacgtttccagggacagtttccggatctttcagaagctgtcagagatcttctcagatgagaacaactactcattgagccgggagctgctcatcaaggagggcacctccaagtttgccaccctggagatgaaccccaagagagcccagaaacggccgaaggagacgggcatcatccagggcaccgttccctacctgggcacgttcctcaccgacctggtgatgctggacactgccatgaaggactatctgtatggcagactcatcaactttgagaagaggaggaaggagttcgaggtgatcgcccagatcaagctgctgcagtcggcctgcaacaactacagcatcgcgccagatgagcaatttggggcctggttccgggccgtggagcggctcagcgagactgagagctacaacctgtcgtgcgagctggagcccccatccgagtcagccagcaacaccctcaggaccaagaagaacacagccattgtcaagcgctggagcgaccgccaggcccccagcactgagctcagtaccagtggcagctcccactccaagtcctgtgaccagctcaggtgtggcccctacctcagcagcggggacatcgctgacgcgctcagcgtgcactcggccggctcctctagctccgacgtggaggagatcaacatcagcttcgtcccggagtctcctgatggccaggaaaagaagttctgggaatcagcctcacagtcatccccggagacctccggcatcagctcagcctccagcagcacctcgtcctcctcagcctccaccacgcccgtggctgccacacgcacccacaagcgctctgtctcagggctctgcaactccagctccgcgctgccgctctacaaccagcaggtgggcgactgctgtatcatccgcgtcagcctggacgtggacaatggcaacatgtacaagagcatcctggtgaccagccaagataaggctccggctgtaatccgcaaggccatggacaaacacaacctggaggaggaggagccggaggactatgagctgctgcagattctctcagatgaccggaagctgaagatccctgaaaacgccaacgtcttctatgccatgaactctaccgccaactatgactttgtcctcaagaagcggaccttcaccaagggagtgaaggtcaagcacggagccagctccaccctccctcgcatgaagcagaaaggactcaagattgccaagggcatcttctgagggcatcctcccagggtctggctggctggtagccaagcacttatggaccagagtggcccaggccagctgggcgccttcctcccacctgccagcccagggtaccccagactccagtttcatcctgaacctctcccgctgctgggattgacgcctgccattggtcaggctgacctggcctcccgtggaccactcgctgccttaggtgccttctgctctctggaaccagaggactagctgacttttgccaaggagcagtgccaacgggcatggcatggtgccctgcctgcccccgggcgccacctctgtacacttccctgacaccttcccaggtgtgggtcactgccacctgtgcccatgggcaccccagagcacccactgtgaccactgcagttctctcatgcccacaggcactggcctgtgaccttcgcaggggtcccggcccctcccaccactctagcctttctca

SEQ ID NO: 25413 - DNA, 5113 bp, Homo sapiens
  source 1..5113: mol_type = unassigned DNA
agaaacgcttttctgcggtccagtctagggggtctcagattggcggggatgggcagcagcggcaggtggccttggcttttgctgcagccgtcaacgacctatcatcggggtcctgcgtaaggtccggctggctgggacttggctgtgggtgggatggactggctgccggaccgagtgccctgcagttggtaggagtatgaggcagagtgatgcacacccgggcgcccagcatcgttctaattgccggagacattgcctcagactgtgcgctgctagaggctgcgttcctgagcaggaagcccgtttcctgggattggaactacccttcttggccagcgggaagtccccaaggacggagtcgaaaggtcaaatcttatctgtcagtgctgtgtgacagcatcgcaacgggatctgcagaacctgaactcgatccgtaatgcctcctgcctgcctctttcaagatggaggtgaaacctgtgggagaacctactcaagaggtgtctaaattcaaactttccaccaaggtagaaagcacgggacactggctggtggaagatcatgttcgaatatgggaagttttaaagacagaggagagctcgattcaggactggggtgaagaggtagaggaaggagctgtttaccatgtcaccctcaaaagagtccagattcaacaggctgccaataaaggagcaagatggctaggggttgaaggggaccagctgcctccaggacacacagtcagtcaatatgaaacctgtaagatcaggaccataaaagctggcaccttggagaagcttgtggagaacctgctgacagcttttggggacaatgactttacctatatcagcatctttctttcaacgtacagaggctttgcctccactaaagaagtgctggaactactgctggacaggtatggaaacctgacaagcccaaactgtgaagaagatggaagccaaagttcatcagagtccaaaatggtgatcaggaatgcaatcgcttccatactaagggcctggcttgaccagtgtgcagaagacttccgagagccccctcacttcccttgcttacagaaactgctggattatctcacacggatgatgccgggctctgacccagaaagaagagcacaaaatcttcttgagcagtttcagaagcaagaagtggaaactgacaatgggcttcccaacacgatctccttcagcctggaagaggaagaggaactggagggtggagagtcagcagaattcacgtgcttctcagaagatctcgtggcagagcagctgacctacatggatgcacaactcttcaagaaagtagtgcctcaccactgcctgggctgcatttggtctcgaagggataagaaggaaaacaaacatttggctcctacgatccgtgccaccatctctcagtttaataccctcaccaaatgtgttgtcagcaccatcctggggggcaaagaactcaaaactcagcagagagccaaaatcattgagaagtggatcaacatcgctcatgaatgtagactcctgaagaatttttcctccttgagggccatcgtttcggcactgcagtctaattccatctatcggttaaaaaagacttgggctgccgtcccaagggaccgaatgctgatgtttgaagaactttcagatatcttctcagaccataataaccatttgaccagccgagaactactgatgaaggaaggaacctcaaaatttgcaaacctggacagcagtgtgaaagaaaaccagaagcgtacccagaggcggctgcagctccagaaggacatgggtgtgatgcagggaactgtgccctacctgggcaccttcctgactgacctgaccatgcttgacactgcccttcaggactacatcgagggtggactgataaactttgagaaaaggagaagggaatttgaagtgattgcccagataaagctcttacagtctgcctgcaacagctattgcatgaccccagaccaaaagttcatccagtggttccagaggcagcagctcctgacagaggaggagagctatgccctgtcatgtgagattgaagcagctgctgacgccagcaccacctcgcccaagcctcggaagagcatggtgaagagactcagcctactgtttctagggtctgacatgatcaccagtcccactcccaccaaagagcagcccaagtccactgccagcgggagctctggtgaaagcatggactctgtcagcgtgtcatcctgcgagtcgaaccactcagaggctgaggagggctccattactcccatggacacccctgatgagcctcaaaaaaagctctctgagtcctcctcatcctgttcttctatccattccatggacacaaattcctcagggatgtcttccttaatcaaccccctctcctcccctccgtcctgcaacaacaaccccaaaatccacaagcgctctgtctcggtgacgtccattacctcgactgtgctgcctcctgtttacaaccaacagaatgaagacacctgcataatccgcatcagtgtggaagacaataacggcaacatgtacaagagcatcatgttgacgagccaggataaaacccccgctgtgatccagagagccatgctgaagcacaatctggactcagaccccgccgaggagtacgagctggtgcaggtcatctcggaggacaaagaacttgtgattccagactcagcaaatgtcttttatgccatgaacagccaagtgaactttgacttcattttgcgcaaaaagaactccatggaagaacaagtgaaactgcgtagccggaccagcttgacgttgcccaggacagctaaacggggctgctggagtaacagacacagcaaaatcaccctctgaagggagggaccagtggccccttgtttgccaaaggcagagtggggctgagaaacaggctgcggtgattgcaattaccatccggtgttcgaggatcattggtgaagtcagcagatatttattgagttcctgtggtgtgcaaagcattatgataggcaccgtggggaaactggaaatgaatttgacatgaaaaggatgaacgattcactgattctctttgactcatttgagactaaaatgcagaattaccaacatttaaaacatatatatgcacatgtatttggtatgcatgtgtatctatataaaaatatataagagggactttatgggatagtatggactatggaaaaacaaatttgcacaatggcctgggaagttgaggtcactttttacagggaaatagaagaaactgagaacctagtctcgtatattctgagtaaatggaatcagtcctgggaatagagagtgtcctttgtgccagtattacaagaagcccaaactttatttttataaagggagaggatgactttctcaatcaagtgccaccagataaaaacaactgcagaggctggaactgccacaggctgtatgaaaggccactttggaaagggtttggatgagctggtggccttcaacctctgcctgcatctgccactttctgctaccctagggaggccaggaggagcttcggaggaccatcgccccactggtctagccatcatgacacctctggaggtgtcaagctcctgaaacaagctcatttcagtttctggcaaccccgtgtatttccgttttccccctaaagaacatatcataatcattgcacaaataaccatgttctttggtaatgaagccagaaaagaaagcgcaaaagaatggtgactcatttggactcttatctgtcttggaatgtcactgcttcattgccttctctgattgccttttgcatgtaaaactatgtgtctggagtcttttgccatctggatcttagtacctctttattatgtgcaatttattcctcaggtgtggaaatttctactgcaattgactacgtttgattattttgagcttgtgaaagatttctgaacagtgattgtcccgttaatagcccctcagaagatgttccctgctgataacagcatcctattttacttacttttatagcattactgtgcctagtcgtggggaaagagatggggctgtatagattatctgaatcatttgtctaagaggtacattcttccagatggaatcaataacttttttttttccaggttcccgtgcttgctatcacagtatcattgttaagtgacacttttgtctctcataacaccatcacactcttccttccaagtctgagctgtgctggggtttgaactaaaagccatatgtggaatattgacatgtgtaagaagcactttcagaatgttgtcctttttaagaaatgattctcaaaataccagtttttattccaaaaatttagagaacaaacccggaatatgaagtgcagattgtaacatggagctatttttttttcttaatcccataatacagctcctaaaagttgtgtgggatttgcgttgcataaatagccatgtgaattccacaagaagcaccagggaaagtttagagatttgcggcaatggaccgaagaacgggccaggaagtcctccaatttcctttggtctttccaggagattggactacacattgtaaagactgactgggtttcaactagtcaaaaagcactttcttctgttttcaatccctgttcgatttgtgcttctgtgcttgtaggagagatggccagggtggcagccctcatgcaggttgaagtatatgtagcctcagcctgatattcttggtgcgaaggtaaaaaaaaaaaaataaataaaaccattggcctggttgagggcgtgaccaccaagacatatatgttgtgcccgtgttcatcctgtgtatttatactgtatatgtagagtctagatttatatactgcaatgtaaaatatatatatatttaccttttttaaagacaatggaaattccaagtagctaaaacttagcttcatttatttaatgccactttaaatgtcttaaatttgtttcctggtggacagccgggtaatgcttttagctgctcgcatgcttgtctttctgcatctccatcatctgtttaccttttggttaaactaataaactagtttgggacttggctggcatgtgctgccagacccaaaggga

SEQ ID NO: 25414 - DNA, 4724 bp, Homo sapiens
  source 1..4724: mol_type = unassigned DNA
gtggcccgagtcgcgcgcaccggcggcggcgggggcagcgcggcgcgtgtctgtgcgctgcggtcgctcgggaccgggaccggggcgaggcgccgcggggctgagcccagcagacattgcgttggcctccgagcagggcgcatcatgcagcgttcgcgcaccggagagaaaactgagaatgaaattgctttggcaagctaaaatgagctcgattcaggactggggtgaagaggtagaggaaggagctgtttaccatgtcaccctcaaaagagtccagattcaacaggctgccaataaaggagcaagatggctaggggttgaaggggaccagctgcctccaggacacacagtcagtcaatatgaaacctgtaagatcaggaccataaaagctggcaccttggagaagcttgtggagaacctgctgacagcttttggggacaatgactttacctatatcagcatctttctttcaacgtacagaggctttgcctccactaaagaagtgctggaactactgctggacaggtatggaaacctgacaagcccaaactgtgaagaagatggaagccaaagttcatcagagtccaaaatggtgatcaggaatgcaatcgcttccatactaagggcctggcttgaccagtgtgcagaagacttccgagagccccctcacttcccttgcttacagaaactgctggattatctcacacggatgatgccgggctctgacccagaaagaagagcacaaaatcttcttgagcagtttcagaagcaagaagtggaaactgacaatgggcttcccaacacgatctccttcagcctggaagaggaagaggaactggagggtggagagtcagcagaattcacgtgcttctcagaagatctcgtggcagagcagctgacctacatggatgcacaactcttcaagaaagtagtgcctcaccactgcctgggctgcatttggtctcgaagggataagaaggaaaacaaacatttggctcctacgatccgtgccaccatctctcagtttaataccctcaccaaatgtgttgtcagcaccatcctggggggcaaagaactcaaaactcagcagagagccaaaatcattgagaagtggatcaacatcgctcatgaatgtagactcctgaagaatttttcctccttgagggccatcgtttcggcactgcagtctaattccatctatcggttaaaaaagacttgggctgccgtcccaagggaccgaatgctgatgtttgaagaactttcagatatcttctcagaccataataaccatttgaccagccgagaactactgatgaaggaaggaacctcaaaatttgcaaacctggacagcagtgtgaaagaaaaccagaagcgtacccagaggcggctgcagctccagaaggacatgggtgtgatgcagggaactgtgccctacctgggcaccttcctgactgacctgaccatgcttgacactgcccttcaggactacatcgagggtggactgataaactttgagaaaaggagaagggaatttgaagtgattgcccagataaagctcttacagtctgcctgcaacagctattgcatgaccccagaccaaaagttcatccagtggttccagaggcagcagctcctgacagaggaggagagctatgccctgtcatgtgagattgaagcagctgctgacgccagcaccacctcgcccaagcctcggaagagcatggtgaagagactcagcctactgtttctagggtctgacatgatcaccagtcccactcccaccaaagagcagcccaagtccactgccagcgggagctctggtgaaagcatggactctgtcagcgtgtcatcctgcgagtcgaaccactcagaggctgaggagggctccattactcccatggacacccctgatgagcctcaaaaaaagctctctgagtcctcctcatcctgttcttctatccattccatggacacaaattcctcagggatgtcttccttaatcaaccccctctcctcccctccgtcctgcaacaacaaccccaaaatccacaagcgctctgtctcggtgacgtccattacctcgactgtgctgcctcctgtttacaaccaacagaatgaagacacctgcataatccgcatcagtgtggaagacaataacggcaacatgtacaagagcatcatgttgacgagccaggataaaacccccgctgtgatccagagagccatgctgaagcacaatctggactcagaccccgccgaggagtacgagctggtgcaggtcatctcggaggacaaagaacttgtgattccagactcagcaaatgtcttttatgccatgaacagccaagtgaactttgacttcattttgcgcaaaaagaactccatggaagaacaagtgaaactgcgtagccggaccagcttgacgttgcccaggacagctaaacggggctgctggagtaacagacacagcaaaatcaccctctgaagggagggaccagtggccccttgtttgccaaaggcagagtggggctgagaaacaggctgcggtgattgcaattaccatccggtgttcgaggatcattggtgaagtcagcagatatttattgagttcctgtggtgtgcaaagcattatgataggcaccgtggggaaactggaaatgaatttgacatgaaaaggatgaacgattcactgattctctttgactcatttgagactaaaatgcagaattaccaacatttaaaacatatatatgcacatgtatttggtatgcatgtgtatctatataaaaatatataagagggactttatgggatagtatggactatggaaaaacaaatttgcacaatggcctgggaagttgaggtcactttttacagggaaatagaagaaactgagaacctagtctcgtatattctgagtaaatggaatcagtcctgggaatagagagtgtcctttgtgccagtattacaagaagcccaaactttatttttataaagggagaggatgactttctcaatcaagtgccaccagataaaaacaactgcagaggctggaactgccacaggctgtatgaaaggccactttggaaagggtttggatgagctggtggccttcaacctctgcctgcatctgccactttctgctaccctagggaggccaggaggagcttcggaggaccatcgccccactggtctagccatcatgacacctctggaggtgtcaagctcctgaaacaagctcatttcagtttctggcaaccccgtgtatttccgttttccccctaaagaacatatcataatcattgcacaaataaccatgttctttggtaatgaagccagaaaagaaagcgcaaaagaatggtgactcatttggactcttatctgtcttggaatgtcactgcttcattgccttctctgattgccttttgcatgtaaaactatgtgtctggagtcttttgccatctggatcttagtacctctttattatgtgcaatttattcctcaggtgtggaaatttctactgcaattgactacgtttgattattttgagcttgtgaaagatttctgaacagtgattgtcccgttaatagcccctcagaagatgttccctgctgataacagcatcctattttacttacttttatagcattactgtgcctagtcgtggggaaagagatggggctgtatagattatctgaatcatttgtctaagaggtacattcttccagatggaatcaataacttttttttttccaggttcccgtgcttgctatcacagtatcattgttaagtgacacttttgtctctcataacaccatcacactcttccttccaagtctgagctgtgctggggtttgaactaaaagccatatgtggaatattgacatgtgtaagaagcactttcagaatgttgtcctttttaagaaatgattctcaaaataccagtttttattccaaaaatttagagaacaaacccggaatatgaagtgcagattgtaacatggagctatttttttttcttaatcccataatacagctcctaaaagttgtgtgggatttgcgttgcataaatagccatgtgaattccacaagaagcaccagggaaagtttagagatttgcggcaatggaccgaagaacgggccaggaagtcctccaatttcctttggtctttccaggagattggactacacattgtaaagactgactgggtttcaactagtcaaaaagcactttcttctgttttcaatccctgttcgatttgtgcttctgtgcttgtaggagagatggccagggtggcagccctcatgcaggttgaagtatatgtagcctcagcctgatattcttggtgcgaaggtaaaaaaaaaaaaataaataaaaccattggcctggttgagggcgtgaccaccaagacatatatgttgtgcccgtgttcatcctgtgtatttatactgtatatgtagagtctagatttatatactgcaatgtaaaatatatatatatttaccttttttaaagacaatggaaattccaagtagctaaaacttagcttcatttatttaatgccactttaaatgtcttaaatttgtttcctggtggacagccgggtaatgcttttagctgctcgcatgcttgtctttctgcatctccatcatctgtttaccttttggttaaactaataaactagtttgggacttggctggcatgtgctgccagacccaaaggg

SEQ ID NO: 25415 - DNA, 5068 bp, Homo sapiens
  source 1..5068: mol_type = unassigned DNA
ctgcggtccagtctagggggtctcagattggcggggatgggcagcagcggcaggtggccttggcttttgctgcagccgtcaacgacctatcatcggggtcctgcgtaaggtccggctggctgggacttggctgtgggtgggatggactggctgccggaccgagtgccctgcagttggtaggagtatgaggcagagtgatgcacacccgggcgcccagcatcgttctaattgccggagacattgcctcagactgtgcgctgctagaggctgcgttcctgagcaggaagcccgtttcctgggattggaactacccttcttggccagcgggaagtccccaaggacggagtcgaaaggtcaaatcttatctgtcagtgctgtgtgacagcatcgcaacgggatctgcagaacctgaactcgatggaggtgaaacctgtgggagaacctactcaagaggtgtctaaattcaaactttccaccaaggtagaaagcacgggacactggctggtggaagatcatgttcgaatatgggaagttttaaagacagaggagagctcgattcaggactggggtgaagaggtagaggaaggagctgtttaccatgtcaccctcaaaagagtccagattcaacaggctgccaataaaggagcaagatggctaggggttgaaggggaccagctgcctccaggacacacagtcagtcaatatgaaacctgtaagatcaggaccataaaagctggcaccttggagaagcttgtggagaacctgctgacagcttttggggacaatgactttacctatatcagcatctttctttcaacgtacagaggctttgcctccactaaagaagtgctggaactactgctggacaggtatggaaacctgacaagcccaaactgtgaagaagatggaagccaaagttcatcagagtccaaaatggtgatcaggaatgcaatcgcttccatactaagggcctggcttgaccagtgtgcagaagacttccgagagccccctcacttcccttgcttacagaaactgctggattatctcacacggatgatgccgggctctgacccagaaagaagagcacaaaatcttcttgagcagtttcagaagcaagaagtggaaactgacaatgggcttcccaacacgatctccttcagcctggaagaggaagaggaactggagggtggagagtcagcagaattcacgtgcttctcagaagatctcgtggcagagcagctgacctacatggatgcacaactcttcaagaaagtagtgcctcaccactgcctgggctgcatttggtctcgaagggataagaaggaaaacaaacatttggctcctacgatccgtgccaccatctctcagtttaataccctcaccaaatgtgttgtcagcaccatcctggggggcaaagaactcaaaactcagcagagagccaaaatcattgagaagtggatcaacatcgctcatgaatgtagactcctgaagaatttttcctccttgagggccatcgtttcggcactgcagtctaattccatctatcggttaaaaaagacttgggctgccgtcccaagggaccgaatgctgatgtttgaagaactttcagatatcttctcagaccataataaccatttgaccagccgagaactactgatgaaggaaggaacctcaaaatttgcaaacctggacagcagtgtgaaagaaaaccagaagcgtacccagaggcggctgcagctccagaaggacatgggtgtgatgcagggaactgtgccctacctgggcaccttcctgactgacctgaccatgcttgacactgcccttcaggactacatcgagggtggactgataaactttgagaaaaggagaagggaatttgaagtgattgcccagataaagctcttacagtctgcctgcaacagctattgcatgaccccagaccaaaagttcatccagtggttccagaggcagcagctcctgacagaggaggagagctatgccctgtcatgtgagattgaagcagctgctgacgccagcaccacctcgcccaagcctcggaagagcatggtgaagagactcagcctactgtttctagggtctgacatgatcaccagtcccactcccaccaaagagcagcccaagtccactgccagcgggagctctggtgaaagcatggactctgtcagcgtgtcatcctgcgagtcgaaccactcagaggctgaggagggctccattactcccatggacacccctgatgagcctcaaaaaaagctctctgagtcctcctcatcctgttcttctatccattccatggacacaaattcctcagggatgtcttccttaatcaaccccctctcctcccctccgtcctgcaacaacaaccccaaaatccacaagcgctctgtctcggtgacgtccattacctcgactgtgctgcctcctgtttacaaccaacagaatgaagacacctgcataatccgcatcagtgtggaagacaataacggcaacatgtacaagagcatcatgttgacgagccaggataaaacccccgctgtgatccagagagccatgctgaagcacaatctggactcagaccccgccgaggagtacgagctggtgcaggtcatctcggaggacaaagaacttgtgattccagactcagcaaatgtcttttatgccatgaacagccaagtgaactttgacttcattttgcgcaaaaagaactccatggaagaacaagtgaaactgcgtagccggaccagcttgacgttgcccaggacagctaaacggggctgctggagtaacagacacagcaaaatcaccctctgaagggagggaccagtggccccttgtttgccaaaggcagagtggggctgagaaacaggctgcggtgattgcaattaccatccggtgttcgaggatcattggtgaagtcagcagatatttattgagttcctgtggtgtgcaaagcattatgataggcaccgtggggaaactggaaatgaatttgacatgaaaaggatgaacgattcactgattctctttgactcatttgagactaaaatgcagaattaccaacatttaaaacatatatatgcacatgtatttggtatgcatgtgtatctatataaaaatatataagagggactttatgggatagtatggactatggaaaaacaaatttgcacaatggcctgggaagttgaggtcactttttacagggaaatagaagaaactgagaacctagtctcgtatattctgagtaaatggaatcagtcctgggaatagagagtgtcctttgtgccagtattacaagaagcccaaactttatttttataaagggagaggatgactttctcaatcaagtgccaccagataaaaacaactgcagaggctggaactgccacaggctgtatgaaaggccactttggaaagggtttggatgagctggtggccttcaacctctgcctgcatctgccactttctgctaccctagggaggccaggaggagcttcggaggaccatcgccccactggtctagccatcatgacacctctggaggtgtcaagctcctgaaacaagctcatttcagtttctggcaaccccgtgtatttccgttttccccctaaagaacatatcataatcattgcacaaataaccatgttctttggtaatgaagccagaaaagaaagcgcaaaagaatggtgactcatttggactcttatctgtcttggaatgtcactgcttcattgccttctctgattgccttttgcatgtaaaactatgtgtctggagtcttttgccatctggatcttagtacctctttattatgtgcaatttattcctcaggtgtggaaatttctactgcaattgactacgtttgattattttgagcttgtgaaagatttctgaacagtgattgtcccgttaatagcccctcagaagatgttccctgctgataacagcatcctattttacttacttttatagcattactgtgcctagtcgtggggaaagagatggggctgtatagattatctgaatcatttgtctaagaggtacattcttccagatggaatcaataacttttttttttccaggttcccgtgcttgctatcacagtatcattgttaagtgacacttttgtctctcataacaccatcacactcttccttccaagtctgagctgtgctggggtttgaactaaaagccatatgtggaatattgacatgtgtaagaagcactttcagaatgttgtcctttttaagaaatgattctcaaaataccagtttttattccaaaaatttagagaacaaacccggaatatgaagtgcagattgtaacatggagctatttttttttcttaatcccataatacagctcctaaaagttgtgtgggatttgcgttgcataaatagccatgtgaattccacaagaagcaccagggaaagtttagagatttgcggcaatggaccgaagaacgggccaggaagtcctccaatttcctttggtctttccaggagattggactacacattgtaaagactgactgggtttcaactagtcaaaaagcactttcttctgttttcaatccctgttcgatttgtgcttctgtgcttgtaggagagatggccagggtggcagccctcatgcaggttgaagtatatgtagcctcagcctgatattcttggtgcgaaggtaaaaaaaaaaaaataaataaaaccattggcctggttgagggcgtgaccaccaagacatatatgttgtgcccgtgttcatcctgtgtatttatactgtatatgtagagtctagatttatatactgcaatgtaaaatatatatatatttaccttttttaaagacaatggaaattccaagtagctaaaacttagcttcatttatttaatgccactttaaatgtcttaaatttgtttcctggtggacagccgggtaatgcttttagctgctcgcatgcttgtctttctgcatctccatcatctgtttaccttttggttaaactaataaactagtttgggacttggctggcatgtgctgccagacccaaaggg

SEQ ID NO: 25416 - DNA, 3203 bp, Homo sapiens
  source 1..3203: mol_type = unassigned DNA
agattggcggggatgggcagcagcggcaggtggccttggcttttgctgcagccgtcaacgacctatcatcggggtcctgcgtaaggtccggctggctgggacttggctgtgggtgggatggactggctgccggaccgagtgccctgcagttggtaggagtatgaggcagagtgatgcacacccgggcgcccagcatcgttctaattgccggagacattgcctcagactgtgcgctgctagaggctgcgttcctgagcaggaagcccgtttcctgggattggaactacccttcttggccagcgggaagtccccaaggacggagtcgaaaggtcaaatcttatctgtcagtgctgtgtgacagcatcgcaacgggatctgcagaacctgaactcgtgtgcagtttcctcaagggcagagattttgtccatcttgtccactactatatgccaagtgtttggaacagtttgcacggaggaatggttcctgaatgaattgaatgcatgatccgtaatgcctcctgcctgcctctttcaagatggaggtgaaacctgtgggagaacctactcaagaggtgtctaaattcaaactttccaccaaggtagaaagcacgggacactggctggtggaagatcatgttcgaatatgggaagttttaaagacagaggaggttgaaggggaccagctgcctccaggacacacagtcagtcaatatgaaacctgtaagatcaggaccataaaagctggcaccttggagaagcttgtggagaacctgctgacagcttttggggacaatgactttacctatatcagcatctttctttcaacgtacagaggctttgcctccactaaagaagtgctggaactactgctggacaggtatggaaacctgacaagcccaaactgtgaagaagatggaagccaaagttcatcagagtccaaaatggtgatcaggaatgcaatcgcttccatactaagggcctggcttgaccagtgtgcagaagacttccgagagccccctcacttcccttgcttacagaaactgctggattatctcacacggatgatgccgggctctgacccagaaagaagagcacaaaatcttcttgagcagtttcagaagcaagaagtggaaactgacaatgggcttcccaacacgatctccttcagcctggaagaggaagaggaactggagggtggagagtcagcagaattcacgtgcttctcagaagatctcgtggcagagcagctgacctacatggatgcacaactcttcaagaaagtagtgcctcaccactgcctgggctgcatttggtctcgaagggataagaaggaaaacaaacatttggctcctacgatccgtgccaccatctctcagtttaataccctcaccaaatgtgttgtcagcaccatcctggggggcaaagaactcaaaactcagcagagagccaaaatcattgagaagtggatcaacatcgctcatgaatgtagactcctgaagaatttttcctccttgagggccatcgtttcggcactgcagtctaattccatctatcggttaaaaaagacttgggctgccgtcccaagggaccgaatgctgatgtttgaagaactttcagatatcttctcagaccataataaccatttgaccagccgagaactactgatgaaggaaggaacctcaaaatttgcaaacctggacagcagtgtgaaagaaaaccagaagcgtacccagaggcggctgcagctccagaaggacatgggtgtgatgcagggaactgtgccctacctgggcaccttcctgactgacctgaccatgcttgacactgcccttcaggactacatcgagggtggactgataaactttgagaaaaggagaagggaatttgaagtgattgcccagataaagctcttacagtctgcctgcaacagctattgcatgaccccagaccaaaagttcatccagtggttccagaggcagcagctcctgacagaggaggagagctatgccctgtcatgtgagattgaagcagctgctgacgccagcaccacctcgcccaagcctcggaagagcatggtgaagagactcagcctactgtttctagggtctgacatgatcaccagtcccactcccaccaaagagcagcccaagtccactgccagcgggagctctggtgaaagcatggactctgtcagcgtgtcatcctgcgagtcgaaccactcagaggctgaggagggctccattactcccatggacacccctgatgagcctcaaaaaaagctctctgagtcctcctcatcctgttcttctatccattccatggacacaaattcctcagggatgtcttccttaatcaaccccctctcctcccctccgtcctgcaacaacaaccccaaaatccacaagcgctctgtctcggtgacgtccattacctcgactgtgctgcctcctgtttacaaccaacagaatgaagacacctgcataatccgcatcagtgtggaagacaataacggcaacatgtacaagagcatcatgttgacgagccaggataaaacccccgctgtgatccagagagccatgctgaagcacaatctggactcagaccccgccgaggagtacgagctggtgcaggtcatctcggaggacaaagaacttgtgattccagactcagcaaatgtcttttatgccatgaacagccaagtgaactttgacttcattttgcgcaaaaagaactccatggaagaacaagtgaaactgcgtagccggaccagcttgacgttgcccaggacagctaaacggggctgctggagtaacagacacagcaaaatcaccctctgaagggagggaccagtggccccttgtttgccaaaggcagagtggggctgagaaacaggctgcggtgattgcaattaccatccggtgttcgaggatcattggtgaagtcagcagatatttattgagttcctgtggtgtgcaaagcattatgataggcaccgtggggaaactggaaatgaatttgacatgaaaaggatgaacgattcactgattctctttgactcatttgagactaaaatgcagaattaccaacatttaaaacatatatatgcacatgtatttggtatgcatgtgtatctatataaaaatatataagagggactttatgggatagtatggactatggaaaaacaaatttgcacaatggcct

SEQ ID NO: 25417 - DNA, 2688 bp, Homo sapiens
  source 1..2688: mol_type = unassigned DNA
agcgcggcgcgtgtctgtgcgctgcggtcgctcgggaccgggaccggggcgaggcgccgcggggctgagcccagcagacattgcgttggcctccgagcagggcgcatcatgcagcgttcgcgcaccggagagaaaactgagaatgaaattgctttggcaagctaaaatgagctcgattcaggactggggtgaagaggtagaggaaggagctgtttaccatgtcaccctcaaaagagtccagattcaacaggctgccaataaaggagcaagatggctaggggttgaaggggaccagctgcctccaggacacacagtcagtcaatatgaaacctgtaagatcaggaccataaaagctggcaccttggagaagcttgtggagaacctgctgacagcttttggggacaatgactttacctatatcagcatctttctttcaacgtacagaggctttgcctccactaaagaagtgctggaactactgctggacaggtatggaaacctgacaagcccaaactgtgaagaagatggaagccaaagttcatcagagtccaaaatggtgatcaggaatgcaatcgcttccatactaagggcctggcttgaccagtgtgcagaagacttccgagagccccctcacttcccttgcttacagaaactgctggattatctcacacggatgatgccgggctctgacccagaaagaagagcacaaaatcttcttgagcagtttcagaagcaagaagtggaaactgacaatgggcttcccaacacgatctccttcagcctggaagaggaagaggaactggagggtggagagtcagcagaattcacgtgcttctcagaagatctcgtggcagagcagctgacctacatggatgcacaactcttcaagaaagtagtgcctcaccactgcctgggctgcatttggtctcgaagggataagaaggaaaacaaacatttggctcctacgatccgtgccaccatctctcagtttaataccctcaccaaatgtgttgtcagcaccatcctggggggcaaagaactcaaaactcagcagagagccaaaatcattgagaagtggatcaacatcgctcatgaatgtagactcctgaagaatttttcctccttgagggccatcgtttcggcactgcagtctaattccatctatcggttaaaaaagacttgggctgccgtcccaagggaccgaatgctgatgtttgaagaactttcagatatcttctcagaccataataaccatttgaccagccgagaactactgatgaaggaaggaacctcaaaatttgcaaacctggacagcagtgtgaaagaaaaccagaagcgtacccagaggcggctgcagctccagaaggacatgggtggactgataaactttgagaaaaggagaagggaatttgaagtgattgcccagataaagctcttacagtctgcctgcaacagctattgcatgaccccagaccaaaagttcatccagtggttccagaggcagcagctcctgacagaggaggagagctatgccctgtcatgtgagattgaagcagctgctgacgccagcaccacctcgcccaagcctcggaagagcatggtgaagagactcagcctactgtttctagggtctgacatgatcaccagtcccactcccaccaaagagcagcccaagtccactgccagcgggagctctggtgaaagcatggactctgtcagcgtgtcatcctgcgagtcgaaccactcagaggctgaggagggctccattactcccatggacacccctgatgagcctcaaaaaaagctctctgagtcctcctcatcctgttcttctatccattccatggacacaaattcctcagggatgtcttccttaatcaaccccctctcctcccctccgtcctgcaacaacaaccccaaaatccacaagcgctctgtctcggtgacgtccattacctcgactgtgctgcctcctgtttacaaccaacagaatgaagacacctgcataatccgcatcagtgtggaagacaataacggcaacatgtacaagagcatcatgttgacgagccaggataaaacccccgctgtgatccagagagccatgctgaagcacaatctggactcagaccccgccgaggagtacgagctggtgcaggtcatctcggaggacaaagaacttgtgattccagactcagcaaatgtcttttatgccatgaacagccaagtgaactttgacttcattttgcgcaaaaagaactccatggaagaacaagtgaaactgcgtagccggaccagcttgacgttgcccaggacagctaaacggggctgctggagtaacagacacagcaaaatcaccctctgaagggagggaccagtggccccttgtttgccaaaggcagagtggggctgagaaacaggctgcggtgattgcaattaccatccggtgttcgaggatcattggtgaagtcagcagatatttattgagttcctgtggtgtgcaaagcattatgataggcaccgtggggaaactggaaatgaatttgacatgaaaaggatgaacgattcactgattctctttgactcatttgagactaaaatgcagaattaccaacatttaaaacatatatatgcacatgtatttggtatgcatgtgtatctatataaaaatatataagagggactttatgg

SEQ ID NO: 25418 - DNA, 1721 bp, Homo sapiens
  source 1..1721: mol_type = unassigned DNA
taggagtatgaggcagagtgatgcacacccgggcgcccagcatcgttctaattgccggagacattgcctcagactgtgcgctgctagaggctgcgttcctgagcaggaagcccgtttcctgggattggaactacccttcttggccagcgggaagtccccaaggacggagtcgaaaggtcaaatcttatctgtcagtgctgtgtgacagcatcgcaacgggatctgcagaacctgaactcgatccgtaatgcctcctgcctgcctctttcaagatggaggtgaaacctgtgggagaacctactcaagaggtgtctaaattcaaactttccaccaaggtagaaagcacgggacactggctggtggaagatcatgttcgaatatgggaagttttaaagacagaggagatgggcttcccaacacgatctccttcagcctggaagaggaagaggaactggagggtggagagtcagcagaattcacgtgcttctcagaagatctcgtggcagagcagctgacctacatggatgcacaactcttcaagaaagtagtgcctcaccactgcctgggctgcatttggtctcgaagggataagaaggaaaacaaacatttggctcctacgatccgtgccaccatctctcagtttaataccctcaccaaatgtgttgtcagcaccatcctggggggcaaagaactcaaaactcagcagagagccaaaatcattgagaagtggatcaacatcgctcatgaatgtagactcctgaagaatttttcctccttgagggccatcgtttcggcactgcagtctaattccatctatcggttaaaaaagacttgggctgccgtcccaagggaccgaatgctgatgtttgaagaactttcagatatcttctcagaccataataaccatttgaccagccgagaactactgatgaaggaaggaacctcaaaatttgcaaacctggacagcagtgtgaaagaaaaccagaagcgtacccagaggcggctgcagctccagaaggacatgggtgtgatgcagggaactgtgccctacctgggcaccttcctgactgacctgaccatgcttgacactgcccttcaggactacatcgagggtggactgataaactttgagaaaaggagaagggaatttgaagtgattgcccagataaagctcttacagtctgcctgcaacagctattgcatgaccccagaccaaaagttcatccagtggttccagaggcagcagctcctgacagaggaggagagctatgccctgtcatgtgagattgaagcagctgctgacgccagcaccacctcgcccaagcctcggaagagcatggtgaagagactcagcctactgtttctagggtctgacatgatcaccagtcccactcccaccaaagagcagcccaagtccactgccagcgggagctctggtgaaagcatggactctgtcagcgtgtcatcctgcgagtcgaaccactcagaggctgaggagggctccattactcccatggacacccctgatgagcctcaaaaaaaagctctctgagtcctcctcatcctgttcttctatccattccatggacacaaattcctcagggatgtcttccttaatcaaccccctctcctcccctccgtcctgcaacaacaaccccaaaatccacaagcgctctgtctcggtgacgtccattacctcgactgtgctgcctcctgtttac

SEQ ID NO: 25419 - DNA, 2885 bp, Homo sapiens
  source 1..2885: mol_type = unassigned DNA
taaacccatctcctcctatgccacctgcctgggcccctcctgggactttatcactgtgccacactttttggaactactggttagaaggtgagtgtccatccccctccaagacacagaggtgcctctgtcccctactggctctgtcttgaagatgcacctctcggagcctcggttggctcctctggaacagggagtagtgagaagacgaacctcacagggttcttgtagggactcaatgatctaagacacagcaaacaaaggggtccctagagcctaaaactctggaaaatctgctgggggtgctgtgattcatgtttgttacttttctcttccccctcacttgaagcagctctcagcattctgcctcaatggcctgtatcactcactgtttggaaaaacacatagaaaccaagtctgcgatggcactggtaaaggatgtctgagattccttctggctggtctttctccttgacacagacagaagaggggtcccttggtgctgaaaaaggagccacaggcccactcagacatctggagaggctcactggggttctccaaaggttggggttcactcattcaacacatacattcaaaacacctcatttgtgcatcgctcttcttggggcttggcataatttcataaacaaagcagatgacaatcccccggccttgattctactcagagtcaggcactcacagtagacagaataaacaagtcatatctacagaatgttacaggtgagaccctcatggcctcctctacgtatggtggcatcctcccagattctgactagaatgacgcagcccagcaacaaatataaactgggtggatttagggttctgaagggccttttcacccacaaaacatgggggaaaatatgtggactctggctggggagagactaaaggagctctggggctcatacttcttataattcccacgagaaggctgacatctggggacttcccccacaagaggcaaatagtgagttctgtaaatggagacttaggtcccctgcaaagcagaggggaggctggggtcacagctggccactgagagacccatccccctcagcaccgtggcttcccagctctccctgtcctcctccccccgacatctgccccttccctcctaaccccaggaccaggggacccagatctggagctttgatgaggaagctgctcacaaatctgcctgcagctgcagtcttgagtgcccaggtgtacagtgctgtgctccagggcctttgggaagagaatgtctgtgggacgccagggcgcacgagggtctgtacagccctgctgtatggccaggtctgccccttccaggacagcactgatggcttacgcaccatcacctccattttgttcaactggccccccgaaaacacttcagtttactatcagcccccgcaacggtcatctttccggataaagctggccttcaggaacctctcctggcctggactgggcttggaggaccatcaggaaattgtcctaggccagttggtgcttccggagcccaacgaggccaagccagatgatcctgctccacgtcctgggcaacacgcattaacaatgccggccctggagccagcaccaccactgctggcggacctggggcctgctctggagccagagtcacctgcagccctgggtccaccaggatatctacattcagcaccagggccagcaccagcaccaggggaagggccccctccagggacagtgctggagccacagtcagccccagagtcctcctgtccctgtcgtgggtctgtaaagaaccaacccagtgaggagctgcctgacatgacgaccttccctcccaggctgctggcagagcagctgaccctcatggatgcggagctgttcaagaaggtggtgctccacgaatgcttgggctgcatctggggccaaggacatctgaaggggaatgagcacatggcacccacagttcgtgccaccatcgcacacttcaacaggctcaccaactgcatcaccacctcctgcctcggggaccacagcatgagggcccgggacagggccagggtggtggagcactggatcaaggtggccagggagtgcctaagcctcaacaacttctcctcggtgcacgtcatcgtctctgctctgtgcagcaacccaataggtcagctacacaagacgtgggcaggagtgtccagcaaaagcatgaaagagctaaaagaactctgcaaaaaagacactgcagtgaagagggacctactgatcaaggcggggagctttaaggtggccacccaggagaggaacccccagagagtccagatgaggctgcggaggcagaagaagggtgtggtccccttcctgggggattttctgactgagttacagaggctggattcggccatcccggacgacctggatggcaacaccaacaagaggagcaaggaggtccgagttctgcaggaaatgcagctgctccaagtggctgccatgaattacaggcttcggcctcttgagaaatttgtcacctatttcacaagaatggagcagctcagtgacaaagagagctacaagctgtcctgccagctggagcccgaaaacccgtaggctggcaacatcctgcagtggctgggaacccaccgggatgctggccagaacaccggctctgcaccatccctcacccagaccgtagacaccagggaaccacatctaggaggctggcagctcagctgcatcttgccctggatcctcatcaccaactgctcctgctggccaggatcaggccatgggacttttgtgagtcaggcgggagaccattttatgtttattttctttagtgtataagtaagggttttttcttaactttcgttaaaataaaattttaaaaaactattcaaaat

SEQ ID NO: 25420 - DNA, 2959 bp, Homo sapiens
  source 1..2959: mol_type = unassigned DNA
taaacccatctcctcctatgccacctgcctgggcccctcctgggactttatcactgtgccacactttttggaactactggttagaaggtgagtgtccatccccctccaagacacagaggtgcctctgtcccctactggctctgtcttgaagatgcacctctcggagcctcggttggctcctctggaacagggagtagtgagaagacgaacctcacagggttcttgtagggactcaatgatctaagacacagcaaacaaaggggtccctagagcctaaaactctggaaaatctgctgggggtgctgtgattcatgtttgttacttttctcttccccctcacttgaagcagctctcagcattctgcctcaatggcctgtatcactcactgtttggaaaaacacatagaaaccaagtctgcgatggcactggtaaaggatgtctgagattccttctggctggtctttctccttgacacagacagaagaggggtcccttggtgctgaaaaaggagccacaggcccactcagacatctggagaggctcactggggttctccaaaggttggggttcactcattcaacacatacattcaaaacacctcatttgtgcatcgctcttcttggggcttggcataatttcataaacaaagcagatgacaatcccccggccttgattctactcagagtcaggcactcacagtagacagaataaacaagtcatatctacagaatgttacaggtgagaccctcatggcctcctctacgtatggtggcatcctcccagattctgactagaatgacgcagcccagcaacaaatataaactgggtggatttagggttctgaagggccttttcacccacaaaacatgggggaaaatatgtggactctggctggggagagactaaaggagctctggggctcatacttcttataattcccacgagaaggctgacatctggggacttcccccacaagaggcaaatagtgagttctgtaaatggagacttaggtcccctgcaaagcagaggggaggctggggtcacagctggccactgagagacccatccccctcagcaccgtggcttcccagctctccctgtcctcctccccccgacatctgccccttccctcctaaccccaggaccaggggacccagatctggagctttgatgaggaagctgctcacaaatctgcctgcagctgcagtcttgagtgcccaggtgtacagtgctgtgctccagggcctttgggaagagaatgtctgtgggacgccagggcgcacgagggtctgtacagccctgctgtatggccaggtctgccccttccaggacagcactgatggcttacgcaccatcacctccattttgttcaactggccccccgaaaacacttcagtttactatcagcccccgcaacggtcatctttccggataaagctggccttcaggaacctctcctggcctggactgggcttggaggaccatcaggaaattgtcctaggccagttggtgcttccggagcccaacgaggccaagccagatgatcctgctccacgtcctgggcaacacgcattaacaatgccggccctggagccagcaccaccactgctggcggacctggggcctgctctggagccagagtcacctgcagccctgggtccaccaggatatctacattcagcaccagggccagcaccagcaccaggggaagggccccctccagggacagtgctggagccacagtcagccccagagtcctcctgtccctgtcgtgggtctgtaaagaaccaacccagtgaggagctgcctgacatgacgaccttccctcccaggctgctggcagagcagctgaccctcatggatgcggagctgttcaagaaggtggtgctccacgaatgcttgggctgcatctggggccaaggacatctgaaggggaatgagcacatggcacccacagttcgtgccaccatcgcacacttcaacaggctcaccaactgcatcaccacctcctgcctcggggaccacagcatgagggcccgggacagggccagggtggtggagcactggatcaaggtggccagggagtgcctaagcctcaacaacttctcctcggtgcacgtcatcgtctctgctctgtgcagcaacccaataggtcagctacacaagacgtgggcaggagtgtccagcaaaagcatgaaagagctaaaagaactctgcaaaaaagacactgcagtgaagagggacctactgatcaaggcggggagctttaaggtggccacccaggagaggaacccccagagagtccagatgaggctgcggaggcagaagaagggtgtggtccccttcctgggggattttctgactgagttacagaggctggattcggccatcccggacgacctggatggcaacaccaacaagaggagcaaggaggtccgagttctgcaggaaatgcagctgctccaagtggctgccatgaattacaggcttcggcctcttgagaaatttgtcacctatttcacaagaatggagcagctcagtgacaaagagagatggggtttcacgatgatgtccaggatcgtctcaaactcctggcctcaagcaatccacccacctcagcctcccaaagtactgacgttacagctacaagctgtcctgccagctggagcccgaaaacccgtaggctggcaacatcctgcagtggctgggaacccaccgggatgctggccagaacaccggctctgcaccatccctcacccagaccgtagacaccagggaaccacatctaggaggctggcagctcagctgcatcttgccctggatcctcatcaccaactgctcctgctggccaggatcaggccatgggacttttgtgagtcaggcgggagaccattttatgtttattttctttagtgtataagtaagggttttttcttaactttcgttaaaataaaatttt

SEQ ID NO: 25421 - DNA, 4368 bp, Homo sapiens
  source 1..4368: mol_type = unassigned DNA
agtctggtttaactggttggaacgactaaagcacgctggcgcaaggaaagctctcaacttcgggagctgaggcgcaggctggccagagcgtggagaggaaagccctttccatcctcaaggccgttgcaggagatgcccgcgagccaccttcgccagcaccacaccggggtgtaatggataggtaacagagaagacctcgtcccttcctagtcagggcatcagcatgactgagtgcttcctgccccccaccagcagccccagtgaacaccgcagggtggagcatggcagcgggcttacccggacccccagctctgaagagatcagccctactaagtttcctggattgtaccgcactggcgagccctcacctccccatgacatcctccatgagcctcctgatgtagtgtctgatgatgagaaagatcatgggaagaaaaaagggaaatttaagaaaaaggaaaagaggactgaaggctatgcagcctttcaggaagatagctctggagatgaggcagaaagtccttctaaaatgaagaggtccaagggaatccatgttttcaagaagcccagcttttctaaaaagaaggaaaaggattttaaaataaaagagaaacccaaagaagaaaagcataaagaagaaaagcacaaagaagaaaaacataaagagaagaagtcaaaagacttgacagcagctgatgttgttaaacagtggaaggaaaagaagaaaaagaaaaagccaattcaggagccagaggtgcctcagattgatgttccaaatctcaaacccatttttggaattcctttggctgatgcagtagagaggaccatgatgtatgatggcattcggctgccagccgttttccgtgaatgtatagattacgtagagaagtatggcatgaagtgtgaaggcatctacagagtatcaggaattaaatcaaaggtggatgagctaaaagcagcctatgaccgggaggagtctacaaacttggaagactatgagcctaacactgtagccagtttgctgaagcagtatttgcgagaccttccagagaatttgcttaccaaagagcttatgcccagatttgaagaggcttgtgggaggaccacggagactgagaaagtgcaggaattccagcgtttactcaaagaactgccagaatgtaactatcttctgatttcttggctcattgtgcacatggaccatgtcattgcaaaggaactggaaacaaaaatgaatatacagaacatttctatagtgctcagcccaactgtgcagatcagcaatcgagtcctgtatgtgtttttcacacatgtgcaagaactctttggaaatgtggtactaaagcaagtgatgaaacctctgcgatggtctaacatggccacgatgcccacgctgccagagacccaggcgggcatcaaggaggagatcaggagacaggagtttcttttgaattgtttacatcgagatctgcagggtgggataaaggatttgtctaaagaagaaagattatgggaagtacaaagaattttgacagccctcaaaagaaaactgagagaagctaaaagacaggagtgtgaaaccaagattgcacaagagatagccagtctttcaaaagaggatgtttccaaagaagagatgaatgaaaatgaagaagttataaatattctccttgctcaggagaatgagatcctgactgaacaggaggagctcctggccatggagcagtttctgcgccggcagattgcctcagaaaaagaagagattgaacgcctcagagctgagattgctgaaattcagagtcgccagcagcacggccgaagtgagactgaggagtactcctccgagagcgagagcgagagtgaggatgaggaggagctgcagatcattctggaagacttacagagacagaacgaagagctggaaataaagaacaatcatttgaatcaagcaattcatgaggagcgcgaggccatcatcgagctgcgcgtgcagctgcggctgctccagatgcagcgagccaaggccgagcagcaggcgcaggaggacgaggagcctgagtggcgcgggggtgccgtccagccgcccagagacggcgtccttgagccaaaagcagctaaagagcagccaaaggcaggcaaggagccggcaaagccatcgcccagcagggataggaaggagacgtccatctgagcagcctgcgtggccgtctggagtccgtgagactgaaaggacccgtgcatcttactgtaacccgggggccaggccggctctctcgctgtacattctgtaaaggtgtcttctcttctcagactcttcctctgtcacacgtctgactccttcacgtcaggctcaggttccatgggaggacgaagcagtggacgcattgtgggctttagggacagatgagttttccagatagtgtcagcttatttgaagattaattttctttgttaacttaaaataactattttaacccttgagtggcttctttttaaaccaaaaaccgtctttctttgcttttttatcacagcagaatcaggatctctttctcattcaaggggggaaccaccccaggtcagcgctgcgcctgctgtggccgccgcgagccacgccctctgggatctctggtaccgtcactcttgcttgtgccttccacaccttctcggtgcagatccctatgggggagctgcctcacgttctctgactggtcagagcagcgcctggtgggtgttccctggcccactctcctctctccttctgcagttctaaaccacagtctataagcccgagtcaccaggacggcctgtctggccacagacaggggctgcctgtggagcctgcccaccggcccccggcagtgcagtccagcggggaggaggctgcccgttcctgccagttcctcactgcggggaccagcaaaggccttctcactgggttggtcaaaggtagtcaccttggcctggtgcatccacagaggatgttgttcaaaccagaaatcttttaaacgactgaccttccttaaaaacagaatgactccgattgcttgcttgggctagaatgtacacgtctccttgcctgaataagccatatatatgctcttaaacaaaagtttgaaattatccatatcatctcagtgaacctactggtggactcccaattgacaagattgagcaatagaaaaaaattcctttcctttgaatgatagctgtgattcaccccaccccattttcttgtttctggtccatccgatgagacggatgctctgatgctctgaggcttctgggaggctgggccctggaggcaacgtgctgcaggcgcactctgtcagagtgaacagcaccgcgagacaggccaggctcgtggctcggaagacaaaccccacacacactcaaggggtcgaaaacaaaccccacacgagggctctcacctccttctcctaggtagtatttattttcagcacctgtttgatgcagtttttaatcctctacctattgcactgttgtgactcgttggccattatttgatttttgtacgaaaaaaagctttgttatagaaatcagcatactatttttttaaatctggagagaagatattctggtgactgaaagtatggtcgggtgtcagatataaatgtgcaaatgccttcttgctgtcctgtcggtctcagtacgttcactttatagctgctggcaatatcgaaggttccttttttgtttgtgtaaactctaatttctatcaaggtgtcatggatttttaaaattagtatttcattacaaatgtctcagcattggttaactaatttttgccaggaccattattgatcaagcaaataaattcaacagccatttgggaaaaagaaaagcttctagtttttttgtacacattctttctgtgaggagattgagtactctgcagctggcgaggagttggttgaggcacttcttcaaggccaagggggaacacagtgttttgtttccagctcactttgtacccctcacctctgcagacacggggagaaccccggacccctggcatgcatgctggcggcggcatgcctcccttccacaagcccatgctgctgcagagggagcctgtgtttgcaaaacccagtggactgggctgggtctgctgtctgagcagctcctggctccggtgggaactgcacacaagtccactggcctggcttggccccaggcattgcaattgacagacatttgcatttcatacggtaaatgaggactcagcacagccaaccataatcagcatgtctgggatagactggtctagaataaaaatgaagtttccattgctttgtttgctttaaaaattccacaattaaaatatctgtcattgaaagcttagacaaa

SEQ ID NO: 25422 - DNA, 4353 bp, Homo sapiens
  source 1..4353: mol_type = unassigned DNA
atcattgtaaacaggcagaggctgggcggggtgggaatggggcgcccgaggccggcctggggcgcagcgcaggaggcggctccggtggctgcggcggcagcgtgagcgcgaggaggcggaggctgcggcggggcggacggtcgcgcggcggcaggcacaggtgtaatggataggtaacagagaagacctcgtcccttcctagtcagggcatcagcatgactgagtgcttcctgccccccaccagcagccccagtgaacaccgcagggtggagcatggcagcgggcttacccggacccccagctctgaagagatcagccctactaagtttcctggattgtaccgcactggcgagccctcacctccccatgacatcctccatgagcctcctgatgtagtgtctgatgatgagaaagatcatgggaagaaaaaagggaaatttaagaaaaaggaaaagaggactgaaggctatgcagcctttcaggaagatagctctggagatgaggcagaaagtccttctaaaatgaagaggtccaagggaatccatgttttcaagaagcccagcttttctaaaaagaaggaaaaggattttaaaataaaagagaaacccaaagaagaaaagcataaagaagaaaagcacaaagaagaaaaacataaagagaagaagtcaaaagacttgacagcagctgatgttgttaaacagtggaaggaaaagaagaaaaagaaaaagccaattcaggagccagaggtgcctcagattgatgttccaaatctcaaacccatttttggaattcctttggctgatgcagtagagaggaccatgatgtatgatggcattcggctgccagccgttttccgtgaatgtatagattacgtagagaagtatggcatgaagtgtgaaggcatctacagagtatcaggaattaaatcaaaggtggatgagctaaaagcagcctatgaccgggaggagtctacaaacttggaagactatgagcctaacactgtagccagtttgctgaagcagtatttgcgagaccttccagagaatttgcttaccaaagagcttatgcccagatttgaagaggcttgtgggaggaccacggagactgagaaagtgcaggaattccagcgtttactcaaagaactgccagaatgtaactatcttctgatttcttggctcattgtgcacatggaccatgtcattgcaaaggaactggaaacaaaaatgaatatacagaacatttctatagtgctcagcccaactgtgcagatcagcaatcgagtcctgtatgtgtttttcacacatgtgcaagaactctttggaaatgtggtactaaagcaagtgatgaaacctctgcgatggtctaacatggccacgatgcccacgctgccagagacccaggcgggcatcaaggaggagatcaggagacaggagtttcttttgaattgtttacatcgagatctgcagggtgggataaaggatttgtctaaagaagaaagattatgggaagtacaaagaattttgacagccctcaaaagaaaactgagagaagctaaaagacaggagtgtgaaaccaagattgcacaagagatagccagtctttcaaaagaggatgtttccaaagaagagatgaatgaaaatgaagaagttataaatattctccttgctcaggagaatgagatcctgactgaacaggaggagctcctggccatggagcagtttctgcgccggcagattgcctcagaaaaagaagagattgaacgcctcagagctgagattgctgaaattcagagtcgccagcagcacggccgaagtgagactgaggagtactcctccgagagcgagagcgagagtgaggatgaggaggagctgcagatcattctggaagacttacagagacagaacgaagagctggaaataaagaacaatcatttgaatcaagcaattcatgaggagcgcgaggccatcatcgagctgcgcgtgcagctgcggctgctccagatgcagcgagccaaggccgagcagcaggcgcaggaggacgaggagcctgagtggcgcgggggtgccgtccagccgcccagagacggcgtccttgagccaaaagcagctaaagagcagccaaaggcaggcaaggagccggcaaagccatcgcccagcagggataggaaggagacgtccatctgagcagcctgcgtggccgtctggagtccgtgagactgaaaggacccgtgcatcttactgtaacccgggggccaggccggctctctcgctgtacattctgtaaaggtgtcttctcttctcagactcttcctctgtcacacgtctgactccttcacgtcaggctcaggttccatgggaggacgaagcagtggacgcattgtgggctttagggacagatgagttttccagatagtgtcagcttatttgaagattaattttctttgttaacttaaaataactattttaacccttgagtggcttctttttaaaccaaaaaccgtctttctttgcttttttatcacagcagaatcaggatctctttctcattcaaggggggaaccaccccaggtcagcgctgcgcctgctgtggccgccgcgagccacgccctctgggatctctggtaccgtcactcttgcttgtgccttccacaccttctcggtgcagatccctatgggggagctgcctcacgttctctgactggtcagagcagcgcctggtgggtgttccctggcccactctcctctctccttctgcagttctaaaccacagtctataagcccgagtcaccaggacggcctgtctggccacagacaggggctgcctgtggagcctgcccaccggcccccggcagtgcagtccagcggggaggaggctgcccgttcctgccagttcctcactgcggggaccagcaaaggccttctcactgggttggtcaaaggtagtcaccttggcctggtgcatccacagaggatgttgttcaaaccagaaatcttttaaacgactgaccttccttaaaaacagaatgactccgattgcttgcttgggctagaatgtacacgtctccttgcctgaataagccatatatatgctcttaaacaaaagtttgaaattatccatatcatctcagtgaacctactggtggactcccaattgacaagattgagcaatagaaaaaaattcctttcctttgaatgatagctgtgattcaccccaccccattttcttgtttctggtccatccgatgagacggatgctctgatgctctgaggcttctgggaggctgggccctggaggcaacgtgctgcaggcgcactctgtcagagtgaacagcaccgcgagacaggccaggctcgtggctcggaagacaaaccccacacacactcaaggggtcgaaaacaaaccccacacgagggctctcacctccttctcctaggtagtatttattttcagcacctgtttgatgcagtttttaatcctctacctattgcactgttgtgactcgttggccattatttgatttttgtacgaaaaaaagctttgttatagaaatcagcatactatttttttaaatctggagagaagatattctggtgactgaaagtatggtcgggtgtcagatataaatgtgcaaatgccttcttgctgtcctgtcggtctcagtacgttcactttatagctgctggcaatatcgaaggttccttttttgtttgtgtaaactctaatttctatcaaggtgtcatggatttttaaaattagtatttcattacaaatgtctcagcattggttaactaatttttgccaggaccattattgatcaagcaaataaattcaacagccatttgggaaaaagaaaagcttctagtttttttgtacacattctttctgtgaggagattgagtactctgcagctggcgaggagttggttgaggcacttcttcaaggccaagggggaacacagtgttttgtttccagctcactttgtacccctcacctctgcagacacggggagaaccccggacccctggcatgcatgctggcggcggcatgcctcccttccacaagcccatgctgctgcagagggagcctgtgtttgcaaaacccagtggactgggctgggtctgctgtctgagcagctcctggctccggtgggaactgcacacaagtccactggcctggcttggccccaggcattgcaattgacagacatttgcatttcatacggtaaatgaggactcagcacagccaaccataatcagcatgtctgggatagactggtctagaataaaaatgaagtttccattgctttgtttgctttaaaaattccacaattaaaatatctgtcattgaaagctt

SEQ ID NO: 25423 - DNA, 1309 bp, Homo sapiens
  source 1..1309: mol_type = unassigned DNA
tgtaatggataggtaacagagaagacctcgtcccttcctagtcagggcatcagcatgactgagtgcttcctgccccccaccagcagccccagtgaacaccgcagggtggagcatggcagcgggcttacccggacccccagctctgaagagatcagccctactaagtttcctggattgtaccgcactggcgagccctcacctccccatgacatcctccatgagcctcctgatgtagtgtctgatgatgagaaagatcatgggaagaaaaaagggaaatttaagaaaaaggaaaagaggactgaaggctatgcagcctttcaggaagatagctctggagatgaggcagaaagtccttctaaaatgaagaggtccaagggaatccatgttttcaagaagcccagcttttctaaaaagaaggaaaaggattttaaaataaaagagaaacccaaagaagaaaagcataaagaagaaaagcacaaagaagaaaaacataaagagaagaagtcaaaagacttgacagcagctgatgttgttaaacagtggaaggaaaagaagaaaaagaaaaagccaattcaggagccagaggtgcctcagattgatgttccaaatctcaaacccatttttggaattcctttggctgatgcagtagagaggaccatgatgtatgatggcattcggctgccagccgttttccgtgaatgtatagattacgtagagaagtatggcatgaagtgtgaaggcatctacagagtatcaggaattaaatcaaaggtggatgagctaaaagcagcctatgaccgggaggagtctacaaacttggaagactatgagcctaacactgtagccagtttgctgaagcagtatttgcgagaccttccagagaatttgcttaccaaagagcttatgcccagatttgaagaggcttgtgggaggaccacggagactgagaaagtgcagtccagcggggaggaggctgcccgttcctgccagttcctcactgcggggaccagcaaaggccttctcactgggttggtcaaaggtagtcaccttggcctggtgcatccacagaggatgttgttcaaaccagaaatcttttaaacgactgaccttccttaaaaacagaatgactccgattgcttgcttgggctagaatgtacacgtctccttgcctgaataagccatatatatgctcttaaacaaaagtttgaaattatccatatcatctcagtgaacctactggtggactcccaattgacaagattgagcaatagaaaaaaattcctttcctttgaatgatagctgtgattca

SEQ ID NO: 25424 - DNA, 7771 bp, Homo sapiens
  source 1..7771: mol_type = unassigned DNA
atggaggcggcagcggcggcggcggcggcggcagcggcagcggcagcggcgggcgggggctgtggctccgggccgccgccgctgctgctgagcgagggcgagcagcagtgctactccgagctcttcgcgcgctgtgccggcgccgcgggcgggggccccgggtctgggccccccgaggccgccagagtcgcccccggcacggccactgcggccgccggccccgtggctgacctgtttcgggcatcgcagctgcccgccgagacgctgcaccagatcacagaactgtgtggtgcaaagcgggttggttattttggtccaacacagttttacattgccctgaaattaattgctgcagcacaatctggcctcccggtacggatagagagtattaaatgtgaattgcctctgcctcgctttatgatgtcaaagaatgatggtgagatacgatttgggaacccagctgagctgcatggaactaaggttcagattccatatttaactacagaaaaaaattccttcaaaagaatggacgatgaggataaacaggaaacacagtctcccacgatgtcacccctcgcctcccctccttcttccccgcctcattaccagagggtgcccttgagccatggctacagcaaactgcggagcagcgcagaacagatgcatccagcaccttatgaagctaggcagccccttgtccagcccgagggatcctcatcagggggcccaggaaccaagccccttcggcatcaggcttcccttatccggtccttttcagtggagagggaactacaggataacagcagttaccccgacgaaccctggaggataacagaagaacagcgcgagtactatgtcaatcagttccgatcccttcagccagacccaagctctttcatttcaggttctgtggccaagaacttcttcaccaaatcaaagctttccattccagaactctcctatatatgggagcttagtgatgctgactgtgatggagccctgaccctgcctgagttctgtgctgcgtttcatctcattgtggctcggaagaacggctacccattgcctgagggcctccctccaactctgcagccagaatacctgcaggcagcttttcctaagcccaaatgggactgtcaattatttgattcttattctgagtcactgccggcaaatcaacaacctcgtgacttgaatcggatggagaagacatctgttaaagacatggctgaccttcctgtccctaaccaggatgtaactagtgatgacaaacaagctttgaaaagtactatcaatgaagccttaccaaaggacgtgtctgaggatccagcaactcccaaggattccaacagtctcaaagcaagaccaagatccagatcttactctagcacctccatagaagaggccatgaaaaggggcgaggaccctcccaccccgccacctcggccacagaaaacccattccagagcctcctccttggatctgaataaagtcttccagcccagtgtgccagctaccaagtcaggattgttacccccaccacctgcgctccctccaagaccttgtccatcacagtctgaacaagtgtcggaggccgagttactcccacagctgagcagagccccatcccaggctgcagaaagtagtccagcaaagaaggatgtactgtattctcagccaccatcaaagcccattcgtaggaaattcagaccagaaaaccaagctacagaaaaccaagagccttccactgctgcaagtgggccagcttctgcggcaaccatgaaaccgcatccaacagtccaaaagcagtcttccaaacagaagaaggccattcaaactgctatccgcaaaaataaagaggcaaacgcagtgctggctcggctgaacagtgagctccagcagcagctcaaggaggttcatcaagaacgaattgcattggaaaaccaattggaacaacttcgtccggtcactgtgttgtgacccccccatggttcaagtgacagtgggtgaccttgtctgccaagatctttcttttgaatgttttgaacccaactacttgtcatagatgtttgactgtgtcaaaagctgtgagcagcaaaatataatccatatgaccttttctcttgcacttcacttgtatgttttactgtggtggaaaaaatacttcaactgattatcacacttgaaatgctaattatcagtggaatttgtctcctattcttaagtacttctgcaaggtattagatgctgctccttaccaaaaatcagtcttctagcaaataaaaataacttagagcattatttatttaaagaatttatgttttctataaaaccttataaccaagaaccttcaggatgcttgtaaccaagtactttcaggatgctttttgtatgtatatcacatagagtaggttggtttcctgagtaattgggattccaactagatagtcattggtgtgaccataataaaaacaaaagctaaaataaaagcatcagatttagactggcgctgtgccctctaccactatatgccaaaaattgcttctctagtgccattttgatattatatctagctataaataatacatgactatcgttttctattgaatgtcaaagacttactgggtctttacacctctgtaaagtggaggttttggcaatgagctgtttaacttggccaagctaggctgtcaacccagacaactcagtcctttcatgtaaatttttgggcaagagaagtctgctttgactgccttgcctgaccaaattaaataaatagttgccagatctctacttttatcctgcatgggataatatatctgtaaatgcatgagtttggaaaccacccatcaaatatgaaaggctgatgagactgttaggattgataaacatttgttgtttgaacccagctatccaaactggggaagaaggggaaatggttgttaccaacaatctctagtagttattttaatctttattttaacctggattgcaaatgtatggggtatgaggagataatgaaagaaaagtggtcctcatgctggatatgtgactgttttgttctctgtaaagtgtattcttgggaagtgattggtttatatcagattcagaggagcccaattaactccagtgtaggtaatgtaaaacagtaagctcaaattgcagaagccagtatcctacagaaatttaagtagctactgcttctcctgaaagcccaagttgaaaatgggaccacaggggcacagggctactgaccctcacagggcatgccagcgttaacaccactttgagagaccaatggcaagaaatgctgtctcttgtgcattttactaatttccccattcttagggtagcagggtgggggtgtatagggtctttttgaagcagttttggataggtttgcaatatgtgggattcagcctttgatttcaatagagctgagagcttttagaacaagcaggcatttatttaatgtttccttagtccattggcaagctttatcaatagcttaatggcagaggataaaggctcaaacagatgatgttttttccacagaaaaacaaattgttgaatctattccgtgcatatttaaggattttgaattgattttgaaaatcatgaaacttgaactatttttctattccctttttttcttccccatttgctgccttttttgtttttgtgggggaagggttgggagtaagtttaaactcttccgaagattatgaatgggtcagcacaaatttttaggcaactgctttttccatgttctgagatctacgggctacaacaaattttatcagcagtgttttttgtttttttgagatggagacttgctctgtcgcccaggctggagcgcagtggcgcaatctcggctcactgcaacctccacctcctgggttcaagcaattcttgtgcctcagcctcccgagtagctgggattacaggcacccaccaccacgctcagctaatttttgtatttttagtagagatgggattttgtcatgttggctaggctagtctcgaattcctgacctcaagtgatccacccgccttggcctctcgaagtgctgggattacaggcgtgagccacccgcccggctatcagcactgttctgattgcagacgtttcacagcatgtttggcttttggtaaattcaatccaggaaagactagcatgtgcactttatctcataatcttccagtacatatgctctcagttgggatagcagttcatttccattaggcagacgtataaactaaggaatgttagtctgcagtattcattttaaaaatattgacatgcttttcccctcccctccatgaagtcagtgccagagtgagccagattgggaggttggggttttgtttggttggcttggttttcattaagggaaaaaacttgcattggacaatcaaattcccctgagtttcataatctcatcaatattttaagataggcgagcacacactaataatatctatgcctaccttcttgggtggactcaactgtaaccacagtttattagttgcttagaagtggatttttaaaaaacagttaaatgtgtgtgcataacacacaagtaatgacacactactattattattacctaagtagtgctcatcctctctttctgtgttttcttaggatgtgcactttaatttaggattgtaacgcctaataatatttctgtgagcctttaatgtgatttataagatggccgaattactgaaatcaccattatacctcttccataaaacgactccaaagttagacctgcctgttggggagaattctatagacagaaggtcaatgttgtccccatccataggggttgaattaccttgctgttaagtggtcttcccccattgggatcctacagtcccacagatgaaagcacagtagtagctgacagctggcttatttggtccctcggcatctctcgtatgtggcatattgcttttgccactttcctatccagcagacatcaaagcaaaactaaaaggtagatatctggaatgaatgtatatgttgtaattgaggcagatatttgccttaattggaaggatctaactgctttacaaatattaaacaagtgcttgggcatgattgggagaggaggcagcttagctggaagctgtgcccatcttactgtcactggagaataggatgtcagagctgggcaggactggtacccatcatttgcagtttgcatgtggggaaaccaaagccctaagaaacaacagttcctggcccaaaaaatccatagaaagaggtaactagtggcagatttggggcgccaacctgattttatggattttgagttagattctctaccctctatcaatactaaaaatagattaggagggtttttttttctgtttatcatgttgaatttcattgacttaattagtctttaaatttgaaaacatgttttagggagtttagttctagaaatttctcttagattgaagtgacagaatctgaaagaaaagaatatgattgagctatttgttttcctgaacacctcaccttttatgatgcaataagttactctgagtttcttggcagagtttttgacagctgttgctttcaatggattccattcctgtattccttatgggaggttgtttttaaaatagactactgcgattgaaatgaactcaatatgtagttaagttatagttttcttcaatgtatttttagttacttgggtcacaaatgttcaatttcagcatattttagggtgagtaatcaaaaatgtgaatttgcctttgatttcctaccactgtctgagctatcataaagcattctctttagttgtgatttgattctatagtctgtttctaaatgacatttgtctgtttcttaaatgatctcacagccatggtaataatagatgtgtactcagaagatcaataaggtaatattggaattcatgtgttttttgcaattaaggcaggcatttgccaatgtcttcttttaagcagtagttggaaacatctcaattacagtgtaacaccttagagctaaaaacatttgttcaacacaaactagaatcacaccttctcactagatatcaccaagggaatgtggttttaaaaataaaaagaaaacaatataacgtatcatggcaaccagagcttcccatattattgacaagtagggatcattaggttctggtttgaacattctgaatgtgaacaaaatgaaatagtagttaagaggtgttttcccactgtgtttaaagagaacactagtaattctggtttttctttctaactgctttactgtttcaagggtattcttttaaaactctgatttcaaaggatcagttgaatttatactttagttatgggtgttttgttactttttttttttttgtatcatgactcagtatggttcaatttcctagtaagaagtggggatttgtgtttttggagtcctcagctcacatgtcttgttcctccttcagcacaagctaggggagatcctaccaacactgataggtcagtcattgatggcaatttgaatgtgggtattactctgtgagccaccctgcttcgcttgtttgtaaggagaaatgcatctggttatgtgaatttcccgagagcagcagacatggagggccagactttaaaagcaacgcaagcagattcgaagagctgttgccctcttctaaaaaaggcttttggaggctgtgttacatgcatgccctaaagcagtcagtctgttagtatgagcaagacatctgaagtacacagttgcttttaggcttgtatagttattttctacacatgccaacacacatgatgataaaggaaccttttctaggaggcattgcagggtttcaatacacaggacatgttctagttacagaagccttgctctgctgtcaacaattgggaaatgctcattttttcatgttttgtgaatactctggtcttgctgtaagctaatgtcatggctgtgggatattagagaagtgggtttatgactctgaagaccagcagacaccagactttaaaagtgcttaaattggaatttggaaactacagtaaagaaaccttcagataccagttccatcctgaagccctctgttgaacaacagggccagatcctaaagctctttcagggagctcttctctggggctggaacagttgattatgcaaccccattgtgtggagattggatcaactgagttgtgttatttttgttttaagtcaccttgtgcgagaacctcaaccgcacctatcttgggaaccgggtatacccttttctttagcactgctatcctttttgtcttcagcacaaataagatgttcaagtgagccagaagcaagaagagccattttagtcttcatagctattggctaagagagataatgagctgatggtctattttaaccttgaaagtaaaaatgtatattttttcactacaagtacattgaacagtaaaaagtgtaacagcaaagtatatatttgatgccttctgtcttttcatgataatgtgctaacaagttgtgttaatattttactcagccagagtctcattcatttgctaagcattgggaacattatgtatattgaccttaaacataggtgtcctatatttggattgtgacttgtagactcaagctaaccttactgcctctttttcacacttgttgaaaagtctgtgaagaacatagttaaagatctccaactttggaaaatatacatgatgtgaaactggggtgctatgttaaaaataaatgtatgataactaa

SEQ ID NO: 25425 - DNA, 7945 bp, Homo sapiens
  source 1..7945: mol_type = unassigned DNA
ccgggaggaagcggccgcgcggcagctgcggggcgtgggggtggtggtggcggcggcggtggtggcggcggcggcggcggcggcagctgaggccgaggaggcggtggctgtggcggacgcagcagcaccccagctagggacagggctccgccgcgcccccttgctggccccatggaggcggcagcggcggcggcggcggcggcagcggcagcggcagcggcgggcgggggctgtggctccgggccgccgccgctgctgctgagcgagggcgagcagcagtgctactccgagctcttcgcgcgctgtgccggcgccgcgggcgggggccccgggtctgggccccccgaggccgccagagtcgcccccggcacggccactgcggccgccggccccgtggctgacctgtttcgggcatcgcagctgcccgccgagacgctgcaccagatcacagaactgtgtggtgcaaagcgggttggttattttggtccaacacagttttacattgccctgaaattaattgctgcagcacaatctggcctcccggtacggatagagagtattaaatgtgaattgcctctgcctcgctttatgatgtcaaagaatgatggtgagatacgatttgggaacccagctgagctgcatggaactaaggttcagattccatatttaactacagaaaaaaattccttcaaaagaatggacgatgaggataaacagcaggaaacacagtctcccacgatgtcacccctcgcctcccctccttcttccccgcctcattaccagagggtgcccttgagccatggctacagcaaactgcggagcagcgcagaacagatgcatccagcaccttatgaagctaggcagccccttgtccagcccgagggatcctcatcagggggcccaggaaccaagccccttcggcatcaggcttcccttatccggtccttttcagtggagagggaactacaggataacagcagttaccccgacgaaccctggaggataacagaagaacagcgcgagtactatgtcaatcagttccgatcccttcagccagacccaagctctttcatttcaggttctgtggccaagaacttcttcaccaaatcaaagctttccattccagaactctcctatatatgggagcttagtgatgctgactgtgatggagccctgaccctgcctgagttctgtgctgcgtttcatctcattgtggctcggaagaacggctacccattgcctgagggcctccctccaactctgcagccagaatacctgcaggcagcttttcctaagcccaaatgggactgtcaattatttgattcttattctgagtcactgccggcaaatcaacaacctcgtgacttgaatcggatggagaagacatctgttaaagacatggctgaccttcctgtccctaaccaggatgtaactagtgatgacaaacaagctttgaaaagtactatcaatgaagccttaccaaaggacgtgtctgaggatccagcaactcccaaggattccaacagtctcaaagcaagaccaagatccagatcttactctagcacctccatagaagaggccatgaaaaggggcgaggaccctcccaccccgccacctcggccacagaaaacccattccagagcctcctccttggatctgaataaagtcttccagcccagtgtgccagctaccaagtcaggattgttacccccaccacctgcgctccctccaagaccttgtccatcacagtctgaacaagtgtcggaggccgagttactcccacagctgagcagagccccatcccaggctgcagaaagtagtccagcaaagaaggatgtactgtattctcagccaccatcaaagcccattcgtaggaaattcagaccagaaaaccaagctacagaaaaccaagagccttccactgctgcaagtgggccagcttctgcggcaaccatgaaaccgcatccaacagtccaaaagcagtcttccaaacagaagaaggccattcaaactgctatccgcaaaaataaagaggcaaacgcagtgctggctcggctgaacagtgagctccagcagcagctcaaggaggttcatcaagaacgaattgcattggaaaaccaattggaacaacttcgtccggtcactgtgttgtgacccccccatggttcaagtgacagtgggtgaccttgtctgccaagatctttcttttgaatgttttgaacccaactacttgtcatagatgtttgactgtgtcaaaagctgtgagcagcaaaatataatccatatgaccttttctcttgcacttcacttgtatgttttactgtggtggaaaaaatacttcaactgattatcacacttgaaatgctaattatcagtggaatttgtctcctattcttaagtacttctgcaaggtattagatgctgctccttaccaaaaatcagtcttctagcaaataaaaataacttagagcattatttatttaaagaatttatgttttctataaaaccttataaccaagaaccttcaggatgcttgtaaccaagtactttcaggatgctttttgtatgtatatcacatagagtaggttggtttcctgagtaattgggattccaactagatagtcattggtgtgaccataataaaaacaaaagctaaaataaaagcatcagatttagactggcgctgtgccctctaccactatatgccaaaaattgcttctctagtgccattttgatattatatctagctataaataatacatgactatcgttttctattgaatgtcaaagacttactgggtctttacacctctgtaaagtggaggttttggcaatgagctgtttaacttggccaagctaggctgtcaacccagacaactcagtcctttcatgtaaatttttgggcaagagaagtctgctttgactgccttgcctgaccaaattaaataaatagttgccagatctctacttttatcctgcatgggataatatatctgtaaatgcatgagtttggaaaccacccatcaaatatgaaaggctgatgagactgttaggattgataaacatttgttgtttgaacccagctatccaaactggggaagaaggggaaatggttgttaccaacaatctctagtagttattttaatctttattttaacctggattgcaaatgtatggggtatgaggagataatgaaagaaaagtggtcctcatgctggatatgtgactgttttgttctctgtaaagtgtattcttgggaagtgattggtttatatcagattcagaggagcccaattaactccagtgtaggtaatgtaaaacagtaagctcaaattgcagaagccagtatcctacagaaatttaagtagctactgcttctcctgaaagcccaagttgaaaatgggaccacaggggcacagggctactgaccctcacagggcatgccagcgttaacaccactttgagagaccaatggcaagaaatgctgtctcttgtgcattttactaatttccccattcttagggtagcagggtgggggtgtatagggtctttttgaagcagttttggataggtttgcaatatgtgggattcagcctttgatttcaatagagctgagagcttttagaacaagcaggcatttatttaatgtttccttagtccattggcaagctttatcaatagcttaatggcagaggataaaggctcaaacagatgatgttttttccacagaaaaacaaattgttgaatctattccgtgcatatttaaggattttgaattgattttgaaaatcatgaaacttgaactatttttctattccctttttttcttccccatttgctgccttttttgtttttgtgggggaagggttgggagtaagtttaaactcttccgaagattatgaatgggtcagcacaaatttttaggcaactgctttttccatgttctgagatctacgggctacaacaaattttatcagcagtgttttttgtttttttgagatggagacttgctctgtcgcccaggctggagcgcagtggcgcaatctcggctcactgcaacctccacctcctgggttcaagcaattcttgtgcctcagcctcccgagtagctgggattacaggcacccaccaccacgctcagctaatttttgtatttttagtagagatgggattttgtcatgttggctaggctagtctcgaattcctgacctcaagtgatccacccgccttggcctctcgaagtgctgggattacaggcgtgagccacccgcccggctatcagcactgttctgattgcagacgtttcacagcatgtttggcttttggtaaattcaatccaggaaagactagcatgtgcactttatctcataatcttccagtacatatgctctcagttgggatagcagttcatttccattaggcagacgtataaactaaggaatgttagtctgcagtattcattttaaaaatattgacatgcttttcccctcccctccatgaagtcagtgccagagtgagccagattgggaggttggggttttgtttggttggcttggttttcattaagggaaaaaacttgcattggacaatcaaattcccctgagtttcataatctcatcaatattttaagataggcgagcacacactaataatatctatgcctaccttcttgggtggactcaactgtaaccacagtttattagttgcttagaagtggatttttaaaaaacagttaaatgtgtgtgcataacacacaagtaatgacacactactattattattacctaagtagtgctcatcctctctttctgtgttttcttaggatgtgcactttaatttaggattgtaacgcctaataatatttctgtgagcctttaatgtgatttataagatggccgaattactgaaatcaccattatacctcttccataaaacgactccaaagttagacctgcctgttggggagaattctatagacagaaggtcaatgttgtccccatccataggggttgaattaccttgctgttaagtggtcttcccccattgggatcctacagtcccacagatgaaagcacagtagtagctgacagctggcttatttggtccctcggcatctctcgtatgtggcatattgcttttgccactttcctatccagcagacatcaaagcaaaactaaaaggtagatatctggaatgaatgtatatgttgtaattgaggcagatatttgccttaattggaaggatctaactgctttacaaatattaaacaagtgcttgggcatgattgggagaggaggcagcttagctggaagctgtgcccatcttactgtcactggagaataggatgtcagagctgggcaggactggtacccatcatttgcagtttgcatgtggggaaaccaaagccctaagaaacaacagttcctggcccaaaaaatccatagaaagaggtaactagtggcagatttggggcgccaacctgattttatggattttgagttagattctctaccctctatcaatactaaaaatagattaggagggtttttttttctgtttatcatgttgaatttcattgacttaattagtctttaaatttgaaaacatgttttagggagtttagttctagaaatttctcttagattgaagtgacagaatctgaaagaaaagaatatgattgagctatttgttttcctgaacacctcaccttttatgatgcaataagttactctgagtttcttggcagagtttttgacagctgttgctttcaatggattccattcctgtattccttatgggaggttgtttttaaaatagactactgcgattgaaatgaactcaatatgtagttaagttatagttttcttcaatgtatttttagttacttgggtcacaaatgttcaatttcagcatattttagggtgagtaatcaaaaatgtgaatttgcctttgatttcctaccactgtctgagctatcataaagcattctctttagttgtgatttgattctatagtctgtttctaaatgacatttgtctgtttcttaaatgatctcacagccatggtaataatagatgtgtactcagaagatcaataaggtaatattggaattcatgtgttttttgcaattaaggcaggcatttgccaatgtcttcttttaagcagtagttggaaacatctcaattacagtgtaacaccttagagctaaaaacatttgttcaacacaaactagaatcacaccttctcactagatatcaccaagggaatgtggttttaaaaataaaaagaaaacaatataacgtatcatggcaaccagagcttcccatattattgacaagtagggatcattaggttctggtttgaacattctgaatgtgaacaaaatgaaatagtagttaagaggtgttttcccactgtgtttaaagagaacactagtaattctggtttttctttctaactgctttactgtttcaagggtattcttttaaaactctgatttcaaaggatcagttgaatttatactttagttatgggtgttttgttactttttttttttttgtatcatgactcagtatggttcaatttcctagtaagaagtggggatttgtgtttttggagtcctcagctcacatgtcttgttcctccttcagcacaagctaggggagatcctaccaacactgataggtcagtcattgatggcaatttgaatgtgggtattactctgtgagccaccctgcttcgcttgtttgtaaggagaaatgcatctggttatgtgaatttcccgagagcagcagacatggagggccagactttaaaagcaacgcaagcagattcgaagagctgttgccctcttctaaaaaaggcttttggaggctgtgttacatgcatgccctaaagcagtcagtctgttagtatgagcaagacatctgaagtacacagttgcttttaggcttgtatagttattttctacacatgccaacacacatgatgataaaggaaccttttctaggaggcattgcagggtttcaatacacaggacatgttctagttacagaagccttgctctgctgtcaacaattgggaaatgctcattttttcatgttttgtgaatactctggtcttgctgtaagctaatgtcatggctgtgggatattagagaagtgggtttatgactctgaagaccagcagacaccagactttaaaagtgcttaaattggaatttggaaactacagtaaagaaaccttcagataccagttccatcctgaagccctctgttgaacaacagggccagatcctaaagctctttcagggagctcttctctggggctggaacagttgattatgcaaccccattgtgtggagattggatcaactgagttgtgttatttttgttttaagtcaccttgtgcgagaacctcaaccgcacctatcttgggaaccgggtatacccttttctttagcactgctatcctttttgtcttcagcacaaataagatgttcaagtgagccagaagcaagaagagccattttagtcttcatagctattggctaagagagataatgagctgatggtctattttaaccttgaaagtaaaaatgtatattttttcactacaagtacattgaacagtaaaaagtgtaacagcaaagtatatatttgatgccttctgtcttttcatgataatgtgctaacaagttgtgttaatattttactcagccagagtctcattcatttgctaagcattgggaacattatgtatattgaccttaaacataggtgtcctatatttggattgtgacttgtagactcaagctaaccttactgcctctttttcacacttgttgaaaagtctgtgaagaacatagttaaagatctccaactttggaaaatatacatgatgtgaaactggggtgctatgttaaaaataaatgtatgataactaa

SEQ ID NO: 25426 - DNA, 1995 bp, Homo sapiens
  source 1..1995: mol_type = unassigned DNA
ccgggaggaagcggccgcgcggcagctgcggggcgtgggggtggtggtggcggcggcggtggtggcggcggcggcggcggcggcagctgaggccgaggaggcggtggctgtggcggacgcagcagcaccccagctagggacagggctccgccgcgcccccttgctggccccatggaggcggcagcggcggcggcggcggcggcagcggcagcggcagcggcgggcgggggctgtggctccgggccgccgccgctgctgctgagcgagggcgagcagcagtgctactccgagctcttcgcgcgctgtgccggcgccgcgggcgggggccccgggtctgggccccccgaggccgccagagtcgcccccggcacggccactgcggccgccggccccgtggctgacctgtttcgggcatcgcagctgcccgccgagacgctgcaccagatcacagaactgtgtggtgcaaagcgggttggttattttggtccaacacagttttacattgccctgaaattaattgctgcagcacaatctggcctcccggtacggatagagagtattaaatgtgaattgcctctgcctcgctttatgatgtcaaagaatgatggtgagatacgatttgggaacccagctgagctgcatggaactaaggttcagattccatatttaactacagaaaaaaattccttcaaaagaatggacgatgaggataaacagcaggaaacacagtctcccacgatgtcacccctcgcctcccctccttcttccccgcctcattaccagagggtgcccttgagccatggctacagcaaactgcggagcagcgcagaacagatgcatccagcaccttatgaagctaggcagccccttgtccagcccgagggatcctcatcagggggcccaggaaccaagccccttcggcatcaggcttcccttatccggtccttttcagtggagagggaactacaggataacagcagttaccccgacgaaccctggaggataacagaagaacagcgcgagtactatgtcaatcagttccgatcccttcagccagacccaagctctttcatttcaggttctgtggccaagaacttcttcaccaaatcaaagctttccattccagaactctcctatatatgggagcttagtgatgctgactgtgatggagccctgaccctgcctgagttctgtgctgcgtttcatctcattgtggctcggaagaacggctacccattgcctgagggcctccctccaactctgcagccagaatacctgcaggcagcttttcctaagcccaaatgggactgtcaattatttgattcttattctgagtcactgccggcaaatcaacaacctcgtgacttgaatcggatggagaagacatctgttaaagacatggctgaccttcctgtccctaaccaggatgtaactagtgatgacaaacaagctttgaaaagtactatcaatgaagccttaccaaaggacgtgtctgaggatccagcaactcccaaggattccaacagtctcaaagcaagaccaagatccagatcttactctagcacctccatagaagaggccatgaaaaggggcgaggaccctcccaccccgccacctcggccacagaaaacccattccagagcctcctccttggatctgaataaagtcttccagcccagtgtgccagctaccaagtcaggattgttacccccaccacctgcgctccctccaagaccttgtccatcacagtctgaacaagtgtcggaggccgagttactcccacagctgagcagagccccatcccaggctgcagaaagtagtccagcaaagaaggatgtactgtattctcagccaccatcaaagcccattcgtaggaaattcagaccagtatgtgggattcagcctttgatttcaatagagctgagagcttttagaacaagcaggcatttatttaatgtttccttagtccattggcaagctttatcaatagcttaa

SEQ ID NO: 25427 - DNA, 1723 bp, Homo sapiens
  source 1..1723: mol_type = unassigned DNA
aggatgctctgagctctaaaaggaggagcagttttgctggcatgcagaagtggtgaagatcacagaactgtgtggtgcaaagcgggttggttattttggtccaacacagttttacattgccctgaaattaattgctgcagcacaatctggcctcccggtacggatagagagtattaaatgtgaattgcctctgcctcgctttatgatgtcaaagaatgatggtgagatacgatttgggaacccagctgagctgcatggaactaaggttcagattccatatttaactacagaaaaaaattccttcaaaagaatggacgatgaggataaacaggaaacacagtctcccacgatgtcacccctcgcctcccctccttcttccccgcctcattaccagagggtgcccttgagccatggctacagcaaactgcggagcagcgcagaacagatgcatccagcaccttatgaagctaggcagccccttgtccagcccgagggatcctcatcagggggcccaggaaccaagccccttcggcatcaggcttcccttatccggtccttttcagtggagagggaactacaggataacagcagttaccccgacgaaccctggaggataacagaagaacagcgcgagtactatgtcaatcagttccgatcccttcagccagacccaagctctttcatttcaggttctgtggccaagaacttcttcaccaaatcaaagctttccattccagaactctcctatatatgggagcttagtgatgctgactgtgatggagccctgaccctgcctgagttctgtgctgcgtttcatctcattgtggctcggaagaacggctacccattgcctgagggcctccctccaactctgcagccagaatacctgcaggcagcttttcctaagcccaaatgggactgtcaattatttgattcttattctgagtcactgccggcaaatcaacaacctcgtgacttgaatcggatggagaagacatctgttaaagacatggctgaccttcctgtccctaaccaggatgtaactagtgatgacaaacaagctttgaaaagtactatcaatgaagccttaccaaaggacgtgtctgaggatccagctaccaagtcaggattgttacccccaccacctgcgctccctccaagaccttgtccatcacagtctgaacaagtgtcggaggccgagttactcccacagctgagcagagccccatcccaggctgcagaaagtagtccagcaaagaaggatgtactgtattctcagccaccatcaaagcccattcgtaggaaattcagaccagaaaaccaagctacagaaaaccaagagccttccactgctgcaagtgggccagcttctgcggcaaccatgaaaccgcatccaacagtccaaaagcagtcttccaaacagaagaaggccattcaaactgctatccgcaaaaataaagaggcaaacgcagtgctggctcggctgaacagtgagctccagcagcagctcaaggaggttcatcaagaacgaattgcattggaaaaccaattggaacaacttcgtccggtcactgtgttgtgacccccccatggttcaagtgacagtgggtgaccttgtctgccaagatctttcttttgaatgttttgaacccaactacttgtcatagatgtttgactgtgtcaaaagctgtgagcagcaaaatataatccatatgaccttttc

SEQ ID NO: 25428 - DNA, 5305 bp, Homo sapiens
  source 1..5305: mol_type = unassigned DNA
ggactcggactcggtttccctgcggcccagggaggctcacgggccattggctgagcggggcggatctggtcccgctcctccccgcccccagtgacacaatagtagctccctccaagatggcggcagcgacggcagacccgggagctgggaacccgcagcctggggactcctccggcgggggcgctgggggcgggctgccgtcccctggggagcaggagctgagccggcgcttgcagcgcctgtatcccgcggtcaaccagcaagagactccgctgccgcgctcctggagccccaaggacaaatacaactacattggtctctcccagggcaacctccgcgtccactacaaaggtcatggcaaaaatcacaaagatgcggcctcagtgcgtgccacccaccccatacctgctgcctgtggcatttattactttgaagtgaagattgtcagcaaaggaagagatggttacatgggaataggactctcggctcaaggcgtcaacatgaacagacttcctggttgggacaaacattcctatggttaccatggtgatgatgggcattcgttctgctcctcggggactggccagccctatggtcccacattcaccacaggagacgtgatcggctgctgtgtcaacctcatcaatggcacctgcttctacaccaagaatggccacagccttggtatagccttcacagacctcccggccaacctctaccccaccgtaggcctgcagacacctggggagattgtggacgccaactttgggcagcagcccttcctgtttgacattgaggactacatgcgggagtggcgtgccaaggtccagggcacggtccactgcttccccatcagtgcccggcttggcgagtggcaggcagtgctgcagaacatggtttcatcttacctcgtgcatcatgggtattgtgccacagccacggcttttgctcgaatgactgaaaccccgattcaggaagaacaggcgtccataaagaacagacaaaagatccagaagctggtgctggagggccgtgtgggcgaggccatcgagaccacccagcgcttctacccagggctgctggagcacaaccccaacctcctcttcatgctcaagtgccggcagtttgtggagatggtgaatgggacggacagtgaggtccgaagtttgagctcccgaagccccaagtcccaggacagctaccctggctcccccagcctcagtccccgacatggccccagtagttcccacatgcacaacacaggagcagacagtcccagctgtagcaatggcgtcgcgtccaccaagagcaaacagaaccacagtaaataccctgcacccagctcctcatcctcgtcctcctcctcctcctcgtcctcttccccatcctccgtcaattactccgagtccaactcaacagactccaccaagtcccagcaccacagcagtaccagtaaccaggagaccagcgacagtgagatggagatggaggcagagcactaccccaacggtgtgctaggaagcatgtccacacgcattgttaatggtgcctacaagcatgaggacctgcagacggatgagtccagcatggatgacaggcatcctcggcggcagctctgcgggggcaaccaggctgccacagaaaggatcattctgtttggccgcgagttgcaggcattgagtgagcagttgggccgggagtacggcaagaatttggcccacacagagatgctgcaggatgccttcagcctgctggcatactcagacccctggagctgcccagttggccagcagcttgaccccatccagagggaacctgtgtgtgctgccctcaacagcgccattttagagtcccagaacctgccaaagcagccccctctgatgctcgccctgggccaggcatctgagtgtctccggctcatggcccgagcaggcctgggttcttgctcctttgccagagttgatgactacttgcactagctgactgtgctggctggctctggctggccctccactggccccagggctggagctgccctgccctccataggcaactggtgcagggactgggaaaccatagacagagtccactcctcctgcctggcctttccccctctccctttccttccttccttcctttctctgcccaccaccccgctcagtctctctctctctccccttcacgtgcagcggcctgtaacacagtattggctggttactctcatgtagcgccttctattttgaaaggggggttttgttttgaggaggggttggggtttttaaatttttttctcctgactgagccaccagtatttatctctggagagtttgtgctgagctggtttctgctaatttagtgatgaagcctatccaagttggtgatagcttattattttcataagtaaaaaacaaatgagattatatatatatatataaaaatatatatattaaaaaaaaagacagtatttatcgtagcattagtggtccagcacctcttgggtgaggctgtccaggcaccatgttttctttgagtccaactcattaaaaaagaagaatctctgtcacctcagccaagtgatttattttttgctcccccttttttgagtcacaggccgagctgcagcctaggaaacccaaatagggtttggtgggccacttagtgggcatggttacattggtttatagcatcccaagaactgtagatccctaggcccctgagagctggacagagcagagaactacagggccaagggtccagagaagtgataacttggcccagggccacacagcagaggtagagggtccttggccagcacactatctaccactctaccccacctcccactgcctgccttgctcccctttcctcccttttcaataccctatcttcccttgttgttaagatggccaaataatacatttactctaaattgattgcctggaaactacctgccttcgtcctgagagcttctgtgtgtcaggctgctggaaagaagactccattcccaggacagaggcccttgagtacaggggctgctttcttcctgcctagatcttcaccatctctgcacagctctgagagaatggatgctttctgttgagaaaccagtaccttgtggaggcaggttcttgggctgctactccagggagtggatggaatccttggtcccctaggccagacttcactgccactgtgccagacagctccctgcagctgggccctagccactcttaggaaagactattgggagtatttgctggccagagaatgggactctatcagctttacacatgtcccaccagctgtttcagatagatccttacagctggcagagtaaaagtggtcccgctaccattggggaatcaggaaaggaaagactgagatggttgccaggacttggggtggcccacctgtggagaggactggctgccctggaggaggaaagggaggaagtctacacagaggagcaccaggacggctggaatttccatatgtgcttcacattgtgaggggagtgcacaagccgcccatgcaaagagtagggtcagccatggcaaggccggaagttgaactttcagtccctgcctgaatctgggctttgcaagctcctgctccatattggtggacatgggaatggttggtgtggcctgagatacccattgctcaccaggcctcactgggcccacagctgggcaacaagaaaaatgtttgaattggaccaactgctggtgatggggccagggccctgggccctgtgctgtcagaattctgccttgggaaatgatcctatagctgctgctttttcttggtccttggggctggcagacccatagaccatggcctgttaggaggcgtcctgtctgtaaaggaaattcatctcttgtgacagcctggggctacctagctcccaaacccagaagttggagacatcaggctgtttaaatgatcatagcctagcaggattggattaaaaccacaggcttttgcagctggaatggggttcagtgaacatctcccccattcctctcttgctacaaataaggaaacaggcccaggagattaagtgacttggctaaagtcacatagcaaattagtagcagagccgggactatcccttatccctgtgggttgggcaacactatttagtcctgaaaccgaatggcagataaaccccatgaggggtcaggctgatgtgccctccagcagtatctgagaagctgctaccttcaggggtgtgtcagggatgaggacgggtgcctgagcttaggttgtggagtggctgagagggcccaggagggctcgggacagctgtgtgctgcatggggttgggtgtctgcctggctcgcacttggtacccatggccacctccccattttctgtgccttatctcactgtttcagctgagtccaagttgtttactctgttcctctccagaggggctctctgtcccagttgggcagctcacctttgggacataagcctttgccccacaagctgtggagagggccaaaaccaagctgcttgagcccactctcttgctgagagtccaggcctgcctgcctgccagccagaggtgccccttatgcacatccagtcctaccagcctgcttccaggagcctagagtgggaaaggcacctgggggagccctggtgaagggctggacctgacccatggaggcaggaggaagacctggctttcttggtttgtccggccctggggagcagccttccctactcactttccccttgcggcaccaaatggtcactccttccagagcaaaaactggcactcatagcaagccagaacccccatccccatcctcatgggtctgtggctgggtgcaggccatcaaaatggacaccacgagacagaagtggggactgcctggccacctagcgccttcccactccttaagcaagcacaaagaagatgaggcagagaattgtcagagctgaaagttcctttggttgctcacaactcaggtatgcacccatgtggcagccaggcagcggagccctactagactgccagtctcatgcacccagacctgtggccagattgtggcctctggctgcctcaggcattttcctctttgcattgggttttcctgcattagtaactacagctgcaacagacatcctccacattgtgcacactggttttgcctttgtcctcaagagttgatacttggcattagcatgaaacttgtgggtgtgggaggatggagagagaactctaacacaaaacatcttattaaaattgtacttgagagacaaaaaaaaaactctgttgtattttgacaga

SEQ ID NO: 25429 - DNA, 2262 bp, Homo sapiens
  source 1..2262: mol_type = unassigned DNA
gacacaatagtagctccctccaagatggcggcagcgacggcagacccgggagctgggaacccgcagcctggggactcctccggcgggggcgctgggggcgggctgccgtcccctggggagcaggagctgagccggcgcttgcagcgcctgtatcccgcggtcaaccagcaagagactccgctgccgcgctcctggagccccaaggacaaatacaactacattggtctctcccagggcaacctccgcgtccactacaaagttacatgggaataggactctcggctcaaggcgtcaacatgaacagacttcctggttgggacaaacattcctatggttaccatggtgatgatgggcattcgttctgctcctcggggactggccagccctatggtcccacattcaccacaggagacgtgatcggctgctgtgtcaacctcatcaatggcacctgcttctacaccaagaatggccacagccttggtatagccttcacagacctcccggccaacctctaccccaccgtaggcctgcagacacctggggagattgtggacgccaactttgggcagcagcccttcctgtttgacattgaggactacatgcgggagtggcgtgccaaggtccagggcacggtccactgcttccccatcagtgcccggcttggcgagtggcaggcagtgctgcagaacatggtttcatcttacctcgtgcatcatgggtattgtgccacagccacggcttttgctcgaatgactgaaaccccgattcaggaagaacaggcgtccataaagaacagacaaaagatccagaagctggtgctggagggccgtgtgggcgaggccatcgagaccacccagcgcttctacccagggctgctggagcacaaccccaacctcctcttcatgctcaagtgccggcagtttgtggagatggtgaatgggacggacagtgaggtccgaagtttgagctcccgaagccccaagtcccaggacagctaccctggctcccccagcctcagtccccgacatggccccagtagttcccacatgcacaacacaggagcagacagtcccagctgtagcaatggcgtcgcgtccaccaagagcaaacagaaccacagtaaataccctgcacccagctcctcatcctcgtcctcctcctcctcctcgtcctcttccccatcctccgtcaattactccgagtccaactcaacagactccaccaagtcccagcaccacagcagtaccagtaaccaggagaccagcaacccatggctacagcttgaaaggaggcccaaccaggctgctccaaccacaccccctgggccaactcccacctcaacccctccccacagcgacagtgagatggagatggaggcagagcactaccccaacggtgtgctaggaagcatgtccacacgcattgttaatggtgcctacaagcatgaggacctgcagacggatgagtccagcatggatgacaggcatcctcggcggcagctctgcgggggcaaccaggctgccacagaaaggatcattctgtttggccgcgagttgcaggcattgagtgagcagttgggccgggagtacggcaagaatttggcccacacagagatgctgcaggatgccttcagcctgctggcatactcagacccctggagctgcccagttggccagcagcttgaccccatccagagggaacctgtgtgtgctgccctcaacagcgccattttagagtcccagaacctgccaaagcagccccctctgatgctcgccctgggccaggcatctgagtgtctccggctcatggcccgagcaggcctgggttcttgctcctttgccagagttgatgactacttgcactagctgactgtgctggctggctctggctggccctccactggccccagggctggagctgccctgccctccataggcaactggtgcagggactgggaaaccatagacagagtccactcctcctgcctggcctttccccctctccctttccttccttccttcctttctctgcccaccaccccgctcagtctctctctctctccccttcacgtgcagcggcctgtaacacagtattggctggttactctcatgtagcgccttctattttgaaaggggggttttgttttgaggaggggttggggtttttaaatttttttctcctgactgagccaccagtatttatctctggagagtttgtgctgagctggtttctgctaatttagtgatgaagcctatccaagtt

SEQ ID NO: 25430 - DNA, 1248 bp, Homo sapiens
  source 1..1248: mol_type = unassigned DNA
gacacaatagtagctccctccaagatggcggcagcgacggcagacccgggagctgggaacccgcagcctggggactcctccggcgggggcgctgggggcgggctgccgtcccctggggagcaggagctgagccggcgcttgcagcgcctgtatcccgcggtcaaccagcaagagactccgctgccgcgctcctggagccccaaggacaaatacaactacattggtctctcccagggcaacctccgcgtccactacaaaggtcatggcaaaaatcacaaagatgcggcctcagtgcgtgccacccaccccatacctgctgcctgtggcatttattactttgaagtgaagattgtcagcaaaggaagagatgggttgggacaaacattcctatggttaccatggtgatgatgggcattcgttctgctcctcggggactggccagccctatggtcccacattcaccacaggagacgtgatcggctgctgtgtcaacctcatcaatggcacctgcttctacaccaagaatggccacagccttggtatagccttcacagacctcccggccaacctctaccccaccgtaggcctgcagacacctggggagattgtggacgccaactttgggcagcagcccttcctgtttgacattgaggactacatgcgggagtggcgtgccaaggtccagggcacggtccactgcttccccatcagtgcccggcttggcgagtggcaggcagtgctgcagaacatggtttcatcttacctcgtgcatcatgggtattgtgccacagccacggcttttgctcgaatgactgaaaccccgattcaggaagaacaggcgtccataaagaacagacaaagtaaggtttattctactttcccctttcccttcctcacctgtccctaactctgctctctggctcatgtcaaccctggttaacctgtcaggagtccattcagctctggtcctcatgaccagcttgcagctcgaggccatgttcctgtcccaccttcaagatggcactgcccagatggacagttggcaggatggagacgtctcagggcagcctccctaatgcacattctgaaggctgggcgcaggccaggccctggcatggctggttccattcctccatttcctccctgcttgtttccttccccctgaatcctggattcctctcaacctcctgttcatggtcttccaggaaggctgtttgcctgccttagtagttctgcttattcctagcc

SEQ ID NO: 25431 - DNA, 2232 bp, Homo sapiens
  source 1..2232: mol_type = unassigned DNA
gacacaatagtagctccctccaagatggcggcagcgacggcagacccgggagctgggaacccgcagcctggggactcctccggcgggggcgctgggggcgggctgccgtcccctggggagcaggagctgagccggcgcttgcagcgcctgtatcccgcggtcaaccagcaagagactccgctgccgcgctcctggagccccaaggacaaatacaactacattggtctctcccagggcaacctccgcgtccactacaaaggtcatggcaaaaatcacaaagatgcggcctcagtgcgtgccacccaccccatacctgctgcctgtggcatttattactttgaagtgaagattgtcagcaaaggaagagatggttacatgggaataggactctcggctcaaggcgtcaacatgaacagacttcctggtatagccttcacagacctcccggccaacctctaccccaccgtaggcctgcagacacctggggagattgtggacgccaactttgggcagcagcccttcctgtttgacattgaggactacatgcgggagtggcgtgccaaggtccagggcacggtccactgcttccccatcagtgcccggcttggcgagtggcaggcagtgctgcagaacatggtttcatcttacctcgtgcatcatgggtattgtgccacagccacggcttttgctcgaatgactgaaaccccgattcaggaagaacaggcgtccataaagaacagacaaaagatccagaagctggtgctggagggccgtgtgggcgaggccatcgagaccacccagcgcttctacccagggctgctggagcacaaccccaacctcctcttcatgctcaagtgccggcagtttgtggagatggtgaatgggacggacagtgaggtccgaagtttgagctcccgaagccccaagtcccaggacagctaccctggctcccccagcctcagtccccgacatggccccagtagttcccacatgcacaacacaggagcagacagtcccagctgtagcaatggcgtcgcgtccaccaagagcaaacagaaccacagtaaataccctgcacccagctcctcatcctcgtcctcctcctcctcctcgtcctcttccccatcctccgtcaattactccgagtccaactcaacagactccaccaagtcccagcaccacagcagtaccagtaaccaggagaccagcaacccatggctacagcttgaaaggaggcccaaccaggctgctccaaccacaccccctgggccaactcccacctcaacccctccccacagcgacagtgagatggagatggaggcagagcactaccccaacggtgtgctaggaagcatgtccacacgcattgttaatggtgcctacaagcatgaggacctgcagacggatgagtccagcatggatgacaggcatcctcggcggcagctctgcgggggcaaccaggctgccacagaaaggatcattctgtttggccgcgagttgcaggcattgagtgagcagttgggccgggagtacggcaagaatttggcccacacagagatgctgcaggatgccttcagcctgctggcatactcagacccctggagctgcccagttggccagcagcttgaccccatccagagggaacctgtgtgtgctgccctcaacagcgccattttagagtcccagaacctgccaaagcagccccctctgatgctcgccctgggccaggcatctgagtgtctccggctcatggcccgagcaggcctgggttcttgctcctttgccagagttgatgactacttgcactagctgactgtgctggctggctctggctggccctccactggccccagggctggagctgccctgccctccataggcaactggtgcagggactgggaaaccatagacagagtccactcctcctgcctggcctttccccctctccctttccttccttccttcctttctctgcccaccaccccgctcagtctctctctctctccccttcacgtgcagcggcctgtaacacagtattggctggttactctcatgtagcgccttctattttgaaaggggggttttgttttgaggaggggttggggtttttaaatttttttctcctgactgagccaccagtatttatctctggagagtttgtgctgagctggtttctgctaatttagtgatgaagcctatccaagttggtgatagcttattattttcataagt

SEQ ID NO: 25432 - DNA, 2756 bp, Homo sapiens
  source 1..2756: mol_type = unassigned DNA
acaatagtagctccctccaagatggcggcagcgacggcagacccgggagctgggaacccgcagcctggggactcctccggcgggggcgctgggggcgggctgccgtcccctggggagcaggagctgagccggcgcttgcagcgcctgtatcccgcggtcaaccagcaagagactccgctgccgcgctcctggagccccaaggacaaatacaactacattggtctctcccagggcaacctccgcgtccactacaaaggtcatggcaaaaatcacaaagatgcggcctcagtgcgtgccacccaccccatacctgctgcctgtggcatttattactttgaagtgaagattgtcagcaaaggaagagatggttacatgggaataggactctcggctcaaggcgtcaacatgaacagacttcctgatcccacttccagaaacctgagttctttgctccaggtccaacagaggtgaacccacttgccccagactggggttattttcctgcaaaaaccggatcctcgtgtgttccccatctctgctgacagccactgtccaccttggcccccaggactaagtgtcattgaatccactcctgactcacatttggtcatatggggaaatagacatcaagggctgtggtcagctggtggagcagagcatggattctggagctataccacctgcatttgcatcctggcggctgtgttacctggacctgggacccatgttacagctgacagtccctgcagtgtccaccattaacaccacctctctctggagcatctttcaccttgggatctacagtacttcacaggggtctgctgtggggcagccaggtccctctgtgagggaagccatgcttcttccgagctgggttgggacaaacattcctatggttaccatggtgatgatgggcattcgttctgctcctcggggactggccagccctatggtcccacattcaccacaggagacgtgatcggctgctgtgtcaacctcatcaatggcacctgcttctacaccaagaatggccacagccttggtatagccttcacagacctcccggccaacctctaccccaccgtaggcctgcagacacctggggagattgtggacgccaactttgggcagcagcccttcctgtttgacattgaggactacatgcgggagtggcgtgccaaggtccagggcacggtccactgcttccccatcagtgcccggcttggcgagtggcaggcagtgctgcagaacatggtttcatcttacctcgtgcatcatgggtattgtgccacagccacggcttttgctcgaatgactgaaaccccgattcaggaagaacaggcgtccataaagaacagacaaaagatccagaagctggtgctggagggccgtgtgggcgaggccatcgagaccacccagcgcttctacccagggctgctggagcacaaccccaacctcctcttcatgctcaagtgccggcagtttgtggagatggtgaatgggacggacagtgaggtccgaagtttgagctcccgaagccccaagtcccaggacagctaccctggctcccccagcctcagtccccgacatggccccagtagttcccacatgcacaacacaggagcagacagtcccagctgtagcaatggcgtcgcgtccaccaagagcaaacagaaccacagtaaataccctgcacccagctcctcatcctcgtcctcctcctcctcctcgtcctcttccccatcctccgtcaattactccgagtccaactcaacagactccaccaagtcccagcaccacagcagtaccagtaaccaggagaccagcgacagtgagatggagatggaggcagagcactaccccaacggtgtgctaggaagcatgtccacacgcattgttaatggtgcctacaagcatgaggacctgcagacggatgagtccagcatggatgacaggcatcctcggcggcagctctgcgggggcaaccaggctgccacagaaaggatcattctgtttggccgcgagttgcaggcattgagtgagcagttgggccgggagtacggcaagaatttggcccacacagagatgctgcaggatgccttcagcctgctggcatactcagacccctggagctgcccagttggccagcagcttgaccccatccagagggaacctgtgtgtgctgccctcaacagcgccattttagagtcccagaacctgccaaagcagccccctctgatgctcgccctgggccaggcatctgagtgtctccggctcatggcccgagcaggcctgggttcttgctcctttgccagagttgatgactacttgcactagctgactgtgctggctggctctggctggccctccactggccccagggctggagctgccctgccctccataggcaactggtgcagggactgggaaaccatagacagagtccactcctcctgcctggcctttccccctctccctttccttccttccttcctttctctgcccaccaccccgctcagtctctctctctctccccttcacgtgcagcggcctgtaacacagtattggctggttactctcatgtagcgccttctattttgaaaggggggttttgttttgaggaggggttggggtttttaaatttttttctcctgactgagccaccagtatttatctctggagagtttgtgctgagctggtttctgctaatttagtgatgaagcctatccaagttggtgatagcttattattttcat

SEQ ID NO: 25433 - DNA, 4588 bp, Homo sapiens
  source 1..4588: mol_type = unassigned DNA
ctccagcgcttcgaatgcggacgcgaagcctggctgaggctgcgaaggacgagcggcgcagggaccccgcgggcgtctggggcttccgcggcgcccgcctctgctccctcccctcgggcgctgggtgccgaccggccggctggccggcgccgcctcctgggaagatggcgctgcacttccagagtttggctgaattggaagtgttatgtactcatctctacatagggactgatcttacacaaagaatagaggctgagaaagcactcttggaacttattgacagtccagaatgtctcagcaagtgtcaacttttattagaacaaggaacaacatcctatgctcagctccttgcagcaacatgtctttcaaaacttgtcagccgagtcagtcctttacctgttgagcagaggatggacatcagaaactacattctgaattacgtggcatcacagcccaagctggctccctttgtcatccaagctcttattcaagtcattgctaaaatcactaagttggggtggtttgaggttcagaaagaccaatttgtcttcagagaaattattgctgatgtgaagaagtttctccagggtactgtggaacactgcataataggagtaataatcctttctgaattgactcaggaaatgaacctggttgattattctagaccttcagcaaaacacaggaaaatagctacctcatttcgtgatacttctctcaaagacgttttagtgctagcatgctctcttttaaaagaggtgtttgccaaacctttaaatcttcaggatcaatgtcagcaaaatctggtaatgcaggtcttgaaactggtccttaactgccttaactttgacttcattggcagttcagcagatgaatctgcagatgatctttgcacggtgcagattccaacaacttggagaacaattttcctggaaccagaaacattggatcttttcttcaatttgtatcattcacttccaccactactatctcagttagcactttcatgtttagttcagtttgcttcgacaagaaggtccttatttaacagtcctgaacgtgccaagtaccttggtaatttaattaagggagtaaaaaggatacttgaaaaccctcagggtttgtctgatccaggtaattatcatgaattttgtcgatttttggctcgtttaaagacaaattatcagctgggagaattagttatggtgaaggaatatcctgaagttattagattgattgctaattttaccattactagcctacagcactgggaatttgctcctaacagtgttcattatttattaactctgtggcaaaggatggtagcatctgttccttttgtgaaatcaactgaaccccacctattagacacttatgcaccagaaatcacgaaggcctttatcacttctcggttggactctgttgccatagttgtgagagatcacttagatgatccactggatgatactgccactgtgtttcagcagttggagcagttgtgcacggtcagcagatgtgaatatgaaaagacatgtgctcttcttgtgcagttattcgaccaaaatgcacagaattaccaaaaacttctgcatccatattctggtgtaactgtggacatcaccattcaggaaggacgtcttgcatggctggtatacttagttgggacagttgtaggaggaagattaacatataccagtacagatgagcatgatgctatggatggagaattatcctgtcgagtttttcagcttatatctttaatggataccggattgcctcgatgttgtaatgagaaaatagagcttgcaattctgtggttcttggatcagtttcgtaaaacatatgttggtgatcaacttcaaagaacctcaaaggtatatgctcgtatgtcagaagtcttaggaataacagatgacaaccacgttctagagacgttcatgacaaaaattgttacaaaccttaaatactggggaagatatgagcctgtaatttcaaggactcttcagttcctaaatgacctttctgttggttatatccttttaaaaaaacttgtgaagatagatgctgtgaaattcatgctaaaaaaccacacgagtgaacacttcccttttcttggcatcagtgacaatcatagtctcagcgacttcaggtgtcgaacaaccttctacacagcgctcactcgccttctgatggtagatctgggtgaagatgaggatgaatttgagaatttcatgctgcctcttacagttgcttttgaaacagtattacaaatattcaacaacaactttaaacaagaagatgtaaagcgtatgttgatcgggctggcaagagatcttcgagggattgcctttgcactgaacacaaagaccagctacaccatgctgtttgactggatgtacccaacgtaccttccccttcttcagaatgctgttgaacggtggtatggagagccaacatgtacaactcccatcttgaaacttatggcagaacttatgcaaaacagatcccagcgtttgaattttgatgtatcatctcctaatggaattcttctcttcagagaagctagtaaaatggtttgcacttatggtaatcagatcctgtcccttgggagcctctcaaaagatcagatttatccaatgaaactcaagggcatctccatctgctattcagctctcaagtctgccttgtgtggaaattatgtcagctttggcgtcttcaagttgtatggggacaaccattttgacaatgtactccaggcttttgtcaaaatgctgctgtcagtgtcccacagtgacttgctacaataccggaaactgagccagtcttattatccactcctggaatgtctcactcaggaccatatgagcttcatcatcaacttagagcctcctgtactcatgtatgttctcacatctatctcagagggactcactactcttgatacagttgtctcctccagctgctgtaccagtttagactacatcgtcacctacctcttcaagcacatagcaaaagagggcaagaagccacttcgatgcagagaggctacccaggctggtcagagactattacattttatgcagcaaaacccagatgtcctgcagcagatgatgtctgtcctcatgaacaccattgtctttgaagactgtcggaaccagtggtcagtatccaggcctctcctggggctcatcctgctcaatgagaagtatttcagtgaactgagagcaagtttgataaacagccagcccctccccaagcaggaggtccttgcccagtgcttcagaaacctaatggaaggagtggagcagaacctgtccgtcaagaacagagacaggttcacccaaaatctgtctgtattcagaagagatgtggcagaggcgttgcgcagtgatggcaacactgaaccatgcagtctcgacatgatgagctgacccgacttttctgaccatgtgcggagcagcctttatcaagagactcctgaaggtctgggtctcaggacagtgatgttggctagcccaggggaatgtatttttcaaaacatacaagcaacagcaaaagccctaacttcttatacgtctagcctaattataagaatttctaacagtaccagtgtaaattcagtcttttctctgaaaagcaaaggatgtgttttcagtctttctatcaaatattatctttgttctcctaatgctctgaaaggatgtagaaacaatatttaaccaaagaacgtaataaaccaggtttgcacctaagtgtgtactagtttatggttctgcagtcaaggttgtcaatttgttggagatgcagccttcaccatggatcctggattgagacgaatgccattggaacctgttaaatgagtagtttgttatgtgtctggaagaagcagcgttagggactttgggctgtgagcatttagaacgagcctggaagcactacagagcatcccacaggaccacacgcaggcctccctgcctcagctgcatctgataaagttgagagacagtaacacaattaaatgacttagaaacaatgtttgcttttcactggcataaatctgaagtggttcagtctagaagaattaagctgtgcaattactgcctgcagagatatttcttcaggaggagtcatgtagccccagtcagaagttctgggtggtgccagcacccagtcctctgcctccatttaatttttaagagaaggtgaaggtaactattagaatataatatttgaagcagctctgccttcttagggctacccaaaacagttctaggtgctaaaattcagattttcagaggatgagaaatagctggtttccaactctccacaaaaactcttattactgttgggacttgggattctgactcaccccaaacccagaacatgaagaagacctttacagtttgtgctctactgttactaggctattaatttgagatcgtccactgtcaagtgttttactatctcactgctgtttttatgattcaggcttataacaaatattgtatcctttatttctgataagacatgaaaggttggccttactgttgaacaataagtaaatccacaggctcctgttgtaatctca

SEQ ID NO: 25434 - DNA, 2078 bp, Homo sapiens
  source 1..2078: mol_type = unassigned DNA
attgaataacatcatggaatcagaatacttgaactggaagagatcatataatatatagtctagtagtttttctgtttgctccgtggttggggcagggaggggaggaggaggagcttggcaagttatcttctccttccgtgaaacagagcactttaaagtgcttactttctttatcacttactttctcatattggccttccaggtatatgctcgtatgtcagaagtcttaggaataacagatgacaaccacgttctagagacgttcatgacaaaaattgttacaaaccttaaatactggggaagatatgagcctgtaatttcaaggactcttcagttcctaaatgacctttctgttggttatatccttttaaaaaaacttgtgaagatagatgctgtgaaattcatgctaaaaaaccacacgagtgaacacttcccttttcttggcatcagtgacaatcatagtctcagcgacttcaggtgtcgaacaaccttctacacagcgctcactcgccttctgatggtagatctgggtgaagatgaggatgaatttgagaatttcatgctgcctcttacagttgcttttgaaacagtattacaaatattcaacaacaactttaaacaagaagatgtaaagcgtatgttgatcgggctggcaagagatcttcgagggattgcctttgcactgaacacaaagaccagctacaccatgctgtttgactggatgtacccaacgtaccttccccttcttcagaatgctgttgaacggtggtatggagagccaacatgtacaactcccatcttgaaacttatggcagaacttatgcaaaacagatcccagcgtttgaattttgatgtatcatctcctaatggaattcttctcttcagagaagctagtaaaatggtttgcacttatggtaatcagatcctgtcccttgggagcctctcaaaagatcagatttatccaatgaaactcaagggcatctccatctgctattcagctctcaagtctgccttgtgtggaaattatgtcagctttggcgtcttcaagttgtatggggacaaccattttgacaatgtactccaggcttttgtcaaaatgctgctgtcagtgtcccacagtgacttgctacaataccggaaactgagccagtcttattatccactcctggaatgtctcactcaggaccatatgagcttcatcatcaacttagagcctcctgtactcatgtatgttctcacatctatctcagagggactcactactcttgatacagttgtctcctccagctgctgtaccagtttagactacatcgtcacctacctcttcaagcacatagcaaaagagggcaagaagccacttcgatgcagagaggctacccaggctggtcagagactattacattttatgcagcaaaacccagatgtcctgcagcagatgatgtctgtcctcatgaacaccattgtctttgaagactgtcggaaccagtggtcagtatccaggcctctcctggggctcatcctgctcaatgagaagtatttcagtgaactgagagcaagtttgataaacagccagcccctccccaagcaggaggtccttgcccagtgcttcagaaacctaatggaaggagtggagcagaacctgtccgtcaagaacagagacaggttcacccaaaatctgtctgtattcagaagagatgtggcagaggcgttgcgcagtgatggcaacactgaaccatgcagtctcgacatgatgagctgacccgacttttctgaccatgtgcggagcagcctttatcaagagactcctgaaggtctgggtctcaggacagtgatgttggctagcccaggggaatgtatttttcaaaacatacaagcaacagcaaaagccctaacttcttatacgtctagcctaattataagaatttctaacagtaccagtgtaaattcagtcttttctctgaaaagcaaaggatgtgttttcagtctttctatcaaatattatctttgttctcctaatgctctgaaaggatgtagaaacaatatttaaccaaagaacgtaataaaccaggtttgcacct

SEQ ID NO: 25435 - DNA, 1678 bp, Homo sapiens
  source 1..1678: mol_type = unassigned DNA
gccgcctcctgggaagatggcgctgcacttccagagtttggctgaattggaagtgttatgtactcatctctacatagggactgatcttacacaaagaatagaggctgagaaagcactcttggaacttattgacagtccagaatgtctcagcaagtgtcaacttttattagaacaaggaacaacatcctatgctcagctccttgcagcaacatgtctttcaaaacttgtcagccgagtcagtcctttacctgttgagcagaggatggacatcagaaactacattctgaattacgtggcatcacagcccaagctggctccctttgtcatccaagctcttattcaagtcattgctaaaatcactaagttggggtggtttgaggttcagaaagaccaatttgtcttcagagaaattattgctgatgtgaagaagtttctccaggttgattattctagaccttcagcaaaacacaggaaaatagctacctcatttcgtgatacttctctcaaagacgttttagtgctagcatgctctcttttaaaagaggtgtttgccaaacctttaaatcttcaggatcaatgtcagcaaaatctggtaatgcaggtcttgaaactggtccttaactgccttaactttgacttcattggcagttcagcagatgaatctgcagatgatctttgcacggtgcagattccaacaacttggagaacaattttcctggaaccagaaacattggatcttttcttcaatttgtatcattcacttccaccactactatctcagttagcactttcatgtttagttcagtttgcttcgacaagaaggtccttatttaacagtcctgaacgtgccaagtaccttggtaatttaattaagggagtaaaaaggatacttgaaaaccctcagggtttgtctgatccaggtaattatcatgaattttgtcgatttttggctcgtttaaagacaaattatcagctgggagaattagttatggtgaaggaatatcctgaagttattagattgattgctaattttaccattactagcctacagcactgggaatttgctcctaacagtgttcattatttattaactctgtggcaaaggatggtagcatctgttccttttgtgaaatcaactgaaccccacctattagacacttatgcaccagaaatcacgaaggcctttatcacttctcggttggactctgttgccatagttgtgagagatcacttagatgatccactggatgatactgccactgtgtttcagcagttggagcagttgtgcacggtcagcagatgtgaatatgaaaagacatgtgctcttcttgtgcagttattcgaccaaaatgcacagaattaccaaaaacttctgcatccatattctggtgtaactgtggacatcaccattcaggaaggacgtcttgcatggctggtatacttagttgggacagttgtaggaggaagattaacatataccagtacagatgagcatgatgctatggatggagaattatcctgtcgagtttttcagcttatatctttaatggataccggattgcctcgatgttgtaatgagaaaatagagcttgcaattctgtggttcttggatcagtttcgtaaaacatatgttggtgatcaacttcaaagaacctcaaagaagacgtttatttattta

SEQ ID NO: 25436 - DNA, 11711 bp, Homo sapiens
  source 1..11711: mol_type = unassigned DNA
cacagtggtcctccgccggctacggcgctgcgtcactggtttgcaggcgctttcctcttggaagtggcgactgctgcgggcctgagcgctggtctcacgcgcctcgggagccaggttggcggcgcgatgaggcgcagcaaggctgacgtggagcggtacatcgcctcggtgcagggctccaccccgtcgcctcgacagaagtcaatgaaaggattctattttgcaaagctgtattatgaagctaaagaatatgatcttgctaaaaaatacatatgtacttacattaatgtgcaagagagggatcccaaagctcacagatttctgggtcttctttatgaattggaagaaaacacagacaaagccgttgaatgttacaggcgttcagtggaattaaacccaacacaaaaagatcttgtgttgaagattgcagaattgctttgtaaaaatgatgttactgatggaagagcaaaatactggcttgaaagagcagccaaacttttcccaggaagtcctgcaatttataaactaaaggaacagcttctagattgtgaaggtgaagatggatggaataaactttttgacttgattcagtcagaactttatgtaagacctgatgacgtccatgtgaacatccggctagtggaggtgtatcgctcaactaaaagattgaaggatgctgtggcccactgccatgaggcagagaggaacatagctttgcgttcaagtttagaatggaattcgtgtgttgtacagacccttaaggaatatctggagtctttacagtgtttggagtctgataaaagtgactggcgagcaaccaatacagacttactgctggcctatgctaatcttatgcttcttacgctttccactagagatgtgcaggaaagtagagaattactgcaaagttttgatagtgctcttcagtctgtgaaatctttgggtggaaatgatgaactgtcagctactttcttagaaatgaaaggacatttctacatgcatgctggttctctgcttttgaagatgggtcagcatagtagtaatgttcaatggcgagctctttctgagctggctgcattgtgctatctcatagcatttcaggttccaagaccaaagattaaattaataaaaggtgaagctggacaaaatctgctggaaatgatggcctgtgaccgactgagccaatcagggcacatgttgctaaacttaagtcgtggcaagcaagattttttaaaagagattgttgaaacttttgccaacaaaagcgggcagtctgcattatatgatgctctgttttctagtcagtcacctaaggatacatcttttcttggtagcgatgatattggaaacattgatgtacgagaaccagagcttgaagatttgactagatacgatgttggtgctattcgagcacataatggtagtcttcagcaccttacttggcttggcttacagtggaattcattgcctgctttacctggaatccgaaaatggctaaaacagcttttccatcatttgccccatgaaacctcaaggcttgaaacaaatgcacctgaatcaatatgtattttagatcttgaagtatttctccttggagtagtatataccagccacttacaattaaaggagaaatgtaattctcaccacagctcctatcagccgttatgcctgccccttcctgtgtgtaaacagctttgtacagaaagacaaaaatcttggtgggatgcggtttgtactctgattcacagaaaagcagtacctggaaacgtagcaaaattgagacttctagttcagcatgaaataaacactctaagagcccaggaaaaacatggccttcaacctgctctgcttgtacattgggcagaatgccttcagaaaacgggcagcggtcttaattctttttatgatcaacgagaatacatagggagaagtgttcattattggaagaaagttttgccattgttgaagataataaaaaagaagaacagtattcctgaacctattgatcctctgtttaaacattttcatagtgtagacattcaggcatcagaaattgttgaatatgaagaagacgcacacataacttttgctatattggatgcagtaaatggaaatatagaagatgctgtgactgcttttgaatctataaaaagtgttgtttcttattggaatcttgcactgatttttcacaggaaggcagaagacattgaaaatgatgccctttctcctgaagaacaagaagaatgcaaaaattatctgagaaagaccagggactacctaataaagattatagatgacagtgattcaaatctttcagtggtcaagaaattgcctgtgcccctggagtctgtaaaagagatgcttaattcagtcatgcaggaactcgaagactatagtgaaggaggtcctctctataaaaatggttctttgcgaaatgcagattcagaaataaaacattctacaccgtctcctaccagatattcactatcaccaagtaaaagttacaagtattctcccaaaacaccacctcgatgggcagaagatcagaattctttactgaaaatgatttgccaacaagtagaggccattaagaaagaaatgcaggagttgaaactaaatagcagtaactcagcatcccctcatcgttggcccacagagaattatggaccagactcagtgcctgatggatatcaggggtcacagacatttcatggggctccactaacagttgcaactactggcccttcagtatattatagtcagtcaccagcatataattcccagtatcttctcagaccagcagctaatgttactcccacaaagggcccagtctatggcatgaataggcttccaccccaacagcatatttatgcctatccgcaacagatgcacacaccgccagtgcaaagctcatctgcttgtatgttctctcaggagatgtatggtcctcctgcattgcgttttgagtctcctgcaacgggaattctatcgcccaggggtgatgattactttaattacaatgttcaacagacaagcacaaatccacctttgccagaaccaggatatttcacaaaacctccgattgcagctcatgcttcaagatctgcagaatctaagactatagaatttgggaaaactaattttgttcagcccatgccgggtgaaggattaaggccatctttgccaacacaagcacacacaacacagccaactccttttaaatttaactcaaatttcaaatcaaatgatggtgacttcacgttttcctcaccacaggttgtgacacagccccctcctgcagcttacagtaacagtgaaagccttttaggtctcctgacttcagataaacccttgcaaggagatggctatagtggagccaaaccaattcctggtggtcaaaccattgggcctcgaaatacattcaattttggaagcaaaaatgtgtctggaatttcatttacagaaaacatggggtcgagtcagcaaaagaattctggttttcggcgaagtgatgatatgtttactttccatggtccagggaaatcagtatttggaacacccactttagagacagcaaacaagaatcatgagacagatggaggaagtgcccatggggatgatgatgatgacggtcctcactttgagcctgtagtacctcttcctgataagattgaagtaaaaactggtgaggaagatgaagaagaattcttttgcaaccgcgcgaaattgtttcgtttcgatgtagaatccaaagaatggaaagaacgtgggattggcaatgtaaaaatactgaggcataaaacatctggtaaaattcgccttctaatgagacgagagcaagtattgaaaatctgtgcaaatcattacatcagtccagatatgaaattgacaccaaatgctggatcagacagatcttttgtatggcatgcccttgattatgcagatgagttgccaaaaccagaacaacttgctattaggttcaaaactcctgaggaagcagcactttttaaatgcaagtttgaagaagcccagagcattttaaaagccccaggaacaaatgtagccatggcgtcaaatcaggctgtcagaattgtaaaagaacccacaagtcatgataacaaggatatttgcaaatctgatgctggaaacctgaattttgaatttcaggttgcaaagaaagaagggtcttggtggcattgtaacagctgctcattaaagaatgcttcaactgctaagaaatgtgtatcatgccaaaatctaaacccaagcaataaagagctcgttggcccaccattagctgaaactgtttttactcctaaaaccagcccagagaatgttcaagatcgatttgcattggtgactccaaagaaagaaggtcactgggattgtagtatttgtttagtaagaaatgaacctactgtatctaggtgcattgcgtgtcagaatacaaaatctgctaacaaaagtggatcttcatttgttcatcaagcttcatttaaatttggccagggagatcttcctaaacctattaacagtgatttcagatctgttttttctacaaaggaaggacagtgggattgcagtgcatgtttggtacaaaatgaggggagctctacaaaatgtgctgcttgtcagaatccgagaaaacagagtctacctgctacttctattccaacacctgcctcttttaagtttggtacttcagagacaagtaaaactctaaaaagtggatttgaagacatgtttgctaagaaggaaggacagtgggattgcagttcatgcttagtgcgaaatgaagcaaatgctacaagatgtgttgcttgtcagaatccggataaaccaagtccatctacttctgttccagctcctgcctcttttaagtttggtacttcagagacaagcaaggctccaaagagcggatttgagggaatgttcactaagaaggagggacagtgggattgcagtgtgtgcttagtaagaaatgaagccagtgctaccaaatgtattgcttgtcagaatccaggtaaacaaaatcaaactacttctgcagtttcaacacctgcctcttcagagacaagcaaggctccaaagagcggatttgagggaatgttcactaagaaggagggacagtgggattgcagtgtgtgcttagtaagaaatgaagccagtgctaccaaatgtattgcttgtcagaatccaggtaaacaaaatcaaactacttctgcagtttcaacacctgcctcttcagagacaagcaaggctccaaagagcggatttgagggaatgttcactaagaaggaaggacagtgggattgcagtgtgtgcttagtaagaaatgaagccagtgctaccaaatgtattgcttgtcagtgtccaagtaaacaaaatcaaacaactgcaatttcaacacctgcctcttcggagataagcaaggctccaaagagtggatttgaaggaatgttcatcaggaaaggacagtgggattgtagtgtttgctgtgtacaaaatgagagttcttccttaaaatgtgtggcttgtgatgcctctaaaccaactcataaacctattgcagaagctccttcagctttcacactgggctcagaaatgaagttgcatgactcttctggaagtcaggtgggaacaggatttaaaagtaatttctcagaaaaagcttctaagtttggcaatacagagcaaggattcaaatttgggcatgtggatcaagaaaattcaccttcatttatgtttcagggttcttctaatacagaatttaagtcaaccaaagaaggattttccatccctgtgtctgctgatggatttaaatttggcatttcggaaccaggaaatcaagaaaagaaaagtgaaaagcctcttgaaaatggtactggcttccaggctcaggatattagtggccagaagaatggccgtggtgtgatttttggccaaacaagtagcacttttacatttgcagatcttgcaaaatcaacttcaggagaaggatttcagtttggcaaaaaagaccccaatttcaagggattttcaggtgctggagaaaaattattctcatcacaatacggtaaaatggccaataaagcaaacacttccggtgactttgagaaagatgatgatgcctataagactgaggacagcgatgacatccattttgaaccagtagttcaaatgcccgaaaaagtagaacttgtaacaggagaagaagatgaaaaagttctgtattcacagcgggtaaaactatttagatttgatgctgaggtaagtcagtggaaagaaaggggcttggggaacttaaaaattctcaaaaacgaggtcaatggcaaactaagaatgctgatgcgaagagaacaagtactaaaagtgtgtgctaatcattggataacgactacgatgaacctgaagcctctctctggatcagatagagcatggatgtggttagccagtgatttctctgatggtgatgccaaactagagcagttggcagcaaaatttaaaacaccagagctggctgaagaattcaagcagaaatttgaggaatgccagcggcttctgttagacataccacttcaaactccccataaacttgtagatactggcagagctgccaagttaatacagagagctgaagaaatgaagagtggactgaaagatttcaaaacatttttgacaaatgatcaaacaaaagtcactgaggaagaaaataagggttcaggtacaggtgcggccggtgcctcagacacaacaataaaacccaatcctgaaaacactgggcccacattagaatgggataactatgatttaagggaagatgctttggatgatagtgtcagtagtagctcagtacatgcttctccattggcaagtagccctgtgagaaaaaatcttttccgttttggtgagtcaacaacaggatttaacttcagttttaaatctgctttgagtccatctaagtctcctgccaagttgaatcagagtgggacttcagttggcactgatgaagaatctgatgttactcaagaagaagagagagatggacagtactttgaacctgttgttcctttacctgatctagttgaagtatccagtggtgaggaaaatgaacaagttgtttttagtcacagggcaaaactctacagatatgataaagatgttggtcaatggaaagaaaggggcattggtgatataaagattttacagaattatgataataagcaagttcgtatagtgatgagaagggaccaagtattaaaactttgtgccaatcacagaataactccagacatgactttgcaaaatatgaaagggacagaaagagtatggttgtggactgcatgtgattttgcagatggagaaagaaaagtagagcatttagctgttcgttttaaactacaggatgttgcagactcgtttaagaaaatttttgatgaagcaaaaacagcccaggaaaaagattctttgataacacctcatgtttctcggtcaagcactcccagagagtcaccatgtggcaaaattgctgtagctgtattagaagaaaccacaagagagaggacagatgttattcagggtgatgatgtagcagatgcaacttcagaagttgaagtgtctagcacatctgaaacaacaccaaaagcagtggtttctcctccaaagtttgtatttggttcagagtctgttaaaagcatttttagtagtgaaaaatcaaaaccatttgcattcggcaacagttcagccactgggtctttgtttggatttagttttaatgcacctttgaaaagtaacaatagtgaaactagttcagtagcccagagtggatctgaaagcaaagtggaacctaaaaaatgtgaactgtcaaagaactctgatatcgaacagtcttcagatagcaaagtcaaaaatctctttgcttcctttccaacggaagaatcttcaatcaactacacatttaaaacaccagaaaaggcaaaagagaagaaaaaacctgaagattctccctcagatgatgatgttctcattgtatatgaactaactccaaccgctgagcagaaagcccttgcaaccaaacttaaacttcctccaactttcttctgctacaagaatagaccagattatgttagtgaagaagaggaggatgatgaagatttcgaaacagctgtcaagaaacttaatggaaaactatatttggatggctcagaaaaatgtagacccttggaagaaaatacagcagataatgagaaagaatgtattattgtttgggaaaagaaaccaacagttgaagagaaggcaaaagcagatacgttaaaacttccacctacatttttttgtggagtctgtagtgatactgatgaagacaatggaaatggggaggactttcaatcagagcttcaaaaagttcaggaagctcaaaaatctcagacagaagaaataactagcacaactgacagtgtatatacaggtgggactgaagtgatggtaccttctttctgtaaatctgaagaacctgattctattaccaaatccattagttcaccatctgtttcctctgaaactatggacaaacctgtagatttgtcaactagaaaggaaattgatacagattctacaagccaaggggaaagcaagatagtttcatttggatttggaagtagcacagggctctcatttgcagacttggcttccagtaattctggagattttgcttttggttctaaagataaaaatttccaatgggcaaatactggagcagctgtgtttggaacacagtcagtcggaacccagtcagccggtaaagttggtgaagatgaagatggtagtgatgaagaagtagttcataatgaagatatccattttgaaccaatagtgtcactaccagaggtagaagtaaaatctggagaagaagatgaagaaattttgtttaaagagagagccaaactttatagatgggatcgggatgtcagtcagtggaaggagcgcggtgttggagatataaagattctttggcatacaatgaagaattattaccggatcctaatgagaagagaccaggtttttaaagtgtgtgcaaaccacgttattactaaaacaatggaattaaagcccttaaatgtttcaaataatgctttagtttggactgcctcagattatgctgatggagaagcaaaagtagaacagcttgcagtgagatttaaaactaaagaagtagctgattgtttcaagaaaacatttgaagaatgtcagcagaatttaatgaaactccagaaaggacatgtatcactggcagcagaattatcaaaggagaccaatcctgtggtgttttttgatgtttgtgcggacggtgaacctctagggcggataactatggaattattttcaaacattgttcctcggactgctgagaacttcagagcactatgcactggagagaaaggctttggtttcaagaattccatttttcacagagtaattccagattttgtttgccaaggaggagatatcaccaaacatgatggaacaggcggacagtccatttatggagacaaatttgaagatgaaaattttgatgtgaaacatactggtcctggtttactatccatggccaatcaaggccagaataccaataattctcaatttgttataacactgaagaaagcagaacatttggactttaagcatgtagtatttgggtttgttaaggatggcatggatactgtgaaaaagattgaatcatttggttctcccaaagggtctgtttgtcgaagaataactatcacagaatgtggacagatataaaatcattgttgttcatagaaaatttcatctgtataagcagttggattgaagcttagctattacaatttgatagttatgttcagcttttgaaaatggacgtttccgatttacaaatgtaaaattgcagcttatagctgttgtcactttttaatgtgttataattgaccttgcatggtgtgaaataaaagtttaaacactggtgtatttcaggtgtacttgtgtttatgtactcctgacgtattaaaatggaataatactaatcttgttaaaagcaatagacctcaaactattgaaggaatatgatatatgcaatttaattttaattccttttaagatatttggacttcctgcatggatatacttaccatttgaataaagggaccacaacttggataatttaattttaggtttgaaatatatttggtaatcttaactattggtgtactcatttatgcatagagactcgtttatgaatgggtagagccacagaacgtatagagttaaccaaagtgctcttctctagaatctttacacctcctgtgtggttacaagttaactttgtaagtagcgtaccttccttccttaaaatatctagcttcctgtgccctttcatagatattcgattaatttttacattttaaacaagttgactatttcctttaggggttttgtttcaaacttttctgtcatctgtctctactacctcagaaactgcagcttggttctgatgatagaaattgaatttttccttgtagttattgtgataaagtatgaatatttttagaaagtctataccatgttctttcgttaaagatttgctttatacaagattgttgcagtacctttttctggtaaattttgtagcagaaataaaatgacaattcctaagagccactgacatccaaaaaattcattacttacgcttcgggttcattctaaagtaaggaagacaatttaaaggcagtaaattcaaactgctgcataatttccagagctcctagtttctcaagtttgatacacaccaaaaacgtatttggaaatggcttgtatcaaatgttaggcaaattgctaaagaaaagaggatgttcttattggcctactcaatatggaactacaaagaatccaggtagaacacaaaattttgtatattgcaattatgaatattgactgtcttccacccatctgtgttctttcgggtgaaattacctcattttatttagtgaggaaagacaggtttattccctgttacatggggatttggaaattgggtatcctaaagcaagtaactgttcaaccaccagtcaaaagaggggagggatgttgtgcgagtaatgagtgatggtataccatcaccattccactcggccacaaagccagatacttgaaataaacctactccaaatgtatcagttcagtcttgaaccatggattacatatgtttacactaaatatttcaaattggcttatttggaaatctatgtaatataaactgatgtaaagtgtgttgtaacttttcagctgagacagttgatgccttcgtcatgattttagaataaattcttaagttaatgcaagtgctttttaagagactttttacagatttgtatgctttcctaaagcactaaagttacaaattaaaaagctttaaaaactttgaccaaaaatttgacaaaatgacatgtaaactgacttttcccgtattagtattccaaagatgcttaaaagtggcttgtggcatttatgagaaagtctttgtgtcacatttcaggaaaggactttgatttctctttgttatttaatcactgatgtggtctaaacccacgataatatgtatctttccttttaaactggattttatgttgtctcattaaaatctgcttaaagatagaataaaattcattatttgtaca

SEQ ID NO: 25437 - DNA, 3194 bp, Homo sapiens
  source 1..3194: mol_type = unassigned DNA
agatggctcgtgcgcaggtgcgtgctaggagcgcggctcgtcagggcaggctgctctgcagggcaggcgatccggggctcgcctccgcgcggcattcagcgcgcaggcgcgagctggccgcctcacacggagtcggcttgttaagtgcgcacgcgcgggagtttctggcagaaagcaggcgagcctgggccggcgcggggccttgtgggagggcttaaggaagtaaaatggcggacctggcgaacgaagaaaagcctgccattgctccgcccgtctttgtgtttcagaaggataaaggacaaaagaggtcagctggcggctccagtcctgaaggcggagaagattctgacagagaagatggaaattactgccctcctgtcaagcgagaaagaacatcctctttaacccagttcccaccctcacagtcagaggaaaggagcagtggcttccggttgaagccaccaacgctgatccacggccaagcccccagcgcaggtctgccaagccagaagcccaaggagcagcagcggagcgtgcttcgcccggcagtgttacaagctccgcagccaaaggcgctgtcccagactgtccccagcagtggcaccaacggggtcagcctcccagcagactgcacgggggcagtgcccgcagcatcccctgacactgctgcatggagaagtccttccgaagctgccgatgaggtgtgtgcacttgaggagaaagagccccagaaaaatgagtccagcaatgcctctgaagaggaagcctgtgagaaaaaagaccccgccacacagcaagcctttgtatttgggcagaacttgagggacagagttaagctgataaatgagagcgtggacgaagccgacatggagaatgctggacaccccagcgcagacacgccaaccgcaacgaactatttcctccagtatatcagttccagtttagagaactcaaccaatagtgccgacgcctccagcaacaaatttgtatttggccagaacatgagcgagcgagttttgagccccccaaaattaaacgaggtcagttcagatgccaacagggaaaatgcagctgccgagtcagggtctgagtcctcgtcccaggaggccacccctgagaaagagtccctggctgagtcggcagccgcctacaccaaggcaacagcgcggaagtgtttgttggaaaaagtggaagtcatcaccggggaggaggcggagagcaatgtgttacagatgcagtgcaagctgtttgtctttgacaagacctcacagtcctgggtggagagaggccgggggctgctcagactcaatgacatggcgtccaccgatgacggcacactacagtcccgactagtgatgcggacccaggggagcctgcgactgatcctcaacaccaagctgtgggcccagatgcagatcgacaaggccagcgagaagagcattcgcatcacagccatggacaccgaggaccagggcgtgaaggtcttcctgatctcggccagctccaaggacacaggtcagttgtatgcagccctgcaccaccgcatcctggccctgcgcagccgcgtggagcaggagcaggaggccaagatgcccgcgcctgagcctggggcagccccatccaacgaggaggacgacagcgacgatgacgatgtcctggctccttcaggggccaccgcagctggtgctggtgacgaaggggacgggcagacgaccgggagcacatagcggccgggagcccggctgcacaccaggctgctgctttgtccgtctatccacccgcccacccgcccccaccccaccggcagcgtccaggtgcggggccgggaaccacacaccccactgggccggccacagtctggacccgcacgtcctgttcaaaagcagactcgggaactgcctgaatgtggtttgggacacgagacctcatcatattgatgagcgaacaaacaagaacatttcctccctcccctcctttgaattgaaatggcacattaagacttgtcacggcttctcactgggactggagacctcgttccttcaccccgcgtgtcgccagcctctgggtccagccagagcccctggcttctccgccacccacacccttcccaccctgctgtggggccctgcctttgtggggagcagccagccctctgcccctgcccagggctccccaactataggcctgggacccccgcccagcttggggggctgctcgtacgagtgtagacactgggcccattggacgtgctgttaactactatcttcatttcccacttcccctctctgattgggggtgtatattttacatctttttttctttttattttcgaaggctttgttttggtttcttaggttaagatgctctcgagcgttgagcaggcacagctctgtcgaggtccctgtcccccacctgtggttctggcctctgaggttgggggactacttgtttcccaccccaggttcctccaggccaagtcatggggtgatgaggagttggggccctgtctgtcctaggcctggagagtgcctgtctgggaaaaggtcactggacctggaagggtccccagggtcccctgactcccgtctccatctgtcacgtggttcaccatcatcaggcaccaggcgcaaactgcttcccgctgttggccatcccttccccagccacaggtgtccctgcccccaggacagtccagggccaggggcttctgtgagaggcagagggggaccctcaccaaatcttggtggaagagcccaggggctggtcccagaacaggcagtctcacaagcacgcagcacactggagtggacgcctgtgcccacccgagcctggagcatggccaagagccagcttgcaccacccacctgggaggccgaggaggaggtcccctgggcacagggcctctttgggacttcagaggaaatctcccagtcccactctcggagggttaagagaaggcctcctgcagctgtgccgtccacacctctaggtcgccagagccctggcccccagcccccagcaagcctgagcccgggaagaaccagaggccctcccgagagacccagtcacacgtctctgctttaagccttagccagctagtgacgagtacaacgagataacgcccatgtgttttggaacatttatgtaagattgtcatatgaaatgtatttgggaactacattaaacttttaact

SEQ ID NO: 25438 - DNA, 1194 bp, Homo sapiens
  source 1..1194: mol_type = unassigned DNA
gcagatgtgactaaagcagaaaagcctgccattgctccgcccgtctttgtgtttcagaaggataaaggacaaaagaggtcagctggcggctccagtcctgaaggcggagaagattctgacagagaagatggaaattactgccctcctgtcaagcgagaaagaacatcctctttaacccagttcccaccctcacagtcagaggaaaggagcagtggcttccggttgaagccaccaacgctgatccacggccaagcccccagcgcaggtctgccaagccagaagcccaaggagcagcagcggagcgtgcttcgcccggcagtgttacaagctccgcagccaaaggcgctgtcccagactgtccccagcagtggcaccaacggggtcagcctcccagcagactgcacgggggcagtgcccgcagcatcccctgacactgctgcatggagaagtccttccgaagctgccgatgaggtgtgtgcacttgaggagaaagagccccagaaaaatgagtccagcaatgcctctgaagaggaagcctgtgagaaaaaagaccccgccacacagcaagcctttgtatttgggcagaacttgagggacagagttaagctgataaatgagagcgtggacgaagccgacatggagaatgctggacaccccagcgcagacacgccaaccgcaacgaactatttcctccagtatatcagttccagtttagagaactcaaccaatagtgccgacgcctccagcaacaaatttgtatttggccagaacatgagcgagcgagttttgagccccccaaaattaaacgaggtcagttcagatgccaacagggaaaatgcagctgccgagtcagggtctgagtcctcgtcccaggaggccacccctgagaaagagtccctggctgagtcggcagccgcctacaccaaggcaacagcgcggaagtgtttgttggaaaaagtggaagtcatcaccggggaggaggcggagagcaatgtgttacagatgcagtgcaagctgtttgtctttgacaagacctcacagtcctggtggcttctccgccacccacacccttcccaccctgctgtggggccctgcctttgtggggagcagccagccctctgcccctgcccagggctccccaactataggcctgggacccccgcccagcttggggggctgctcgtacgagtgtag

SEQ ID NO: 25439 - DNA, 3398 bp, Homo sapiens
  source 1..3398: mol_type = unassigned DNA
agatggctcgtgcgcaggtgcgtgctaggagcgcggctcgtcagggcaggctgctctgcagggcaggcgatccggggctcgcctccgcgcggcattcagcgcgcaggcgcgagctggccgcctcacacggagtcggcttgttaagtgcgcacgcgcgggagtttctggcagaaagcaggcgagcctgggccggcgcggggccttgtgggagggcttaaggaagtaaaatggcggacctggcgaacgaagaaaagcctgccattgctccgcccgtctttgtgtttcagaaggataaaggacaaaagtcccctgcagagcaaaaaaacttgtcggattcgggagaggagcctcggggggaggctgaggccccccaccatggcacgggtcaccccgagtcagctggcgagcatgccctagaacctcctgcccctgctggcgcctcagccagcactcctccgcctcccgctcctgaagcccagcttcctccttttccgcgagaactggcagggaggtcagctggcggctccagtcctgaaggcggagaagattctgacagagaagatggaaattactgccctcctgtcaagcgagaaagaacatcctctttaacccagttcccaccctcacagtcagaggaaaggagcagtggcttccggttgaagccaccaacgctgatccacggccaagcccccagcgcaggtctgccaagccagaagcccaaggagcagcagcggagcgtgcttcgcccggcagtgttacaagctccgcagccaaaggcgctgtcccagactgtccccagcagtggcaccaacggggtcagcctcccagcagactgcacgggggcagtgcccgcagcatcccctgacactgctgcatggagaagtccttccgaagctgccgatgaggtgtgtgcacttgaggagaaagagccccagaaaaatgagtccagcaatgcctctgaagaggaagcctgtgagaaaaaagaccccgccacacagcaagcctttgtatttgggcagaacttgagggacagagttaagctgataaatgagagcgtggacgaagccgacatggagaatgctggacaccccagcgcagacacgccaaccgcaacgaactatttcctccagtatatcagttccagtttagagaactcaaccaatagtgccgacgcctccagcaacaaatttgtatttggccagaacatgagcgagcgagttttgagccccccaaaattaaacgaggtcagttcagatgccaacagggaaaatgcagctgccgagtcagggtctgagtcctcgtcccaggaggccacccctgagaaagagtccctggctgagtcggcagccgcctacaccaaggcaacagcgcggaagtgtttgttggaaaaagtggaagtcatcaccggggaggaggcggagagcaatgtgttacagatgcagtgcaagctgtttgtctttgacaagacctcacagtcctgggtggagagaggccgggggctgctcagactcaatgacatggcgtccaccgatgacggcacactacagtcccgactagtgatgcggacccaggggagcctgcgactgatcctcaacaccaagctgtgggcccagatgcagatcgacaaggccagcgagaagagcattcgcatcacagccatggacaccgaggaccagggcgtgaaggtcttcctgatctcggccagctccaaggacacaggtcagttgtatgcagccctgcaccaccgcatcctggccctgcgcagccgcgtggagcaggagcaggaggccaagatgcccgcgcctgagcctggggcagccccatccaacgaggaggacgacagcgacgatgacgatgtcctggctccttcaggggccaccgcagctggtgctggtgacgaaggggacgggcagacgaccgggagcacatagcggccgggagcccggctgcacaccaggctgctgctttgtccgtctatccacccgcccacccgcccccaccccaccggcagcgtccaggtgcggggccgggaaccacacaccccactgggccggccacagtctggacccgcacgtcctgttcaaaagcagactcgggaactgcctgaatgtggtttgggacacgagacctcatcatattgatgagcgaacaaacaagaacatttcctccctcccctcctttgaattgaaatggcacattaagacttgtcacggcttctcactgggactggagacctcgttccttcaccccgcgtgtcgccagcctctgggtccagccagagcccctggcttctccgccacccacacccttcccaccctgctgtggggccctgcctttgtggggagcagccagccctctgcccctgcccagggctccccaactataggcctgggacccccgcccagcttggggggctgctcgtacgagtgtagacactgggcccattggacgtgctgttaactactatcttcatttcccacttcccctctctgattgggggtgtatattttacatctttttttctttttattttcgaaggctttgttttggtttcttaggttaagatgctctcgagcgttgagcaggcacagctctgtcgaggtccctgtcccccacctgtggttctggcctctgaggttgggggactacttgtttcccaccccaggttcctccaggccaagtcatggggtgatgaggagttggggccctgtctgtcctaggcctggagagtgcctgtctgggaaaaggtcactggacctggaagggtccccagggtcccctgactcccgtctccatctgtcacgtggttcaccatcatcaggcaccaggcgcaaactgcttcccgctgttggccatcccttccccagccacaggtgtccctgcccccaggacagtccagggccaggggcttctgtgagaggcagagggggaccctcaccaaatcttggtggaagagcccaggggctggtcccagaacaggcagtctcacaagcacgcagcacactggagtggacgcctgtgcccacccgagcctggagcatggccaagagccagcttgcaccacccacctgggaggccgaggaggaggtcccctgggcacagggcctctttgggacttcagaggaaatctcccagtcccactctcggagggttaagagaaggcctcctgcagctgtgccgtccacacctctaggtcgccagagccctggcccccagcccccagcaagcctgagcccgggaagaaccagaggccctcccgagagacccagtcacacgtctctgctttaagccttagccagctagtgacgagtacaacgagataacgcccatgtgttttggaacatttatgtaagattgtcatatgaaatgtatttgggaactacattaaacttttaact

SEQ ID NO: 25440 - DNA, 3383 bp, Homo sapiens
  source 1..3383: mol_type = unassigned DNA
agatggctcgtgcgcaggtgcgtgctaggagcgcggctcgtcagggcaggctgctctgcagggcaggcgatccggggctcgcctccgcgcggcattcagcgcgcaggcgcgagctggccgcctcacacggagtcggcttgttaagtgcgcacgcgcgggagtttctggcagaaagcaggcgagcctgggccggcgcggggccttgtgggagggcttaaggaagtaaaatggcggacctggcgaacgaagaaaagcctgccattgctccgcccgtctttgtgtttcagaaggataaaggacaaaagtcccctgcagagcaaaaaaacttgtcggattcgggagaggagcctcggggggaggctgaggccccccaccatggcacgggtcaccccgagtcagctggcgagcatgccctagaacctcctgcccctgctggcgcctcagccagcactcctccgcctcccgctcctgaagcccagcttcctccttttccgcgagaactggcagggaggtcagctggcggctccagtcctgaaggcggagaagattctgacagagaagatggaaattactgccctcctgtcaagcgagaaagaacatcctctttaacccagttcccaccctcacagtcagaggaaaggagcagtggcttccggttgaagccaccaacgctgatccacggccaagcccccagcgcaggtctgccaagccagaagcccaaggagcagcagcggagcgtgcttcgcccggcagtgttacaagctccgcagccaaaggcgctgtcccagactgtccccagcagtggcaccaacggggtcagcctcccagcagactgcacgggggcagtgcccgcagcatcccctgacactgctgcatggagaagtccttccgaagctgccgatgaggagaaagagccccagaaaaatgagtccagcaatgcctctgaagaggaagcctgtgagaaaaaagaccccgccacacagcaagcctttgtatttgggcagaacttgagggacagagttaagctgataaatgagagcgtggacgaagccgacatggagaatgctggacaccccagcgcagacacgccaaccgcaacgaactatttcctccagtatatcagttccagtttagagaactcaaccaatagtgccgacgcctccagcaacaaatttgtatttggccagaacatgagcgagcgagttttgagccccccaaaattaaacgaggtcagttcagatgccaacagggaaaatgcagctgccgagtcagggtctgagtcctcgtcccaggaggccacccctgagaaagagtccctggctgagtcggcagccgcctacaccaaggcaacagcgcggaagtgtttgttggaaaaagtggaagtcatcaccggggaggaggcggagagcaatgtgttacagatgcagtgcaagctgtttgtctttgacaagacctcacagtcctgggtggagagaggccgggggctgctcagactcaatgacatggcgtccaccgatgacggcacactacagtcccgactagtgatgcggacccaggggagcctgcgactgatcctcaacaccaagctgtgggcccagatgcagatcgacaaggccagcgagaagagcattcgcatcacagccatggacaccgaggaccagggcgtgaaggtcttcctgatctcggccagctccaaggacacaggtcagttgtatgcagccctgcaccaccgcatcctggccctgcgcagccgcgtggagcaggagcaggaggccaagatgcccgcgcctgagcctggggcagccccatccaacgaggaggacgacagcgacgatgacgatgtcctggctccttcaggggccaccgcagctggtgctggtgacgaaggggacgggcagacgaccgggagcacatagcggccgggagcccggctgcacaccaggctgctgctttgtccgtctatccacccgcccacccgcccccaccccaccggcagcgtccaggtgcggggccgggaaccacacaccccactgggccggccacagtctggacccgcacgtcctgttcaaaagcagactcgggaactgcctgaatgtggtttgggacacgagacctcatcatattgatgagcgaacaaacaagaacatttcctccctcccctcctttgaattgaaatggcacattaagacttgtcacggcttctcactgggactggagacctcgttccttcaccccgcgtgtcgccagcctctgggtccagccagagcccctggcttctccgccacccacacccttcccaccctgctgtggggccctgcctttgtggggagcagccagccctctgcccctgcccagggctccccaactataggcctgggacccccgcccagcttggggggctgctcgtacgagtgtagacactgggcccattggacgtgctgttaactactatcttcatttcccacttcccctctctgattgggggtgtatattttacatctttttttctttttattttcgaaggctttgttttggtttcttaggttaagatgctctcgagcgttgagcaggcacagctctgtcgaggtccctgtcccccacctgtggttctggcctctgaggttgggggactacttgtttcccaccccaggttcctccaggccaagtcatggggtgatgaggagttggggccctgtctgtcctaggcctggagagtgcctgtctgggaaaaggtcactggacctggaagggtccccagggtcccctgactcccgtctccatctgtcacgtggttcaccatcatcaggcaccaggcgcaaactgcttcccgctgttggccatcccttccccagccacaggtgtccctgcccccaggacagtccagggccaggggcttctgtgagaggcagagggggaccctcaccaaatcttggtggaagagcccaggggctggtcccagaacaggcagtctcacaagcacgcagcacactggagtggacgcctgtgcccacccgagcctggagcatggccaagagccagcttgcaccacccacctgggaggccgaggaggaggtcccctgggcacagggcctctttgggacttcagaggaaatctcccagtcccactctcggagggttaagagaaggcctcctgcagctgtgccgtccacacctctaggtcgccagagccctggcccccagcccccagcaagcctgagcccgggaagaaccagaggccctcccgagagacccagtcacacgtctctgctttaagccttagccagctagtgacgagtacaacgagataacgcccatgtgttttggaacatttatgtaagattgtcatatgaaatgtatttgggaactacattaaacttttaact

SEQ ID NO: 25441 - DNA, 1670 bp, Homo sapiens
  source 1..1670: mol_type = unassigned DNA
agaaagcaggcgagcctgggccggcgcggggccttgtgggagggcttaaggaagtaaaatggcggacctggcgaacgaagaggaaaggagcagtggcttccggttgaagccaccaacgctgatccacggccaagcccccagcgcaggtctgccaagccagaagcccaaggagcagcagcggagcgtgcttcgcccggcagtgttacaagctccgcagccaaaggcgctgtcccagactgtccccagcagtggcaccaacggggtcagcctcccagcagactgcacgggggcagtgcccgcagcatcccctgacactgctgcatggagaagtccttccgaagctgccgatgaggtgtgtgcacttgaggagaaagagccccagaaaaatgagtccagcaatgcctctgaagaggaagcctgtgagaaaaaagaccccgccacacagcaagcctttgtatttgggcagaacttgagggacagagttaagctgataaatgagagcgtggacgaagccgacatggagaatgctggacaccccagcgcagacacgccaaccgcaacgaactatttcctccagtatatcagttccagtttagagaactcaaccaatagtgccgacgcctccagcaacaaatttgtatttggccagaacatgagcgagcgagttttgagccccccaaaattaaacgaggtcagttcagatgccaacagggaaaatgcagctgccgagtcagggtctgagtcctcgtcccaggaggccacccctgagaaagagtccctggctgagtcggcagccgcctacaccaaggcaacagcgcggaagtgtttgttggaaaaagtggaagtcatcaccggggaggaggcggagagcaatgtgttacagatgcagtgcaagctgtttgtctttgacaagacctcacagtcctgggtggagagaggccgggggctgctcagactcaatgacatggcgtccaccgatgacggcacactacagtcccgactagtgatgcggacccaggggagcctgcgactgatcctcaacaccaagctgtgggcccagatgcagatcgacaaggccagcgagaagagcattcgcatcacagccatggacaccgaggaccagggcgtgaaggtcttcctgatctcggccagctccaaggacacaggtcagttgtatgcagccctgcaccaccgcatcctggccctgcgcagccgcgtggagcaggagcaggaggccaagatgcccgcgcctgagcctggggcagccccatccaacgaggaggacgacagcgacgatgacgatgtcctggctccttcaggggccaccgcagctggtgctggtgacgaaggggacgggcagacgaccgggagcacatagcggccgggagcccggctgcacaccaggctgctgctttgtccgtctatccacccgcccacccgcccccaccccaccggcagcgtccaggtgcggggccgggaaccacacaccccactgggccggccacagtctggacccgcacgtcctgttcaaaagcagactcgggaactgcctgaatgtggtttgggacacgagacctcatcatattgatgagcgaacaaacaagaacatttcctccctcccctcctttgaattgaaatggcacattaagacttgtcacggcttctcactg

SEQ ID NO: 25442 - DNA, 3113 bp, Homo sapiens
  source 1..3113: mol_type = unassigned DNA
gaagcagaggaggaaggagagaagaggtggaggtggccgcaggctgagtcgcggccgggatgtccgggcagccgccgccgccgccgccgcagcagcagcaacagcagcagcagctgtcgccgccaccgccggcggccttggccccagtctccggagtcgtcctgccggcgcccccggccgtcagcgccggctcttctccggccggctcgcccggcggcggtgcgggcggcgaaggcttaggggccgcggcggccgccctgctcctccaccctccgccgccgccgcccccggccaccgcggccccgccgcccccgccgccgcccccgcctccccctgcctcagcggctgcccccgccagcgggccgcccgctcccccgggccttgcagcgggccccggcccggctggaggagccccgaccccagctctggtggcgggcagcagcgccgcggcccccttccctcacggggactcggccctgaacgagcaggagaaggagttgcagcggcggctgaagcgtctctacccggccgtggacgaacaagagacgccgctgcctcggtcctggagcccgaaggacaagttcagctacatcggcctctctcagaacaacctgcgggtgcactacaaaggtcatggcaaaaccccaaaagatgccgcgtcagttcgagccacgcatccaataccagcagcctgtgggatttattattttgaagtaaaaattgtcagtaagggaagagatggttacatgggaattggtctttctgctcaaggtgtgaacatgaatagactaccaggttgggataagcattcatatggttaccatggggatgatggacattcgttttgttcttctggaactggacaaccttatggaccaactttcactactggtgatgtcattggctgttgtgttaatcttatcaacaatacctgcttttacaccaagaatggacatagtttaggtattgctttcactgacctaccgccaaatttgtatcctactgtggggcttcaaacaccaggagaagtggtcgatgccaattttgggcaacatcctttcgtgtttgatatagaagactatatgcgggagtggagaaccaaaatccaggcacagatagatcgatttcctatcggagatcgagaaggagaatggcagaccatgatacaaaaaatggtttcatcttatttagtccaccatgggtactgtgccacagcagaggcctttgccagatctacagaccagaccgttctagaagaattagcttccattaagaatagacaaagaattcagaaattggtattagcaggaagaatgggagaagccattgaaacaacacaacagttatacccaagtttacttgaaagaaatcctaatctccttttcacattaaaagtgcgtcagtttatagaaatggtgaatggtacagatagtgaagtacgatgtttgggaggccgaagtccaaagtctcaagacagttatcctgttagtcctcgaccttttagtagtccaagtatgagccccagccatggaatgaatatccacaatttagcatcaggcaaaggaagcaccgcacatttttcaggttttgaaagttgtagtaatggtgtaatatcaaataaagcacatcaatcatattgccatagtaataaacaccagtcatccaacttgaatgtaccagaactaaacagtataaatatgtcaagatcacagcaagttaataacttcaccagtaatgatgtagacatggaaacagatcactactccaatggagttggagaaacttcatccaatggtttcctaaatggtagctctaaacatgaccacgaaatggaagattgtgacaccgaaatggaagttgattcaagtcagttgagacgccagttgtgtggaggaagtcaggccgccatagaaagaatgatccactttggacgagagctgcaagcaatgagtgaacagctaaggagagactgtggcaagaacactgcaaacaaaaaaatgttgaaggatgcattcagtctactagcatattcagatccctggaacagcccagttggaaatcagcttgacccgattcagagagaacctgtgtgctcagctcttaacagtgcaatattagaaacccacaatctgccaaagcaacctccacttgccctagcaatgggacaggccacacaatgtctaggactgatggctcgatcaggaattggatcctgcgcatttgccacagtggaagactacctacattagctatgcatttcaagagctcacacttatattgtggcatatagtcaacatggaagtagaccagctctgctgatttgaaatttagattttttaaattatgtactggggacaggtttttgtcgctttacattgcttcctagtttacagcatgatgcaaatgattttctaacttagtgttaggagaaattattttccatctttaacctcttagttgtctaagagttaaatattactgaatttcagacgttcaaattgatcatcacaaatcctttaaaacaattacctaaaagaaaccaaaaatcctgccttctttgtgggggaggggggagagaggggaaggaaatggaacaagttgtgtttgtgttagcatgtgggtgatgtaaacttcaaattgggagatgttccgacccccactcccatataagcattcaatcagtgtaacttgcaaaatgcataaacatccgacagtttgaatttatagtgttgatggaagaaatcatttttaatgtgtactgtaaaacttgaaatactcaggagctgagtgaatatgtttgttgctacttacaatcccgacctgttagtcccagtagttttgttttaacatggtctttttcaactttgtttcctgtttaactacagatgacttctgttgtagactcacaagtttaactgttgtattataacagtattacatgtcaacggtgtggttatgacctttatttatataaaaaccaaatatttagtcaatttaccgtgtcttaatttaatctttgtacaccttccatttttaagtgcttaaatgagtactatattgcaataaaatgtagtgatataattaaccagccattaaaaatttacttctacaga

SEQ ID NO: 25443 - DNA, 1392 bp, Homo sapiens
  source 1..1392: mol_type = unassigned DNA
ccaacgttctctcccggcctcccgggcccgccgcctactcccgcgtctccgagctcctcaaccgccgcggtctccctgggcgcgcggcccgccgcctgcttccggggcgggcggactgggcgcctggtgccggcggccgcagcgacagcgcccccgggaagcagaggaggaaggagagaagaggtggaggtggccgcaggctgagtcgcggccgggatgtccgggcagccgccgccgccgccgccgcagcagcagcaacagcagcagcagctgtcgccgccaccgccggcggccttggccccagtctccggagtcgtcctgccggcgcccccggccgtcagcgccggctcttctccggccggctcgcccggcggcggtgcgggcggcgaaggcttaggggccgcggcggccgccctgctcctccaccctccgccgccgccgcccccggccaccgcggccccgccgcccccgccgccgcccccgcctccccctgcctcagcggctgcccccgccagcgggccgcccgctcccccgggccttgcagcgggccccggcccggctggaggagccccgaccccagctctggtggcgggcagcagcgccgcggcccccttccctcacggggactcggccctgaacgagcaggagaaggagttgcagcggcggctgaagcgtctctacccggccgtggacgaacaagagacgccgctgcctcggtcctggagcccgaaggacaagttcagctacatcggcctctctcagaacaacctgcgggtgcactacaaaggtcatggcaaaaccccaaaagatgccgcgtcagttcgagccacgcatccaataccagcagcctgtgggatttattattttgaagtaaaaattgtcagtaagggaagagatggttacatgggaattggtctttctgctcaaggtgtgaacatgaatagactaccaggttgggataagcattcatatggttaccatggggatgatggacattcgttttgttcttctggaactggacaaccttatggaccaactttcactactggtgatgtcattggctgttgtgttaatcttatcaacaatacctgcttttacaccaagaatggacatagtttaggtattgctttcactgacctaccgcctttagattatcctgttagtcctcgaccttttagtagtccaagtatgagccccagccatggaatgaatatccacaatttagcatcaggcaaaggaagcaccgcacatttttcaggttttgaaagttgtagtaatggtgtaatatcaaataaagcacatcaatcatattgccatagtaataaacaccagtcatccaacgaatgtaccagaactaaacagtataaatatgtcaagatcacagcaagttaa

SEQ ID NO: 25444 - DNA, 1640 bp, Homo sapiens
  source 1..1640: mol_type = unassigned DNA
agaagccaaggaagtcagttcaaaggaggactgctaagtctccactggtttgtcatttggggggttaattagtccttgtgatagcagtttccttaaaattggggtgatagcaggtgcagtgtgtcaaagagagttacatgggaattggtctttctgctcaaggtgtgaacatgaatagactaccaggttgggataagcattcatatggttaccatggggatgatggacattcgttttgttcttctggaactggacaaccttatggaccaactttcactactggtgatgtcattggctgttgtgttaatcttatcaacaatacctgcttttacaccaagaatggacatagtttaggtattgctttcactgacctaccgccaaatttgtatcctactgtggggcttcaaacaccaggagaagtggtcgatgccaattttgggcaacatcctttcgtgtttgatatagaagactatatgcgggagtggagaaccaaaatccaggcacagatagatcgatttcctatcggagatcgagaaggagaatggcagaccatgatacaaaaaatggtttcatcttatttagtccaccatgggtactgtgccacagcagaggcctttgccagatctacagaccagaccgttctagaagaattagcttccattaagaatagacaaagaattcagaaattggtattagcaggaagaatgggagaagccattgaaacaacacaacagttatacccaagtttacttgaaagaaatcctaatctccttttcacattaaaagtgcgtcagtttatagaaatggtgaatggtacagatagtgaagtacgatgtttgggaggccgaagtccaaagtctcaagacagttatcctgttagtcctcgaccttttagtagtccaagtatgagccccagccatggaatgaatatccacaatttagcatcaggcaaaggaagcaccgcacatttttcaggttttgaaagttgtagtaatggtgtaatatcaaataaagcacatcaatcatattgccatagtaataaacaccagtcatccaacttgaatgtaccagaactaaacagtataaatatgtcaagatcacagcaagttaataacttcaccagtaatgatgtagacatggaaacagatcactactccaatggagttggagaaacttcatccaatggtttcctaaatggtagctctaaacatgaccacgaaatggaagattgtgacaccgaaatggaagttgattcaagtcagttgagacgccagttgtgtggaggaagtcaggccgccatagaaagaatgatccactttggacgagagctgcaagcaatgagtgaacagctaaggagagactgtggcaagaacactgcaaacaaaaaaatgttgaaggatgcattcagtctactagcatattcagatccctggaacagcccagttggaaatcagcttgacccgattcagagagaacctgtgtgctcagctcttaacagtgcaatattagaaacccacaatctgccaaagcaacctccacttgccctagcaatgggacaggccacacaatgtctaggactgatggctcgatcaggaattggatcctgcgcatttgccacagtggaagactacctacattag

SEQ ID NO: 25445 - DNA, 993 bp, Homo sapiens
  source 1..993: mol_type = unassigned DNA
gcttccgccatctttccagcctcagtcggacgggcgcggagacgcttctggaagcttgtattggttggtgatggtggtactggaaaaacgaccttcgtgaaacgtcatttgactggtgaatttgagaagaagtatgtagccaccttgggtgttgaggttcatcccctagtgttccacaccaacagaggacctattaagttcaatgtatgggacacagccggccaggagaaattcggtggactgagagatggctattatatccaagcccagtgtgccatcataatgtttgatgtaacatcgagagttacttacaagaatgtgcctaactggcatagagatctggtacgagtgtgtgaaaacatccccattgtgttgtgtggcaacaaagtggatattaaggacaggaaagtgaaggcgaaatccattgtcttccaccgaaagaagaatcttcagtactacgacatttctgccaaaagtaactacaactttgaaaagcccttcctctggcttgctaggaagctcattggagaccctaacttggaatttgttgccatgcctgctctcgccccaccagaagttgtcatggacccagctttggcagcacagtatgagcacgacttagaggttgctcagacaactgctctcccggatgaggatgatgacctgtgagaatgaagctggagcccagcgtcagaagtctagttttataggcagctgtcctgtgatgtcagcggtgcagcgtgtgtgccacctcattattatctagctaagcggaacatgtgcttcatctgtgggatgctgaaggagatgagtgggcttcggagtgaatgtggcagtttaaaaaataacttcattgtttggacctgcatatttagctgttttggaacgcagttgattccttgagtttcatatataagactgctgcagtcacatcacaatattcagtggtgaaatcttgtttgttactgtcattcccattccttttcgtttaga

SEQ ID NO: 25446 - DNA, 780 bp, Homo sapiens
  source 1..780: mol_type = unassigned DNA
agtcggacgggcgcggagacgcttctggaaggaacgccgcgatggctgcgcagggagagccccaggtccagttcaaacttgtattggttggtgatggtggtactggaaaaacgaccttcgtgaaacgtcatttgactggtgaatttgagaagaagtatgtagccaccttgggtgttgaggttcatcccctagtgttccacaccaacagaggacctattaagttcaatgtatgggacacagccggccaggagaaattcggtggactgagagatggctattatatccaagagatggggattcaccatgttgcccatgctggtctggaactcatgagctcagcccagtgtgccatcataatgtttgatgtaacatcgagagttacttacaagaatgtgcctaactggcatagagatctggtacgagtgtgtgaaaacatccccattgtgttgtgtggcaacaaagtggatattaaggacaggaaagtgaaggcgaaatccattgtcttccaccgaaagaagaatcttcagtactacgacatttctgccaaaagtaactacaactttgaaaagcccttcctctggcttgctaggaagctcattggagaccctaacttggaatttgttgccatgcctgctctcgccccaccagaagttgtcatggacccagctttggcagcacagtatgagcacgacttagaggttgctcagacaactgctctcccggatgaggatgatgacctgtgagaatgaagctggagcccagcgtcagaagtctagtttt

SEQ ID NO: 25447 - DNA, 1530 bp, Homo sapiens
  source 1..1530: mol_type = unassigned DNA
tgcgcttccgccatctttccagcctcagtcggacgggcgcggagacgcttctggaaggtatcgcgacccggcgggcccggcacggccgggcggggacaggggtggcggcggcgggataggggtcggagccggggccagggccggggcgggtggcggacccaggggcagcgggcggctgagtaggtgggtggtgcgggcccggccgggccggggcaggagacgggcgtggggtcggcgctagcccccgcgaacccccgtttcatcctccgctctcatccccgtcccggtcccagtcccgttcccatccctacacctccggccgccgttccccgggccccgccgccccggatgccggccccgcccgccgccttcccgctcccaggcctggccgccatggcgccgcgggcgggaggcctttgtggggcgggcacgtggggcgctgggggcgcgggagcggggccgccatgggctgcggggccgcgcgagcgctcgcctccgtcctctgcctccgcaggaacgccgcgatggctgcgcagggagagccccaggtccagttcaaacttgtattggttggtgatggtggtactggaaaaacgaccttcgtgaaacgtcatttgactggtgaatttgagaagaagtatgtagccaccttgggtgttgaggttcatcccctagtgttccacaccaacagaggacctattaagttcaatgtatgggacacagccggccaggagaaattcggtggactgagagatggctattatatccaagcccagtgtgccatcataatgtttgatgtaacatcgagagttacttacaagaatgtgcctaactggcatagagatctggtacgagtgtgtgaaaacatccccattgtgttgtgtggcaacaaagtggatattaaggacaggaaagtgaaggcgaaatccattgtcttccaccgaaagaagaatcttcagtactacgacatttctgccaaaagtaactacaactttgaaaagcccttcctctggcttgctaggaagctcattggagaccctaacttggaatttgttgccatgcctgctctcgccccaccagaagttgtcatggacccagctttggcagcacagtatgagcacgacttagaggttgctcagacaactgctctcccggatgaggatgatgacctgtgagaatgaagctggagcccagcgtcagaagtctagttttataggcagctgtcctgtgatgtcagcggtgcagcgtgtgtgccacctcattattatctagctaagcggaacatgtgcttcatctgtgggatgctgaaggagatgagtgggcttcggagtgaatgtggcagtttaaaaaataacttcattgtttggacctgcatatttagctgttttggaacgcagttgattccttgagtttcatatataagactgctgcagtcacatcacaatattcagtggtgaaatcttgtttgttactgtcattcccattccttttcgtttagaatcagaataaagttgtatttcaaatatctaa

SEQ ID NO: 25448 - DNA, 2455 bp, Homo sapiens
  source 1..2455: mol_type = unassigned DNA
cgccggcgtcggctgcgtctccggcgtttgaattgcgcttccgccatctttccagcctcagtcggacgggcgcggagacgcttctggaagcttgtattggttggtgatggtggtactggaaaaacgaccttcgtgaaacgtcatttgactggtgaatttgagaagaagtatgtagccaccttgggtgttgaggttcatcccctagtgttccacaccaacagaggacctattaagttcaatgtatgggacacagccggccaggagaaattcggtggactgagagatggctattatatccaagcccagtgtgccatcataatgtttgatgtaacatcgagagttacttacaagaatgtgcctaactggcatagagatctggtacgagtgtgtgaaaacatccccattgtgttgtgtggcaacaaagtggatattaaggacaggaaagtgaaggcgaaatccattgtcttccaccgaaagaagaatcttcagtactacgacatttctgccaaaagtaactacaactttgaaaagcccttcctctggcttgctaggaagctcattggagaccctaacttggaatttgttgccatgcctgctctcgccccaccagaagttgtcatggacccagctttggcagcacagtatgagcacgacttagaggttgctcagacaactgctctcccggatgaggatgatgacctgtgagaatgaagctggagcccagcgtcagaagtctagttttataggcagctgtcctgtgatgtcagcggtgcagcgtgtgtgccacctcattattatctagctaagcggaacatgtgcttcatctgtgggatgctgaaggagatgagtgggcttcggagtgaatgtggcagtttaaaaaataacttcattgtttggacctgcatatttagctgttttggaacgcagttgattccttgagtttcatatataagactgctgcagtcacatcacaatattcagtggtgaaatcttgtttgttactgtcattcccattccttttcgtttagaatcagaataaagttgtatttcaaatatctaagcaagtgaactcatcccttgtttataaatagcatttggaaaccactaaagtagggaagttttatgccatgttaatatttgaattgccttgcttttatcacttaatttgaaatctattgggttaatttctccctatgtttatttttgtacatttgagccatgtcacacaaactgatgatgacaggtcagcagtattctatttggttagaagggttacatggtgtaaatattagtgcagttaagctaaagcagtgtttgctccaccttcatattggctaggtagggtcacctagggaagcacttgctcaaaatctgtgacctgtcagaataaaaatgtggtttgtacatatcaaatagatattttaagggtaatattttcttttatggcaaaagtaatcatgttttaatgtagaacctcaaacaggatggaacatcagtggatggcaggaggttgggaattcttgctgttaaaaataattacaaattttgcacttttttgtttgaatgttagatgcttagtgtgaagttgatacgcaaggaaaatggtccatgtttacccacagttttcaggtactcctagactttaaagatgtcttgaacatttaagttcttcagcagttcacactacaccgtttttttgtttttttttcccccccgggagggtttttttgtagggcagcacagcagagcaggacatggatgaaatactaggaatatgcacagtggggcagtgtgggggcttctcagtaatggagaacagttggtgaaacttttttttttttttaactaagcatttaatttatcttgcatattttccacatttaaaaatgaattaggtctattaggataattaggagtttgatcccatcaacactattcttgtagcagttaggaatcttgagctatttttttctcatacgattactatagtccagtttaccaaagttttctttagatgtctgataatcttgagatgattgcttaccttaaaaggtatagaaaggatcacttaaatatatggaaaaatgaaataagggtgaagctgaataaagttctacttactgtattaactggcaacagttgagtttcttaagatctgaattgctgtgtatgttacgctgtattcagaaccagtttctaaccagcctgtgagatgggaagttttttccccataattgggatgaaacctttcattcaggtattttgaattgaaggtgtatgtgttgtttgtaaccttgtggagattgcaagtggtgttgacattctggatcttctatgtaacagttgaaatttggaagtgacgtcacttacctgtctaacgtggtgtgggagagaatttacaagtcctttattgaaagaataattgttgcaaaatatattgcttctactttgcctg

SEQ ID NO: 25449 - DNA, 1475 bp, Homo sapiens
  source 1..1475: mol_type = unassigned DNA
gaattgcgcttccgccatctttccagcctcagtcggacgggcgcggagacgcttctggaagcttgtattggttggtgatggtggtactggaaaaacgaccttcgtgaaacgtcatttgactggtgaatttgagaagaaccaccttgggtgttgaggttcatcccctagtgttccacaccaacagaggacctattaagttcaatgtatgggacacagccggccaggagaaattcggtggactgagagatggctattatatccaagcccagtgtgccatcataatgtttgatgtaacatcgagagttacttacaagaatgtgcctaactggcatagagatctggtacgagtgtgtgaaaacatccccattgtgttgtgtggcaacaaagtggatattaaggacaggaaagtgaaggcgaaatccattgtcttccaccgaaagaagaatcttcagtactacgacatttctgccaaaagtaactacaactttgaaaagcccttcctctggcttgctaggaagctcattggagaccctaacttggaatttgttgccatgcctgctctcgccccaccagaagttgtcatggacccagctttggcagcacagtatgagcacgacttagaggttgctcagacaactgctctcccggatgaggatgatgacctgtgagaatgaagctggagcccagcgtcagaagtctagttttataggcagctgtcctgtgatgtcagcggtgcagcgtgtgtgccacctcattattatctagctaagcggaacatgtgcttcatctgtgggatgctgaaggagatgagtgggcttcggagtgaatgtggcagtttaaaaaataacttcattgtttggacctgcatatttagctgttttggaacgcagttgattccttgagtttcatatataagactgctgcagtcacatcacaatattcagtggtgaaatcttgtttgttactgtcattcccattccttttcgtttagaatcagaataaagttgtatttcaaatatctaagcaagtgaactcatcccttgtttataaatagcatttggaaaccactaaagtagggaagttttatgccatgttaatatttgaattgccttgcttttatcacttaatttgaaatctattgggttaatttctccctatgtttatttttgtacatttgagccatgtcacacaaactgatgatgacaggtcagcagtattctatttggttagaagggttacatggtgtaaatattagtgcagttaagctaaagcagtgtttgctccaccttcatattggctaggtagggtcacctagggaagcacttgctcaaaatctgtgacctgtcagaataaaaatgtggtttgtacatatcaaatagatattttaagggtaatattttcttttatggcaaaagtaatcatgttttaatgtagaacctcaaacaggatggaacatcagtggatggcaggaggtt

SEQ ID NO: 25450 - DNA, 2661 bp, Homo sapiens
  source 1..2661: mol_type = unassigned DNA
accgcgcctcccgccccaccctaagcgcagcgaccgcccgagcggccgaccgaaccgcgttgcgtgcgtgcgcgcacgcgcgggccacgtgggcgggcgccgcgccgttgccccgccccttgcaaccccgccccgcgccggccccgcccctgctctcgcgccggcgtcggctgcgtctccggcgtttgaattgcgcttccgccatctttccagcctcagtcggacgggcgcggagacgcttctggaaggaacgccgcgatggctgcgcagggagagccccaggtccagttcaaacttgtattggttggtgatggtggtactggaaaaacgaccttcgtgaaacgtcatttgactggtgaatttgagaagaagtatgtagccaccttgggtgttgaggttcatcccctagtgttccacaccaacagaggacctattaagttcaatgtatgggacacagccggccaggagaaattcggtggactgagagatggctattatatccaagcccagtgtgccatcataatgtttgatgtaacatcgagagttacttacaagaatgtgcctaactggcatagagatctggtacgagtgtgtgaaaacatccccattgtgttgtgtggcaacaaagtggatattaaggacaggaaagtgaaggcgaaatccattgtcttccaccgaaagaagaatcttcagtactacgacatttctgccaaaagtaactacaactttgaaaagcccttcctctggcttgctaggaagctcattggagaccctaacttggaatttgttgccatgcctgctctcgccccaccagaagttgtcatggacccagctttggcagcacagtatgagcacgacttagaggttgctcagacaactgctctcccggatgaggatgatgacctgtgagaatgaagctggagcccagcgtcagaagtctagttttataggcagctgtcctgtgatgtcagcggtgcagcgtgtgtgccacctcattattatctagctaagcggaacatgtgcttcatctgtgggatgctgaaggagatgagtgggcttcggagtgaatgtggcagtttaaaaaataacttcattgtttggacctgcatatttagctgttttggaacgcagttgattccttgagtttcatatataagactgctgcagtcacatcacaatattcagtggtgaaatcttgtttgttactgtcattcccattccttttcgtttagaatcagaataaagttgtatttcaaatatctaagcaagtgaactcatcccttgtttataaatagcatttggaaaccactaaagtagggaagttttatgccatgttaatatttgaattgccttgcttttatcacttaatttgaaatctattgggttaatttctccctatgtttatttttgtacatttgagccatgtcacacaaactgatgatgacaggtcagcagtattctatttggttagaagggttacatggtgtaaatattagtgcagttaagctaaagcagtgtttgctccaccttcatattggctaggtagggtcacctagggaagcacttgctcaaaatctgtgacctgtcagaataaaaatgtggtttgtacatatcaaatagatattttaagggtaatattttcttttatggcaaaagtaatcatgttttaatgtagaacctcaaacaggatggaacatcagtggatggcaggaggttgggaattcttgctgttaaaaataattacaaattttgcacttttttgtttgaatgttagatgcttagtgtgaagttgatacgcaaggaaaatggtccatgtttacccacagttttcaggtactcctagactttaaagatgtcttgaacatttaagttcttcagcagttcacactacaccgtttttttgtttttttttcccccccgggagggtttttttgtagggcagcacagcagagcaggacatggatgaaatactaggaatatgcacagtggggcagtgtgggggcttctcagtaatggagaacagttggtgaaacttttttttttttttaactaagcatttaatttatcttgcatattttccacatttaaaaatgaattaggtctattaggataattaggagtttgatcccatcaacactattcttgtagcagttaggaatcttgagctatttttttctcatacgattactatagtccagtttaccaaagttttctttagatgtctgataatcttgagatgattgcttaccttaaaaggtatagaaaggatcacttaaatatatggaaaaatgaaataagggtgaagctgaataaagttctacttactgtattaactggcaacagttgagtttcttaagatctgaattgctgtgtatgttacgctgtattcagaaccagtttctaaccagcctgtgagatgggaagttttttccccataattgggatgaaacctttcattcaggtattttgaattgaaggtgtatgtgttgtttgtaaccttgtggagattgcaagtggtgttgacattctggatcttctatgtaacagttgaaatttggaagtgacgtcacttacctgtctaacgtggtgtgggagagaatttacaagtcctttattgaaagaataattgttgcaaaatatattgcttctactttgcctgga

SEQ ID NO: 25451 - DNA, 5498 bp, Homo sapiens
  source 1..5498: mol_type = unassigned DNA
ctggtttcacgcgtctcgggagccaggttggcggtgcgatgaggcgcagcaaggcctacggggagcggtacctcgcctcggtgcagggctccgccccgtcgcctggaaagaagttgagaggattctattttgcaaagctgtattatgaagctaaagaatatgatcttgctaaaaaatacgtatgtacttaccttagtgtgcaagagagggatcccagagctcacagatttctgggtcttctttatgaattggaagaaaacacagagaaagccgttgaatgttacaggcgttcactggaattaaacccaccacaaaaagatcttgtgttgaagattgcagaattgctttgtaaaaatgatgttactgatggaagagcaaaatactgggttgaaagggcagcgaaacttttcccaggaagtcctgcaatttataaactaaaggaacatcttctagattgtgaaggtgaagatggatggaataaactttttgactggattcagtcagaactttatgtaagacctgatgacgtccatatgaacatccggctagtggagttgtatcgctcaaataaaagattgaaggatgctgtggcccgctgccatgaggcagagaggaacatagctttgcgttcaagtttagagtggaattcgtgtgttgtacagacccttaaggaatatctggagtctttacagtgtttggagtctgataaaagtgactggcgagcaaccaatacagacttactgctggcctatgctaatcttatgcttcttacgctttccactagagatgtgcaggaaagtagagaattactggaaagttttgatagtgctcttcagtctgcaaaatcttctttgggtggaaatgatgaactgtcagctactttcttagaaatgaaaggacatttctacatgcatgctggttctctgctcttgaagatgggtcagcatggtaataatgttcaatggcaagctctttctgagctggctgcattgtgctatgtcatagcatttcaggttccaagaccaaagattaaattaataaaaggtgaagctggacaaaatctgctggaaatgatggcctgtgaccgactgagccaatcagggcatatgttgctaaacttaagtcgtggcaagcaagattttttaaaagaggttgttgaaacttttgccaacaaaagcgggcagtctgtgttatataatgctctgttttctagtcagtcatctaaggatacatcttttcttggtagcgatgatattggaaacattgatgtacaagaaccagagcttgaagatttggctagatacgatgttggtgctattcaagcacataatggtagtcttcagcaccttacttggcttggcttacagtggaattcattgcctgctttacctggaatccgaaaatggctaaaacagcttttccatcatttgccccaggaaacctcaaggcttgaaacaaatgcacctgaatcaatatgtattttagatcttgaagtatttctccttggagtagtatataccagccacttacaattaaaggagaaatgtaattctcaccacagctcctatcagccgttatgcctgccccttcctgtgtgtaaacggctttgtacagagagacaaaaatcttggtgggatgcggtttgtactctgattcacagaaaagcagtacctggaaactcagcagaattgagacttgtagttcagcatgaaataaacactctaagagcccaggaaaaacatggccttcaacctgctctgcttgtacattgggcaaaatgccttcagaaaatgggcaggggtcttaattcttcttatgatcaacaagaatacatagggagaagtgttcattattggaagaaagttttgccattgttgaagataataaagaagaacagtattcctgaacctattgatcctctgtttaaacattttcatagtgtagacattcaggcatcagaaattgttgagtatgaagaagatgcacacataacttttgctatattggatgcagtacatggaaatatagaagatgctgtgactgcttttgaatctataaaaagtgttgtttcttattggaatcttgcactgatttttcacaggaaagcagaagacattgaaaatgatgccgtttttcctgaagaacaagaagaatgcaaaaattatctgagaaagaccagggactacctaataaagattatagatgacagtgattcaaatctttcagtggtcaagaaattgcctgtgcccctggagtctgtaaaagagatgcttaagtcagtcatgcaggaactcgaagactatagtgaaggaggtcctctctataaaaatggttctttgcgaaatgcagattcagaaataaaacattctacaccatctcctaccaaatattcactatcaccaagtaaaagttacaagtattctcccaaaacaccacctcgatgggcagaagatcagaattctttacggaaaatgatttgccaagaagtaaaggccattacgaaactaaatagcagtaagtcagcatcccgtcatcgttggcccacagagaattatggaccagactcggtgcctgatggatatcaggggtcacagacatttcatggggctccactaacagttgcaactactggcccttcagtatattatagtcagtcaccagcatataattcccagtatcttctcagaccagcagctaatgttactcccacaaagggttcttctaatacagaatttaagtcaaccaaagaaggattttccatcgctgtgtctgctgatggatttaaatttggcatttcggaaccaggaaatcaagaaaagaaaagtgaaaagcctcttgaaaatgatactggcttccaggctcaggatattagtggccagaagaatggccgtggtgtgatttttggccaaacaagtagcacttttacatttgcagatgttgcaaaatcaacttcaggagaaggatttcagtttggcaaaaaagaccccaatttcaagggattttcaggtgctggagaaaaattattctcatcacaatgcggtaaaatggccaataaagcaaacacttccggtgactttgagaaagatgatgatgcctgtaagactgaggacagcgatgacatccattttgaaccagtagttcaaatgcctgaaaaagtagaacttgtaacaggagaagaaggtgaaaaagttctgtattcacagggggtaaaactatttagatttgatgctgagataagtcagtggaaagaaaggggcttggggaacttaaaaattctcaaaaatgaggtcaatggcaaaccaagaatgctgatgcgaagagaccaagtactaaaagtgtgtgctaatcattggataacaactacaatgaacctgaagcccctctctggatcagatagagcatggatgtggttagccagtgatttctctgatggtgatgccaaactagagcggttggcagcacaatttaaaacaccagagctggctgaagaattcaagcagaaatttgaggaatgccagcggcttctgttagacataccacttcaaactccccataaacttgtagatactggcagagctgccaagctaatacagagagctgaagaaatgaagagtggactgaaagatttcaaaacgtttttgacaaatgatcaaacaaaagtcactgaggaagaaaataagggttcaggtacaggtgcagccggtgcctcagacacaacaataaaacccaatcctgaaaacactgggcccacattagaatgggataactatgatttaagggaagatgctttggatgataatgttagtagtagctcagtacatgattctccgttggcaagtagccctgtgagaaaaaatattttccgctttgatgagtcaacaacaggatttaacttcagttttaaatctgctttgagtctatctaagtctcctgccaagttgaatcagagtgggacttcagttggcactgatgaagaatctgatgttactcaagaagaagagagagatggacagtactttgaacctgttgttcctttacctgatctagttgaagtatccagtggtgaggaaaatgaacaagttgtttttagtcacagggcagaactctacagatatgataaagatgttggtcaatggaaagaaaggggcattggtgatataaagattttacagaattatgataataagcaagttcgtatagtgatgagaagggaccaagtattaaaactttgtgccaatcacagaataactccagacatgagtttgcaaaatatgaaagggacagaaagagtatgggtgtggactgcatgtgattttgcagatggagaaagaaaagtagagcatttagctgttcgttttaaactacaggatgttgcagactcatttaagaaaatttttgatgaagcaaaaacagcccaggaaaaagattctttgataacacctcatgtttctcggtcaagcactcccagagagtcaccatgtggcaaaattgctgtagctgtattagaagaaaccacaagagagaggacagatgttattcagggtgatgatgtagcagatgcagcttcagaagttgaagtgtctagcacatctgaaacaacaacaaaagcagtggtttctcctccaaagtttgtatttggttcagagtctgttaaaagaatttttagtagtgaaaaatcaaacccatttgcatttggcaacagttctgccactgggtctttgtttggatttagttttaatgcacctttgaaaagtaacgatagtgaaactagttcagtagcccagagtggatctgaaagcaaagtggaacctaaaaaatgtgaactgtcaaagaactctgatatcgaacagtcttcagatagcaaagtcaaaaatctctctgcttcctttccaatggaagaatcttcaatcaactacacatttaaaacaccagaaaaggagcctccattatggcatgctgaatttaccaaagaagaattggttcagaagctcagttccaccacaaaaagtgcagatcagttaaacggcctgcttcgggaaacagaggcaaccagtgcagtccttatggagcaaattaagcttctcaaaagtgaaataagaagattggaaaggaatcaagaggagtctgcagctaacgtggaacacttgaagaacgtcttgctgcagttcattttcttgaagccaggtagtgagagagagagccttcttcctgttataaatacgatgttgcagctcagccctgaagaaaagggaaaacttgctgcggttgctcaaggtcttcaagaaacctccatacccaagaaaaaatagaaagcaaccatgttctactatggtgccaaaaatagttgaacatcgacatcaaaaagattctttctgtctgcttattcacatattctggtttgaattaaaagtgatgaaattatcctaaatacagttggccctctgtatccatgggttccacatccacaaattcaaccaactgtggatggaaaagacttg

SEQ ID NO: 25452 - DNA, 6692 bp, Homo sapiens
  source 1..6692: mol_type = unassigned DNA
atttgtgacttgtctcatgaacgtgatgggttttaacacagaccgcttagcatggactagaaataagttgagaggattctattttgcaaagctgtattatgaagctaaagaatatgatcttgctaaaaaatacgtatgtacttaccttagtgtgcaagagagggatcccagagctcacagatttctgggtcttctttatgaattggaagaaaacacagagaaagccgttgaatgttacaggcgttcactggaattaaacccaccacaaaaagatcttgtgttgaagattgcagaattgctttgtaaaaatgatgttactgatggaagagcaaaatactgggttgaaagggcagcgaaacttttcccaggaagtcctgcaatttataaactaaaggaacatcttctagattgtgaaggtgaagatggatggaataaactttttgactggattcagtcagaactttatgtaagacctgatgacgtccatatgaacatccggctagtggagttgtatcgctcaaataaaagattgaaggatgctgtggcccgctgccatgaggcagagaggaacatagctttgcgttcaagtttagagtggaattcgtgtgttgtacagacccttaaggaatatctggagtctttacagtgtttggagtctgataaaagtgactggcgagcaaccaatacagacttactgctggcctatgctaatcttatgcttcttacgctttccactagagatgtgcaggaaagtagagaattactggaaagttttgatagtgctcttcagtctgcaaaatcttctttgggtggaaatgatgaactgtcagctactttcttagaaatgaaaggacatttctacatgcatgctggttctctgctcttgaagatgggtcagcatggtaataatgttcaatggcaagctctttctgagctggctgcattgtgctatgtcatagcatttcaggttccaagaccaaagattaaattaataaaaggtgaagctggacaaaatctgctggaaatgatggcctgtgaccgactgagccaatcagggcatatgttgctaaacttaagtcgtggcaagcaagattttttaaaagaggttgttgaaacttttgccaacaaaagcgggcagtctgtgttatataatgctctgttttctagtcagtcatctaaggatacatcttttcttggtagcgatgatattggaaacattgatgtacaagaaccagagcttgaagatttggctagatacgatgttggtgctattcaagcacataatggtagtcttcagcaccttacttggcttggcttacagtggaattcattgcctgctttacctggaatccgaaaatggctaaaacagcttttccatcatttgccccaggaaacctcaaggcttgaaacaaatgcacctgaatcaatatgtattttagatcttgaagtatttctccttggagtagtatataccagccacttacaattaaaggagaaatgtaattctcaccacagctcctatcagccgttatgcctgccccttcctgtgtgtaaacggctttgtacagagagacaaaaatcttggtgggatgcggtttgtactctgattcacagaaaagcagtacctggaaactcagcagaattgagacttgtagttcagcatgaaataaacactctaagagcccaggaaaaacatggccttcaacctgctctgcttgtacattgggcaaaatgccttcagaaaatgggcaggggtcttaattcttcttatgatcaacaagaatacatagggagaagtgttcattattggaagaaagttttgccattgttgaagataataaagaagaacagtattcctgaacctattgatcctctgtttaaacattttcatagtgtagacattcaggcatcagaaattgttgagtatgaagaagatgcacacataacttttgctatattggatgcagtacatggaaatatagaagatgctgtgactgcttttgaatctataaaaagtgttgtttcttattggaatcttgcactgatttttcacaggaaagcagaagacattgaaaatgatgccgtttttcctgaagaacaagaagaatgcaaaaattatctgagaaagaccagggactacctaataaagattatagatgacagtgattcaaatctttcagtggtcaagaaattgcctgtgcccctggagtctgtaaaagagatgcttaagtcagtcatgcaggaactcgaagactatagtgaaggaggtcctctctataaaaatggttctttgcgaaatgcagattcagaaataaaacattctacaccatctcctaccaaatattcactatcaccaagtaaaagttacaagtattctcccaaaacaccacctcgatgggcagaagatcagaattctttacggaaaatgatttgccaagaagtaaaggccattacgaaactaaatagcagtaagtcagcatcccgtcatcgttggcccacagagaattatggaccagactcggtgcctgatggatatcaggggtcacagacatttcatggggctccactaacagttgcaactactggcccttcagtatattatagtcagtcaccagcatataattcccagtatcttctcagaccagcagctaatgttactcccacaaagggttcttctaatacagaatttaagtcaaccaaagaaggattttccatcgctgtgtctgctgatggatttaaatttggcatttcggaaccaggaaatcaagaaaagaaaagtgaaaagcctcttgaaaatgatactggcttccaggctcaggatattagtggccagaagaatggccgtggtgtgatttttggccaaacaagtagcacttttacatttgcagatgttgcaaaatcaacttcaggagaaggatttcagtttggcaaaaaagaccccaatttcaagggattttcaggtgctggagaaaaattattctcatcacaatgcggtaaaatggccaataaagcaaacacttccggtgactttgagaaagatgatgatgcctgtaagactgaggacagcgatgacatccattttgaaccagtagttcaaatgcctgaaaaagtagaacttgtaacaggagaagaaggtgaaaaagttctgtattcacagggggtaaaactatttagatttgatgctgagataagtcagtggaaagaaaggggcttggggaacttaaaaattctcaaaaatgaggtcaatggcaaaccaagaatgctgatgcgaagagaccaagtactaaaagtgtgtgctaatcattggataacaactacaatgaacctgaagcccctctctggatcagatagagcatggatgtggttagccagtgatttctctgatggtgatgccaaactagagcggttggcagcacaatttaaaacaccagagctggctgaagaattcaagcagaaatttgaggaatgccagcggcttctgttagacataccacttcaaactccccataaacttgtagatactggcagagctgccaagctaatacagagagctgaagaaatgaagagtggactgaaagatttcaaaacgtttttgacaaatgatcaaacaaaagtcactgaggaagaaaataagggttcaggtacaggtgcagccggtgcctcagacacaacaataaaacccaatcctgaaaacactgggcccacattagaatgggataactatgatttaagggaagatgctttggatgataatgttagtagtagctcagtacatgattctccgttggcaagtagccctgtgagaaaaaatattttccgctttgatgagtcaacaacaggatttaacttcagttttaaatctgctttgagtctatctaagtctcctgccaagttgaatcagagtgggacttcagttggcactgatgaagaatctgatgttactcaagaagaagagagagatggacagtactttgaacctgttgttcctttacctgatctagttgaagtatccagtggtgaggaaaatgaacaagttgtttttagtcacagggcagaactctacagatatgataaagatgttggtcaatggaaagaaaggggcattggtgatataaagattttacagaattatgataataagcaagttcgtatagtgatgagaagggaccaagtattaaaactttgtgccaatcacagaataactccagacatgagtttgcaaaatatgaaagggacagaaagagtatgggtgtggactgcatgtgattttgcagatggagaaagaaaagtagagcatttagctgttcgttttaaactacaggatgttgcagactcatttaagaaaatttttgatgaagcaaaaacagcccaggaaaaagattctttgataacacctcatgtttctcggtcaagcactcccagagagtcaccatgtggcaaaattgctgtagctgtattagaagaaaccacaagagagaggacagatgttattcagggtgatgatgtagcagatgcagcttcagaagttgaagtgtctagcacatctgaaacaacaacaaaagcagtggtttctcctccaaagtttgtatttggttcagagtctgttaaaagaatttttagtagtgaaaaatcaaacccatttgcatttggcaacagttctgccactgggtctttgtttggatttagttttaatgcacctttgaaaagtaacgatagtgaaactagttcagtagcccagagtggatctgaaagcaaagtggaacctaaaaaatgtgaactgtcaaagaactctgatatcgaacagtcttcagatagcaaagtcaaaaatctctctgcttcctttccaatggaagaatcttcaatcaactacacatttaaaacaccagaaaaggagcctccattatggcatgctgaatttaccaaagaagaattggttcagaagctcagttccaccacaaaaagtgcagatcagttaaacggcctgcttcgggaaacagaggcaaccagtgcagtccttatggagcaaattaagcttctcaaaagtgaaataagaagattggaaaggaatcaagaggagtctgcagctaacgtggaacacttgaagaacgtcttgctgcagttcattttcttgaagccaggtagtgagagagagagccttcttcctgttataaatacgatgttgcagctcagccctgaagaaaagggaaaacttgctgcggttgctcaaggtcttcaagaaacctccatacccaagaaaaaatagaaagcaaccatgttctactatggtgccaaaaatagttgaacatcgacatcaaaaagattctttctgtctgcttattcacatattctggtttgaattaaaagtgatgaaattatcctaaatacagttggccctctgtatccatgggttccacatccacaaattcaaccaactgtggatggaaaagacttgaaaaagatgagagaaaataacaatatgacaataaaacataatacaaataaaaacaatacagtataacaacgattacatagcatttacattatattagggattgcacaagagaaggtatgtaggttatatgcaaatactgcaccattttacataagggacttgagaagcatggattttggtagccacaggggtcctggaaccaatccctcacagacacagacggacactttacagtagatgaacacaaagatgaaaggaaaagtctgacctaggtttgcggggagaagtggaactccatttttgacaggtgatgccattttttgttttggacatcgtccctctgtagttctttccattcccagtcttgcactctgaaagatacactgaaggaaagtccacacagtggtcaaagtctttcacaagacaccacgtgaaggtctgcacagcacagtcacattgagaaaaagatctcatgcaccagaccccctgtttctgctttctaaaagatcatcttttgcacctgcaaaaaggctgcagtaaactgggccattccatactttgattcatgtattcaaatgctacttatgagctctctgtgtattgagccccaccaggatgctggggacacacggggcacagtgcagccagaggcttggccatcatagagctcacattctagtggaatcagacaggggggttacaggaaatattcaagtaaacaatataaaatgagatcacttgatgatacatggatacatgttacatacatgatgagacagagtaagagaatggggaaagggtttttagatgggggaatggcaggcttttccgaggctgaaagagatccaacccacttctatttcttcaggctcccagtgatatgaaaaagtgccaaacaggactataaaattgtggtctactgtaaatggtttgcagtaaaagttctcaaccagcttccactcaaccaactcaccagttagacaatgggccctctcctgtgtttaaaacagtccggtgcccacctgggtccacatgcagctggcaggtgtttgctagtgtgcccacccatgtctgttccccccacgtgagttatgtgcttacaacgagtcgtttctttgcattttccaactttcttacatttatatttaattaaagatgatctaaactgagaaatgaatgtgaaaagaaacaaagctcttttttgtttggtttttaactaaattaaatgtttttaacaagt

SEQ ID NO: 25453 - DNA, 2453 bp, Homo sapiens
  source 1..2453: mol_type = unassigned DNA
tatttagatttgatgctgagataagtcagtggaaagaaaggggcttggggaacttaaaaattctcaaaaatgaggtcaatggcaaaccaagaatgctgatgcgaagagaccaagtactaaaagtgtgtgctaatcattggataacaactacaatgaacctgaagcccctctctggatcagatagagcatggatgtggttagccagtgatttctctgatggtgatgccaaactagagcggttggcagcacaatttaaaacaccagagctggctgaagaattcaagcagaaatttgaggaatgccagcggcttctgttagacataccacttcaaactccccataaacttgtagatactggcagagctgccaagctaatacagagagctgaagaaatgaagagtggactgaaagatttcaaaacgtttttgacaaatgatcaaacaaaagtcactgaggaagaaaataagggttcaggtacaggtgcagccggtgcctcagacacaacaataaaacccaatcctgaaaacactgggcccacattagaatgggataactatgatttaagggaagatgctttggatgataatgttagtagtagctcagtacatgattctccgttggcaagtagccctgtgagaaaaaatattttccgctttgatgagtcaacaacaggatttaacttcagttttaaatctgctttgagtctatctaagtctcctgccaagttgaatcagagtgggacttcagttggcactgatgaagaatctgatgttactcaagaagaagagagagatggacagtactttgaacctgttgttcctttacctgatctagttgaagtatccagtggtgaggaaaatgaacaagttgtttttagtcacagggcagaactctacagatatgataaagatgttggtcaatggaaagaaaggggcattggtgatataaagattttacagaattatgataataagcaagttcgtatagtgatgagaagggaccaagtattaaaactttgtgccaatcacagaataactccagacatgagtttgcaaaatatgaaagggacagaaagagtatgggtgtggactgcatgtgattttgcagatggagaaagaaaagtagagcatttagctgttcgttttaaactacaggatgttgcagactcatttaagaaaatttttgatgaagcaaaaacagcccaggaaaaagattctttgataacacctcatgtttctcggtcaagcactcccagagagtcaccatgtggcaaaattgctgtagctgtattagaagaaaccacaagagagaggacagatgttattcagggtgatgatgtagcagatgcagcttcagaagttgaagtgtctagcacatctgaaacaacaacaaaagcagtggtttctcctccaaagtttgtatttggttcagagtctgttaaaagaatttttagtagtgaaaaatcaaacccatttgcatttggcaacagttctgccactgggtctttgtttggatttagttttaatgcacctttgaaaagtaacgatagtgaaactagttcagtagcccagagtggatctgaaagcaaagtggaacctaaaaaatgtgaactgtcaaagaactctgatatcgaacagtcttcagatagcaaagtcaaaaatctctctgcttcctttccaatggaagaatcttcaatcaactacacatttaaaacaccagaaaaggagcctccattatggcatgctgaatttaccaaagaagaattggttcagaagctcagttccaccacaaaaagtgcagatcagttaaacggcctgcttcgggaaacagaggcaaccagtgcagtccttatggagcaaattaagcttctcaaaagtgaaataagaagattggaaaggaatcaagaggagtctgcagctaacgtggaacacttgaagaacgtcttgctgcagttcattttcttgaagccaggtagtgagagagagccttcttcctgttataaatacgatgttgcagctcagccctgaagaaaagggaaaacttgctgcggttgctcaaggtcttcaagaaacctccatacccaagaaaaaatagaaagcaaccatgttctactatggtgccaaaaatagttgaacatcgacatcaaaaagattctttctgtctgcttattcacatattctggtttgaattaaaagtgatgaaattatcctaaatacagttggccctctgtatccatgggttccacatccacaaattcaaccaactgtggatggaaaagacttgaaaaagatgagagaaaataacaatatgacaataaaacataatacaaataaaaacaatacagtataacaacgattacatagcatttacattatattagggattgcacaagagaaggtatgtaggttatatgcaaatactgcaccattttacataagggacttgagaagcat

SEQ ID NO: 25454 - DNA, 6697 bp, Homo sapiens
  source 1..6697: mol_type = unassigned DNA
atttgtgacttgtctcatgaacgtgatgggttttaacacagaccgcttagcatggactagaaataagttgagaggattctattttgcaaagctgtattatgaagctaaagaatatgatcttgctaaaaaatacgtatgtacttaccttagtgtgcaagagagggatcccagagctcacagatttctgggtcttctttatgaattggaagaaaacacagagaaagccgttgaatgttacaggcgttcactggaattaaacccaccacaaaaagatcttgtgttgaagattgcagaattgctttgtaaaaatgatgttactgatggaagagcaaaatactgggttgaaagggcagcgaaacttttcccaggaagtcctgcaatttataaactaaaggaacatcttctagattgtgaaggtgaagatggatggaataaactttttgactggattcagtcagaactttatgtaagacctgatgacgtccatatgaacatccggctagtggagttgtatcgctcaaataaaagattgaaggatgctgtggcccgctgccatgaggcagagaggaacatagctttgcgttcaagtttagagtggaattcgtgtgttgtacagacccttaaggaatatctggagtctttacagtgtttggagtctgataaaagtgactggcgagcaaccaatacagacttactgctggcctatgctaatcttatgcttcttacgctttccactagagatgtgcaggaaagtagagaattactggaaagttttgatagtgctcttcagtctgcaaaatcttctttgggtggaaatgatgaactgtcagctactttcttagaaatgaaaggacatttctacatgcatgctggttctctgctcttgaagatgggtcagcatggtaataatgttcaatggcaagctctttctgagctggctgcattgtgctatgtcatagcatttcaggttccaagaccaaagattaaattaataaaaggtgaagctggacaaaatctgctggaaatgatggcctgtgaccgactgagccaatcagggcatatgttgctaaacttaagtcgtggcaagcaagattttttaaaagaggttgttgaaacttttgccaacaaaagcgggcagtctgtgttatataatgctctgttttctagtcagtcatctaaggatacatcttttcttggtagcgatgatattggaaacattgatgtacaagaaccagagcttgaagatttggctagatacgatgttggtgctattcaagcacataatggtagtcttcagcaccttacttggcttggcttacagtggaattcattgcctgctttacctggaatccgaaaatggctaaaacagcttttccatcatttgccccaggaaacctcaaggcttgaaacaaatgcacctgaatcaatatgtattttagatcttgaagtatttctccttggagtagtatataccagccacttacaattaaaggagaaatgtaattctcaccacagctcctatcagccgttatgcctgccccttcctgtgtgtaaacggctttgtacagagagacaaaaatcttggtgggatgcggtttgtactctgattcacagaaaagcagtacctggaaactcagcagaattgagacttgtagttcagcatgaaataaacactctaagagcccaggaaaaacatggccttcaacctgctctgcttgtacattgggcaaaatgccttcagaaaatgggcaggggtcttaattcttcttatgatcaacaagaatacatagggagaagtgttcattattggaagaaagttttgccattgttgaagataataaagaagaacagtattcctgaacctattgatcctctgtttaaacattttcatagtgtagacattcaggcatcagaaattgttgagtatgaagaagatgcacacataacttttgctatattggatgcagtacatggaaatatagaagatgctgtgactgcttttgaatctataaaaagtgttgtttcttattggaatcttgcactgatttttcacaggaaagcagaagacattgaaaatgatgccgtttttcctgaagaacaagaagaatgcaaaaattatctgagaaagaccagggactacctaataaagattatagatgacagtgattcaaatctttcagtggtcaagaaattgcctgtgcccctggagtctgtaaaagagatgcttaagtcagtcatgcaggaactcgaagactatagtgaaggaggtcctctctataaaaatggttctttgcgaaatgcagattcagaaataaaacattctacaccatctcctaccaaatattcactatcaccaagtaaaagttacaagtattctcccaaaacaccacctcgatgggcagaagatcagaattctttacggaaaatgatttgccaagaagtaaaggccattacgaaactaaatagcagtaagtcagcatcccgtcatcgttggcccacagagaattatggaccagactcggtgcctgatggatatcaggggtcacagacatttcatggggctccactaacagttgcaactactggcccttcagtatattatagtcagtcaccagcatataattcccagtatcttctcagaccagcagctaatgttactcccacaaagggttcttctaatacagaatttaagtcaaccaaagaaggattttccatcgctgtgtctgctgatggatttaaatttggcatttcggaaccaggaaatcaagaaaagaaaagtgaaaagcctcttgaaaatgatactggcttccaggctcaggatattagtggccagaagaatggccgtggtgtgatttttggccaaacaagtagcacttttacatttgcagatgttgcaaaatcaacttcaggagaaggatttcagtttggcaaaaaagaccccaatttcaagggattttcaggtgctggagaaaaattattctcatcacaatgcggtaaaatggccaataaagcaaacacttccggtgactttgagaaagatgatgatgcctgtaagactgaggacagcgatgacatccattttgaaccagtagttcaaatgcctgaaaaagtagaacttgtaacaggagaagaaggtgaaaaagttctgtattcacagggggtaaaactatttagatttgatgctgagataagtcagtggaaagaaaggggcttggggaacttaaaaattctcaaaaatgaggtcaatggcaaaccaagaatgctgatgcgaagagaccaagtactaaaagtgtgtgctaatcattggataacaactacaatgaacctgaagcccctctctggatcagatagagcatggatgtggttagccagtgatttctctgatggtgatgccaaactagagcggttggcagcacaatttaaaacaccagagctggctgaagaattcaagcagaaatttgaggaatgccagcggcttctgttagacataccacttcaaactccccataaacttgtagatactggcagagctgccaagctaatacagagagctgaagaaatgaagagtggactgaaagatttcaaaacgtttttgacaaatgatcaaacaaaagtcactgaggaagaaaataagggttcaggtacaggtgcagccggtgcctcagacacaacaataaaacccaatcctgaaaacactgggcccacattagaatgggataactatgatttaagggaagatgctttggatgataatgttagtagtagctcagtacatgattctccgttggcaagtagccctgtgagaaaaaatattttccgctttgatgagtcaacaacaggatttaacttcagttttaaatctgctttgagtctatctaagtctcctgccaagttgaatcagagtgggacttcagttggcactgatgaagaatctgatgttactcaagaagaagagagagatggacagtactttgaacctgttgttcctttacctgatctagttgaagtatccagtggtgaggaaaatgaacaagttgtttttagtcacagggcagaactctacagatatgataaagatgttggtcaatggaaagaaaggggcattggtgatataaagattttacagaattatgataataagcaagttcgtatagtgatgagaagggaccaagtattaaaactttgtgccaatcacagaataactccagacatgagtttgcaaaatatgaaagggacagaaagagtatgggtgtggactgcatgtgattttgcagatggagaaagaaaagtagagcatttagctgttcgttttaaactacaggatgttgcagactcatttaagaaaatttttgatgaagcaaaaacagcccaggaaaaagattctttgataacacctcatgtttctcggtcaagcactcccagagagtcaccatgtggcaaaattgctgtagctgtattagaagaaaccacaagagagaggacagatgttattcagggtgatgatgtagcagatgcagcttcagaagttgaagtgtctagcacatctgaaacaacaacaaaagcagtggtttctcctccaaagtttgtatttggttcagagtctgttaaaagaatttttagtagtgaaaaatcaaacccatttgcatttggcaacagttctgccactgggtctttgtttggatttagttttaatgcacctttgaaaagtaacgatagtgaaactagttcagtagcccagagtggatctgaaagcaaagtggaacctaaaaaatgtgaactgtcaaagaactctgatatcgaacagtcttcagatagcaaagtcaaaaatctctctgcttcctttccaatggaagaatcttcaatcaactacacatttaaaacaccagaaaaggagcctccattatggcatgctgaatttaccaaagaagaattggttcagaagctcagttccaccacaaaaagtgcagatcagttaaacggcctgcttcgggaaacagaggcaaccagtgcagtccttatggagcaaattaagcttctcaaaagtgaaataagaagattggaaaggaatcaagaggagtctgcagctaacgtggaacacttgaagaacgtcttgctgcagttcattttcttgaagccaggtagtgagagagagagccttcttcctgttataaatacgatgttgcagctcagccctgaagaaaagggaaaacttgctgcggttgctcaaggtcttcaagaaacctccatacccaagaaaaaatagaaagcaaccatgttctactatggtgccaaaaatagttgaacatcgacatcaaaaagattctttctgtctgcttattcacatattctggtttgaattaaaagtgatgaaattatcctaaatacagttggccctctgtatccatgggttccacatccacaaattcaaccaactgtggatggaaaagacttgaaaaagatgagagaaaataacaatatgacaataaaacataatacaaataaaaacaatacagtataacaacgattacatagcatttacattatattagggattgcacaagagaaggtatgtaggttatatgcaaatactgcaccattttacataagggacttgagaagcatggattttggtagccacaggggtcctggaaccaatccctcacagacacagacggacactttacagtagatgaacacaaagatgaaaggaaaagtctgacctaggtttgcggggagaagtggaactccatttttgacaggtgatgccattttttgttttggacatcgtccctctgtagttctttccattcccagtcttgcactctgaaagatacactgaaggaaagtccacacagtggtcaaagtctttcacaagacaccacgtgaaggtctgcacagcacagtcacattgagaaaaagatctcatgcaccagaccccctgtttctgctttctaaaagatcatcttttgcacctgcaaaaaggctgcagtaaactgggccattccatactttgattcatgtattcaaatgctacttatgagctctctgtgtattgagccccaccaggatgctggggacacacggggcacagtgcagccagaggcttggccatcatagagctcacattctagtggaatcagacaggggggttacaggaaatattcaagtaaacaatataaaatgagatcacttgatgatacatggatacatgttacatacatgatgagacagagtaagagaatggggaaagggtttttagatgggggaatggcaggcttttccgaggctgaaagagatccaacccacttctatttcttcaggctcccagtgatatgaaaaagtgccaaacaggactataaaattgtggtctactgtaaatggtttgcagtaaaagttctcaaccagcttccactcaaccaactcaccagttagacaatgggccctctcctgtgtttaaaacagtccggtgcccacctgggtccacatgcagctggcaggtgtttgctagtgtgcccacccatgtctgttccccccacgtgagttatgtgcttacaacgagtcgtttctttgcattttccaactttcttacatttatatttaattaaagatgatctaaactgagaaatgaatgtgaaaagaaacaaagctcttttttgtttggtttttaactaaattaaatgtttttaacaagttgaaa

SEQ ID NO: 25455 - DNA, 5498 bp, Homo sapiens
  source 1..5498: mol_type = unassigned DNA
ctggtttcacgcgtctcgggagccaggttggcggtgcgatgaggcgcagcaaagcctacggggagcggtacctcgcctcggtgcagggctccgccccgtcgcctggaaagaagttgagaggattctattttgcaaagctgtattatgaagctaaagaatatgatcttgctaaaaaatacgtatgtacttaccttagtgtgcaagagagggatcccagagctcacagatttctgggtcttctttatgaattggaagaaaacacagagaaagccgttgaatgttacaggcgttcactggaattaaacccaccacaaaaagatcttgtgttgaagattgcagaattgctttgtaaaaatgatgttactgatggaagagcaaaatactgggttgaaagggcagcgaaacttttcccaggaagtcctgcaatttataaactaaaggaacatcttctagattgtgaaggtgaagatggatggaataaactttttgactggattcagtcagaactttatgtaagacctgatgacgtccatatgaacatccggctagtggagttgtatcgctcaaataaaagattgaaggatgctgtggcccgctgccatgaggcagagaggaacatagctttgcgttcaagtttagagtggaattcgtgtgttgtacagacccttaaggaatatctggagtctttacagtgtttggagtctgataaaagtgactggcgagcaaccaatacagacttactgctggcctatgctaatcttatgcttcttacgctttccactagagatgtgcaggaaagtagagaattactggaaagttttgatagtgctcttcagtctgcaaaatcttctttgggtggaaatgatgaactgtcagctactttcttagaaatgaaaggacatttctacatgcatgctggttctctgctcttgaagatgggtcagcatggtaataatgttcaatggcaagctctttctgagctggctgcattgtgctatgtcatagcatttcaggttccaagaccaaagattaaattaataaaaggtgaagctggacaaaatctgctggaaatgatggcctgtgaccgactgagccaatcagggcatatgttgctaaacttaagtcgtggcaagcaagattttttaaaagaggttgttgaaacttttgccaacaaaagcgggcagtctgtgttatataatgctctgttttctagtcagtcatctaaggatacatcttttcttggtagcgatgatattggaaacattgatgtacaagaaccagagcttgaagatttggctagatacgatgttggtgctattcaagcacataatggtagtcttcagcaccttacttggcttggcttacagtggaattcattgcctgctttacctggaatccgaaaatggctaaaacagcttttccatcatttgccccaggaaacctcaaggcttgaaacaaatgcacctgaatcaatatgtattttagatcttgaagtatttctccttggagtagtatataccagccacttacaattaaaggagaaatgtaattctcaccacagctcctatcagccgttatgcctgccccttcctgtgtgtaaacggctttgtacagagagacaaaaatcttggtgggatgcggtttgtactctgattcacagaaaagcagtacctggaaactcagcagaattgagacttgtagttcagcatgaaataaacactctaagagcccaggaaaaacatggccttcaacctgctctgcttgtacattgggcaaaatgccttcagaaaatgggcaggggtcttaattcttcttatgatcaacaagaatacatagggagaagtgttcattattggaagaaagttttgccattgttgaagataataaagaagaacagtattcctgaacctattgatcctctgtttaaacattttcatagtgtagacattcaggcatcagaaattgttgagtatgaagaagatgcacacataacttttgctatattggatgcagtacatggaaatatagaagatgctgtgactgcttttgaatctataaaaagtgttgtttcttattggaatcttgcactgatttttcacaggaaagcagaagacattgaaaatgatgccgtttttcctgaagaacaagaagaatgcaaaaattatctgagaaagaccagggactacctaataaagattatagatgacagtgattcaaatctttcagtggtcaagaaattgcctgtgcccctggagtctgtaaaagagatgcttaagtcagtcatgcaggaactcgaagactatagtgaaggaggtcctctctataaaaatggttctttgcgaaatgcagattcagaaataaaacattctacaccatctcctaccaaatattcactatcaccaagtaaaagttacaagtattctcccaaaacaccacctcgatgggcagaagatcagaattctttacggaaaatgatttgccaagaagtaaaggccattacgaaactaaatagcagtaagtcagcatcccgtcatcgttggcccacagagaattatggaccagactcggtgcctgatggatatcaggggtcacagacatttcatggggctccactaacagttgcaactactggcccttcagtatattatagtcagtcaccagcatataattcccagtatcttctcagaccagcagctaatgttactcccacaaagggttcttctaatacagaatttaagtcaaccaaagaaggattttccatcgctgtgtctgctgatggatttaaatttggcatttcggaaccaggaaatcaagaaaagaaaagtgaaaagcctcttgaaaatgatactggcttccaggctcaggatattagtggccagaagaatggccgtggtgtgatttttggccaaacaagtagcacttttacatttgcagatgttgcaaaatcaacttcaggagaaggatttcagtttggcaaaaaagaccccaatttcaagggattttcaggtgctggagaaaaattattctcatcacaatgcggtaaaatggccaataaagcaaacacttccggtgactttgagaaagatgatgatgcctgtaagactgaggacagcgatgacatccattttgaaccagtagttcaaatgcctgaaaaagtagaacttgtaacaggagaagaaggtgaaaaagttctgtattcacagggggtaaaactatttagatttgatgctgagataagtcagtggaaagaaaggggcttggggaacttaaaaattctcaaaaatgaggtcaatggcaaaccaagaatgctgatgcgaagagaccaagtactaaaagtgtgtgctaatcattggataacaactacaatgaacctgaagcccctctctggatcagatagagcatggatgtggttagccagtgatttctctgatggtgatgccaaactagagcggttggcagcacaatttaaaacaccagagctggctgaagaattcaagcagaaatttgaggaatgccagcggcttctgttagacataccacttcaaactccccataaacttgtagatactggcagagctgccaagctaatacagagagctgaagaaatgaagagtggactgaaagatttcaaaacgtttttgacaaatgatcaaacaaaagtcactgaggaagaaaataagggttcaggtacaggtgcagccggtgcctcagacacaacaataaaacccaatcctgaaaacactgggcccacattagaatgggataactatgatttaagggaagatgctttggatgataatgttagtagtagctcagtacatgattctccgttggcaagtagccctgtgagaaaaaatattttccgctttgatgagtcaacaacaggatttaacttcagttttaaatctgctttgagtctatctaagtctcctgccaagttgaatcagagtgggacttcagttggcactgatgaagaatctgatgttactcaagaagaagagagagatggacagtactttgaacctgttgttcctttacctgatctagttgaagtatccagtggtgaggaaaatgaacaagttgtttttagtcacatggcagaactctacagatatgataaagatgttggtcaatggaaagaaaggggcattggtgatataaagattttacagaattatgataataagcaagttcgtatagtgatgagaagggaccaagtattaaaactttgtgccaatcacagaataactccagacatgagtttgcaaaatatgaaagggacagaaagagtatgggtgtggactgcatgtgattttgcagatggagaaagaaaagtagagcatttagctgttcgttttaaactacaggatgttgcagactcatttaagaaaatttttgatgaagcaaaaacagcccaggaaaaagattctttgataacacctcatgtttctcggtcaagcactcccagagagtcaccatgtggcaaaattgctgtagctgtattagaagaaaccacaagagagaggacagatgttattcagggtgatgatgtagcagatgcagcttcagaagttgaagtgtctagcacatctgaaacaacaacaaaagcagtggtttctcctccaaagtttgtatttggttcagagtctgttaaaagaatttttagtagtgaaaaatcaaacccatttgcatttggcaacagttctgccactgggtctttgtttggatttagttttaatgcacctttgaaaagtaacgatagtgaaactagttcagtagcccagagtggatctgaaagcaaagtggaacctaaaaaatgtgaactgtcaaagaactctgatatcgaacagtcttcagatagcaaagtcaaaaatctctctgcttcctttccaatggaagaatcttcaatcaactacacatttaaaacaccagaaaaggagcctccattatggcatgctgaatttaccaaagaagaattggttcagaagctcagttccaccacaaaaagtgcagatcagttaaacggcctgcttcgggaaacagaggcaaccagtgcagtccttatggagcaaattaagcttctcaaaagtgaaataagaagattggaaaggaatcaagaggagtctgcagctaacgtggaacacttgaagaacgtcttgctgcagttcattttcttgaagccaggtagtgagagagagagccttcttcctgttataaatacgatgttgcagctcagccctgaagaaaagggaaaacttgctgcggttgctcaaggtcttcaagaaacctccatacccaagaaaaaatagaaagcaaccatgttctactatggtgccaaaaatagttgaacatcgacatcaaaaagattctttctgtctgcttattcacatattctggtttgaattaaaagtgatgaaattatcctaaatacagttggccctctgtatccatgggttccacatccacaaattcaaccaactgtggatggaaaagacttg

SEQ ID NO: 25456 - DNA, 6931 bp, Homo sapiens
  source 1..6931: mol_type = unassigned DNA
caagacaccctcagagcacagggtgctgccaagagcccggccgagtgcagctcgagcgccgacgtcgccaaggatacacagtgctgacgcagtacacaagtgcgtcacagtggtcctccgccggctacgtcagtggctttcaggcgctttcctgttggaattggcgactgctgcggggctgagcgctggtttcacgcgtctcgggagccaggttggcggtgcgatgaggcgcagcaaagcctacggggagcggtacctcgcctcggtgcagggctccgccccgtcgcctggaaagaagttgagaggattctattttgcaaagctgtattatgaagctaaagaatatgatcttgctaaaaaatacgtatgtacttaccttagtgtgcaagagagggatcccagagctcacagatttctgggtcttctttatgaattggaagaaaacacagagaaagccgttgaatgttacaggcgttcactggaattaaacccaccacaaaaagatcttgtgttgaagattgcagaattgctttgtaaaaatgatgttactgatggaagagcaaaatactgggttgaaagggcagcgaaacttttcccaggaagtcctgcaatttataaactaaaggaacatcttctagattgtgaaggtgaagatggatggaataaactttttgactggattcagtcagaactttatgtaagacctgatgacgtccatatgaacatccggctagtggagttgtatcgctcaaataaaagattgaaggatgctgtggcccgctgccatgaggcagagaggaacatagctttgcgttcaagtttagagtggaattcgtgtgttgtacagacccttaaggaatatctggagtctttacagtgtttggagtctgataaaagtgactggcgagcaaccaatacagacttactgctggcctatgctaatcttatgcttcttacgctttccactagagatgtgcaggaaagtagagaattactggaaagttttgatagtgctcttcagtctgcaaaatcttctttgggtggaaatgatgaactgtcagctactttcttagaaatgaaaggacatttctacatgcatgctggttctctgctcttgaagatgggtcagcatggtaataatgttcaatggcaagctctttctgagctggctgcattgtgctatgtcatagcatttcaggttccaagaccaaagattaaattaataaaaggtgaagctggacaaaatctgctggaaatgatggcctgtgaccgactgagccaatcagggcatatgttgctaaacttaagtcgtggcaagcaagattttttaaaagaggttgttgaaacttttgccaacaaaagcgggcagtctgtgttatataatgctctgttttctagtcagtcatctaaggatacatcttttcttggtagcgatgatattggaaacattgatgtacaagaaccagagcttgaagatttggctagatacgatgttggtgctattcaagcacataatggtagtcttcagcaccttacttggcttggcttacagtggaattcattgcctgctttacctggaatccgaaaatggctaaaacagcttttccatcatttgccccaggaaacctcaaggcttgaaacaaatgcacctgaatcaatatgtattttagatcttgaagtatttctccttggagtagtatataccagccacttacaattaaaggagaaatgtaattctcaccacagctcctatcagccgttatgcctgccccttcctgtgtgtaaacggctttgtacagagagacaaaaatcttggtgggatgcggtttgtactctgattcacagaaaagcagtacctggaaactcagcagaattgagacttgtagttcagcatgaaataaacactctaagagcccaggaaaaacatggccttcaacctgctctgcttgtacattgggcaaaatgccttcagaaaatgggcaggggtcttaattcttcttatgatcaacaagaatacatagggagaagtgttcattattggaagaaagttttgccattgttgaagataataaagaagaacagtattcctgaacctattgatcctctgtttaaacattttcatagtgtagacattcaggcatcagaaattgttgagtatgaagaagatgcacacataacttttgctatattggatgcagtacatggaaatatagaagatgctgtgactgcttttgaatctataaaaagtgttgtttcttattggaatcttgcactgatttttcacaggaaagcagaagacattgaaaatgatgccgtttttcctgaagaacaagaagaatgcaaaaattatctgagaaagaccagggactacctaataaagattatagatgacagtgattcaaatctttcagtggtcaagaaattgcctgtgcccctggagtctgtaaaagagatgcttaagtcagtcatgcaggaactcgaagactatagtgaaggaggtcctctctataaaaatggttctttgcgaaatgcagattcagaaataaaacattctacaccatctcctaccaaatattcactatcaccaagtaaaagttacaagtattctcccaaaacaccacctcgatgggcagaagatcagaattctttacggaaaatgatttgccaagaagtaaaggccattacgaaactaaatagcagtaagtcagcatcccgtcatcgttggcccacagagaattatggaccagactcggtgcctgatggatatcaggggtcacagacatttcatggggctccactaacagttgcaactactggcccttcagtatattatagtcagtcaccagcatataattcccagtatcttctcagaccagcagctaatgttactcccacaaagggttcttctaatacagaatttaagtcaaccaaagaaggattttccatcgctgtgtctgctgatggatttaaatttggcatttcggaaccaggaaatcaagaaaagaaaagtgaaaagcctcttgaaaatgatactggcttccaggctcaggatattagtggccagaagaatggccgtggtgtgatttttggccaaacaagtagcacttttacatttgcagatgttgcaaaatcaacttcaggagaaggatttcagtttggcaaaaaagaccccaatttcaagggattttcaggtgctggagaaaaattattctcatcacaatgcggtaaaatggccaataaagcaaacacttccggtgactttgagaaagatgatgatgcctgtaagactgaggacagcgatgacatccattttgaaccagtagttcaaatgcctgaaaaagtagaacttgtaacaggagaagaaggtgaaaaagttctgtattcacagggggtaaaactatttagatttgatgctgagataagtcagtggaaagaaaggggcttggggaacttaaaaattctcaaaaatgaggtcaatggcaaaccaagaatgctgatgcgaagagaccaagtactaaaagtgtgtgctaatcattggataacaactacaatgaacctgaagcccctctctggatcagatagagcatggatgtggttagccagtgatttctctgatggtgatgccaaactagagcggttggcagcacaatttaaaacaccagagctggctgaagaattcaagcagaaatttgaggaatgccagcggcttctgttagacataccacttcaaactccccataaacttgtagatactggcagagctgccaagctaatacagagagctgaagaaatgaagagtggactgaaagatttcaaaacgtttttgacaaatgatcaaacaaaagtcactgaggaagaaaataagggttcaggtacaggtgcagccggtgcctcagacacaacaataaaacccaatcctgaaaacactgggcccacattagaatgggataactatgatttaagggaagatgctttggatgataatgttagtagtagctcagtacatgattctccgttggcaagtagccctgtgagaaaaaatattttccgctttgatgagtcaacaacaggatttaacttcagttttaaatctgctttgagtctatctaagtctcctgccaagttgaatcagagtgggacttcagttggcactgatgaagaatctgatgttactcaagaagaagagagagatggacagtactttgaacctgttgttcctttacctgatctagttgaagtatccagtggtgaggaaaatgaacaagttgtttttagtcacatggcagaactctacagatatgataaagatgttggtcaatggaaagaaaggggcattggtgatataaagattttacagaattatgataataagcaagttcgtatagtgatgagaagggaccaagtattaaaactttgtgccaatcacagaataactccagacatgagtttgcaaaatatgaaagggacagaaagagtatgggtgtggactgcatgtgattttgcagatggagaaagaaaagtagagcatttagctgttcgttttaaactacaggatgttgcagactcatttaagaaaatttttgatgaagcaaaaacagcccaggaaaaagattctttgataacacctcatgtttctcggtcaagcactcccagagagtcaccatgtggcaaaattgctgtagctgtattagaagaaaccacaagagagaggacagatgttattcagggtgatgatgtagcagatgcagcttcagaagttgaagtgtctagcacatctgaaacaacaacaaaagcagtggtttctcctccaaagtttgtatttggttcagagtctgttaaaagaatttttagtagtgaaaaatcaaacccatttgcatttggcaacagttctgccactgggtctttgtttggatttagttttaatgcacctttgaaaagtaacgatagtgaaactagttcagtagcccagagtggatctgaaagcaaagtggaacctaaaaaatgtgaactgtcaaagaactctgatatcgaacagtcttcagatagcaaagtcaaaaatctctctgcttcctttccaatggaagaatcttcaatcaactacacatttaaaacaccagaaaaggagcctccattatggcatgctgaatttaccaaagaagaattggttcagaagctcagttccaccacaaaaagtgcagatcagttaaacggcctgcttcgggaaacagaggcaaccagtgcagtccttatggagcaaattaagcttctcaaaagtgaaataagaagattggaaaggaatcaagaggagtctgcagctaacgtggaacacttgaagaacgtcttgctgcagttcattttcttgaagccaggtagtgagagagagagccttcttcctgttataaatacgatgttgcagctcagccctgaagaaaagggaaaacttgctgcggttgctcaaggtcttcaagaaacctccatacccaagaaaaaatagaaagcaaccatgttctactatggtgccaaaaatagttgaacatcgacatcaaaaagattctttctgtctgcttattcacatattctggtttgaattaaaagtgatgaaattatcctaaatacagttggccctctgtatccatgggttccacatccacaaattcaaccaactgtggatggaaaagacttgaaaaagatgagagaaaataacaatatgacaataaaacataatacaaataaaaacaatacagtataacaacgattacatagcatttacattatattagggattgcacaagagaaggtatgtaggttatatgcaaatactgcaccattttacataagggacttgagaagcatggattttggtagccacaggggtcctggaaccaatccctcacagacacagacggacactttacagtagatgaacacaaagatgaaaggaaaagtctgacctaggtctgcggggagaagtggaactccatttttgacaggtgatgccattttttgttttggacatcgtccctctgtagttctttccattcccagtcttgcactctgaaagatacactgaaggaaagtccacacagtggtcaaagtctttcacaagacaccacgtgaaggtctgcacagcacagtcacattgagaaaaagatctcatgcaccagaccccctgtttctgctttctaaaagatcatcttttgcacctgcaaaaaggctgcagtaaactgggccattccatactttgattcatgtattcaaatgctacttatgagctctctgtgtattgagccccaccaggatgctggggacacacggggcacagtgcagccagaggcttggccatcatagagctcacattctagtggaatcagacaggggggttacaggaaatattcaagtaaacaatataaaatgagatcacttaatgatgatacatggatacatgttacatacatgatgagacagagtaagagaatggggaaagggtttttagatgggggaatggcaggcttttccgaggctgaaagagatccaacccacttctatttcttcaggctcccagtgatatgaaaaagtgccaaacaggactataaaattgtggtctactgtaaatggtttgcagtaaaagttctcaaccagcttccactcaaccaactcaccagttagacaatgggccctctcctgtgtttaaaacagtccggtgcccacctgggtccacatgcagctggcaggtgtttgctagtgtgcccacccatgtctgttccccccacgtgagttatgtgcttacaacgagtcgtttctttgcattttccaactttcttacatttatatttaattaaagatgatctaaactgagaaatgaatgtgaaaagaaacaaagctcttttttgtttggtttttaactaaattaaatgtttttaacaagttgaaa

SEQ ID NO: 25457 - DNA, 6695 bp, Homo sapiens
  source 1..6695: mol_type = unassigned DNA
atttgtgacttgtctcatgaacgtgatgggttttaacacagaccgcttagcatggactagaaataagttgagaggattctattttgcaaagctgtattatgaagctaaagaatatgatcttgctaaaaaatacgtatgtacttaccttagtgtgcaagagagggatcccagagctcacagatttctgggtcttctttatgaattggaagaaaacacagagaaagccgttgaatgttacaggcgttcactggaattaaacccaccacaaaaagatcttgtgttgaagattgcagaattgctttgtaaaaatgatgttactgatggaagagcaaaatactgggttgaaagggcagcgaaacttttcccaggaagtcctgcaatttataaactaaaggaacatcttctagattgtgaaggtgaagatggatggaataaactttttgactggattcagtcagaactttatgtaagacctgatgacgtccatatgaacatccggctagtggagttgtatcgctcaaataaaagattgaaggatgctgtggcccgctgccatgaggcagagaggaacatagctttgcgttcaagtttagagtggaattcgtgtgttgtacagacccttaaggaatatctggagtctttacagtgtttggagtctgataaaagtgactggcgagcaaccaatacagacttactgctggcctatgctaatcttatgcttcttacgctttccactagagatgtgcaggaaagtagagaattactggaaagttttgatagtgctcttcagtctgcaaaatcttctttgggtggaaatgatgaactgtcagctactttcttagaaatgaaaggacatttctacatgcatgctggttctctgctcttgaagatgggtcagcatggtaataatgttcaatggcaagctctttctgagctggctgcattgtgctatgtcatagcatttcaggttccaagaccaaagattaaattaataaaaggtgaagctggacaaaatctgctggaaatgatggcctgtgaccgactgagccaatcagggcatatgttgctaaacttaagtcgtggcaagcaagattttttaaaagaggttgttgaaacttttgccaacaaaagcgggcagtctgtgttatataatgctctgttttctagtcagtcatctaaggatacatcttttcttggtagcgatgatattggaaacattgatgtacaagaaccagagcttgaagatttggctagatacgatgttggtgctattcaagcacataatggtagtcttcagcaccttacttggcttggcttacagtggaattcattgcctgctttacctggaatccgaaaatggctaaaacagcttttccatcatttgccccaggaaacctcaaggcttgaaacaaatgcacctgaatcaatatgtattttagatcttgaagtatttctccttggagtagtatataccagccacttacaattaaaggagaaatgtaattctcaccacagctcctatcagccgttatgcctgccccttcctgtgtgtaaacggctttgtacagagagacaaaaatcttggtgggatgcggtttgtactctgattcacagaaaagcagtacctggaaactcagcagaattgagacttgtagttcagcatgaaataaacactctaagagcccaggaaaaacatggccttcaacctgctctgcttgtacattgggcaaaatgccttcagaaaatgggcaggggtcttaattcttcttatgatcaacaagaatacatagggagaagtgttcattattggaagaaagttttgccattgttgaagataataaagaagaacagtattcctgaacctattgatcctctgtttaaacattttcatagtgtagacattcaggcatcagaaattgttgagtatgaagaagatgcacacataacttttgctatattggatgcagtacatggaaatatagaagatgctgtgactgcttttgaatctataaaaagtgttgtttcttattggaatcttgcactgatttttcacaggaaagcagaagacattgaaaatgatgccgtttttcctgaagaacaagaagaatgcaaaaattatctgagaaagaccagggactacctaataaagattatagatgacagtgattcaaatctttcagtggtcaagaaattgcctgtgcccctggagtctgtaaaagagatgcttaagtcagtcatgcaggaactcgaagactatagtgaaggaggtcctctctataaaaatggttctttgcgaaatgcagattcagaaataaaacattctacaccatctcctaccaaatattcactatcaccaagtaaaagttacaagtattctcccaaaacaccacctcgatgggcagaagatcagaattctttacggaaaatgatttgccaagaagtaaaggccattacgaaactaaatagcagtaagtcagcatcccgtcatcgttggcccacagagaattatggaccagactcggtgcctgatggatatcaggggtcacagacatttcatggggctccactaacagttgcaactactggcccttcagtatattatagtcagtcaccagcatataattcccagtatcttctcagaccagcagctaatgttactcccacaaagggttcttctaatacagaatttaagtcaaccaaagaaggattttccatcgctgtgtctgctgatggatttaaatttggcatttcggaaccaggaaatcaagaaaagaaaagtgaaaagcctcttgaaaatgatactggcttccaggctcaggatattagtggccagaagaatggccgtggtgtgatttttggccaaacaagtagcacttttacatttgcagatgttgcaaaatcaacttcaggagaaggatttcagtttggcaaaaaagaccccaatttcaagggattttcaggtgctggagaaaaattattctcatcacaatgcggtaaaatggccaataaagcaaacacttccggtgactttgagaaagatgatgatgcctgtaagactgaggacagcgatgacatccattttgaaccagtagttcaaatgcctgaaaaagtagaacttgtaacaggagaagaaggtgaaaaagttctgtattcacagggggtaaaactatttagatttgatgctgagataagtcagtggaaagaaaggggcttggggaacttaaaaattctcaaaaatgaggtcaatggcaaaccaagaatgctgatgcgaagagaccaagtactaaaagtgtgtgctaatcattggataacaactacaatgaacctgaagcccctctctggatcagatagagcatggatgtggttagccagtgatttctctgatggtgatgccaaactagagcggttggcagcacaatttaaaacaccagagctggctgaagaattcaagcagaaatttgaggaatgccagcggcttctgttagacataccacttcaaactccccataaacttgtagatactggcagagctgccaagctaatacagagagctgaagaaatgaagagtggactgaaagatttcaaaacgtttttgacaaatgatcaaacaaaagtcactgaggaagaaaataagggttcaggtacaggtgcagccggtgcctcagacacaacaataaaacccaatcctgaaaacactgggcccacattagaatgggataactatgatttaagggaagatgctttggatgataatgttagtagtagctcagtacatgattctccgttggcaagtagccctgtgagaaaaaatattttccgctttgatgagtcaacaacaggatttaacttcagttttaaatctgctttgagtctatctaagtctcctgccaagttgaatcagagtgggacttcagttggcactgatgaagaatctgatgttactcaagaagaagagagagatggacagtactttgaacctgttgttcctttacctgatctagttgaagtatccagtggtgaggaaaatgaacaagttgtttttagtcacatggcagaactctacagatatgataaagatgttggtcaatggaaagaaaggggcattggtgatataaagattttacagaattatgataataagcaagttcgtatagtgatgagaagggaccaagtattaaaactttgtgccaatcacagaataactccagacatgagtttgcaaaatatgaaagggacagaaagagtatgggtgtggactgcatgtgattttgcagatggagaaagaaaagtagagcatttagctgttcgttttaaactacaggatgttgcagactcatttaagaaaatttttgatgaagcaaaaacagcccaggaaaaagattctttgataacacctcatgtttctcggtcaagcactcccagagagtcaccatgtggcaaaattgctgtagctgtattagaagaaaccacaagagagaggacagatgttattcagggtgatgatgtagcagatgcagcttcagaagttgaagtgtctagcacatctgaaacaacaacaaaagcagtggtttctcctccaaagtttgtatttggttcagagtctgttaaaagaatttttagtagtgaaaaatcaaacccatttgcatttggcaacagttctgccactgggtctttgtttggatttagttttaatgcacctttgaaaagtaacgatagtgaaactagttcagtagcccagagtggatctgaaagcaaagtggaacctaaaaaatgtgaactgtcaaagaactctgatatcgaacagtcttcagatagcaaagtcaaaaatctctctgcttcctttccaatggaagaatcttcaatcaactacacatttaaaacaccagaaaaggagcctccattatggcatgctgaatttaccaaagaagaattggttcagaagctcagttccaccacaaaaagtgcagatcagttaaacggcctgcttcgggaaacagaggcaaccagtgcagtccttatggagcaaattaagcttctcaaaagtgaaataagaagattggaaaggaatcaagaggagtctgcagctaacgtggaacacttgaagaacgtcttgctgcagttcattttcttgaagccaggtagtgagagagagagccttcttcctgttataaatacgatgttgcagctcagccctgaagaaaagggaaaacttgctgcggttgctcaaggtcttcaagaaacctccatacccaagaaaaaatagaaagcaaccatgttctactatggtgccaaaaatagttgaacatcgacatcaaaaagattctttctgtctgcttattcacatattctggtttgaattaaaagtgatgaaattatcctaaatacagttggccctctgtatccatgggttccacatccacaaattcaaccaactgtggatggaaaagacttgaaaaagatgagagaaaataacaatatgacaataaaacataatacaaataaaaacaatacagtataacaacgattacatagcatttacattatattagggattgcacaagagaaggtatgtaggttatatgcaaatactgcaccattttacataagggacttgagaagcatggattttggtagccacaggggtcctggaaccaatccctcacagacacagacggacactttacagtagatgaacacaaagatgaaaggaaaagtctgacctaggtctgcggggagaagtggaactccatttttgacaggtgatgccattttttgttttggacatcgtccctctgtagttctttccattcccagtcttgcactctgaaagatacactgaaggaaagtccacacagtggtcaaagtctttcacaagacaccacgtgaaggtctgcacagcacagtcacattgagaaaaagatctcatgcaccagaccccctgtttctgctttctaaaagatcatcttttgcacctgcaaaaaggctgcagtaaactgggccattccatactttgattcatgtattcaaatgctacttatgagctctctgtgtattgagccccaccaggatgctggggacacacggggcacagtgcagccagaggcttggccatcatagagctcacattctagtggaatcagacaggggggttacaggaaatattcaagtaaacaatataaaatgagatcacttaatgatgatacatggatacatgttacatacatgatgagacagagtaagagaatggggaaagggtttttagatgggggaatggcaggcttttccgaggctgaaagagatccaacccacttctatttcttcaggctcccagtgatatgaaaaagtgccaaacaggactataaaattgtggtctactgtaaatggtttgcagtaaaagttctcaaccagcttccactcaaccaactcaccagttagacaatgggccctctcctgtgtttaaaacagtccggtgcccacctgggtccacatgcagctggcaggtgtttgctagtgtgcccacccatgtctgttccccccacgtgagttatgtgcttacaacgagtcgtttctttgcattttccaactttcttacatttatatttaattaaagatgatctaaactgagaaatgaatgtgaaaagaaacaaagctcttttttgtttggtttttaactaaattaaatgtttttaacaagt

SEQ ID NO: 25458 - DNA, 2453 bp, Homo sapiens
  source 1..2453: mol_type = unassigned DNA
tatttagatttgatgctgagataagtcagtggaaagaaaggggcttggggaacttaaaaattctcaaaaatgaggtcaatggcaaaccaagaatgctgatgcgaagagaccaagtactaaaagtgtgtgctaatcattggataacaactacaatgaacctgaagcccctctctggatcagatagagcatggatgtggttagccagtgatttctctgatggtgatgccaaactagagcggttggcagcacaatttaaaacaccagagctggctgaagaattcaagcagaaatttgaggaatgccagcggcttctgttagacataccacttcaaactccccataaacttgtagatactggcagagctgccaagctaatacagagagctgaagaaatgaagagtggactgaaagatttcaaaacgtttttgacaaatgatcaaacaaaagtcactgaggaagaaaataagggttcaggtacaggtgcagccggtgcctcagacacaacaataaaacccaatcctgaaaacactgggcccacattagaatgggataactatgatttaagggaagatgctttggatgataatgttagtagtagctcagtacatgattctccgttggcaagtagccctgtgagaaaaaatattttccgctttgatgagtcaacaacaggatttaacttcagttttaaatctgctttgagtctatctaagtctcctgccaagttgaatcagagtgggacttcagttggcactgatgaagaatctgatgttactcaagaagaagagagagatggacagtactttgaacctgttgttcctttacctgatctagttgaagtatccagtggtgaggaaaatgaacaagttgtttttagtcacatggcagaactctacagatatgataaagatgttggtcaatggaaagaaaggggcattggtgatataaagattttacagaattatgataataagcaagttcgtatagtgatgagaagggaccaagtattaaaactttgtgccaatcacagaataactccagacatgagtttgcaaaatatgaaagggacagaaagagtatgggtgtggactgcatgtgattttgcagatggagaaagaaaagtagagcatttagctgttcgttttaaactacaggatgttgcagactcatttaagaaaatttttgatgaagcaaaaacagcccaggaaaaagattctttgataacacctcatgtttctcggtcaagcactcccagagagtcaccatgtggcaaaattgctgtagctgtattagaagaaaccacaagagagaggacagatgttattcagggtgatgatgtagcagatgcagcttcagaagttgaagtgtctagcacatctgaaacaacaacaaaagcagtggtttctcctccaaagtttgtatttggttcagagtctgttaaaagaatttttagtagtgaaaaatcaaacccatttgcatttggcaacagttctgccactgggtctttgtttggatttagttttaatgcacctttgaaaagtaacgatagtgaaactagttcagtagcccagagtggatctgaaagcaaagtggaacctaaaaaatgtgaactgtcaaagaactctgatatcgaacagtcttcagatagcaaagtcaaaaatctctctgcttcctttccaatggaagaatcttcaatcaactacacatttaaaacaccagaaaaggagcctccattatggcatgctgaatttaccaaagaagaattggttcagaagctcagttccaccacaaaaagtgcagatcagttaaacggcctgcttcgggaaacagaggcaaccagtgcagtccttatggagcaaattaagcttctcaaaagtgaaataagaagattggaaaggaatcaagaggagtctgcagctaacgtggaacacttgaagaacgtcttgctgcagttcattttcttgaagccaggtagtgagagagagccttcttcctgttataaatacgatgttgcagctcagccctgaagaaaagggaaaacttgctgcggttgctcaaggtcttcaagaaacctccatacccaagaaaaaatagaaagcaaccatgttctactatggtgccaaaaatagttgaacatcgacatcaaaaagattctttctgtctgcttattcacatattctggtttgaattaaaagtgatgaaattatcctaaatacagttggccctctgtatccatgggttccacatccacaaattcaaccaactgtggatggaaaagacttgaaaaagatgagagaaaataacaatatgacaataaaacataatacaaataaaaacaatacagtataacaacgattacatagcatttacattatattagggattgcacaagagaaggtatgtaggttatatgcaaatactgcaccattttacataagggacttgagaagcat

SEQ ID NO: 25459 - DNA, 5383 bp, Homo sapiens
  source 1..5383: mol_type = unassigned DNA
aggcgctttcctcttggaattggcgactgctgcggggctgagcgctggtctcacgcatctcgggagccaggttggtggcgcgatgagttgcagcaaggcctacggggagcggtacgtcgcctcggtgcagggctccgccccgtcgcctcgaaagaagtcaacgagaggattctattttgcaaagctgtattatgaagctaaagaatatgatcttgctaaaaaatacatatgtacttacattaatgtgcgagagatggatcccagagctcacagatttctgggtcttctttatgaattggaagaaaacacagagaaagccgttgaatgttacaggcgttcagtggaattaaacccaacacaaaaagatcttgtgttgaagattgcagaattgctttgtaaaaatgatgttactgatggaagagcagaatactgggtggaaagagcagcaaaacttttcccaggaagtcctgcaatttataaactaaaggaacagcttctagattgtgaaggtgaagatggatggaataaactttttgacttgattcagtcagaactttatgtaagacctgatgacgtccatgtgaacatccggctagtggagttgtatcgctcaactaaaagattgaaggatgctgtggcccgctgccatgaggcagagaggaacatagctttgcgttcaagtttagagtggaattcgtgtgttgtacagacccttaaggaatatctggagtctttacagtgtttggagtctgataaaagtgactggcgagcaaccaatacagacttactgctggcctatgctaatcttatgcttcttacgctttccactagagatgtgcaggaaagtagagaattactggaaagttttgatagtgctcttcagtctgcgaaatcttctttgggtggaaatgatgaactgtcagctactttcttagaaatgaaaggacatttctacatgcatgctggttctctgctcttgaagatgggtcagcatggtaataatgttcaatggcgagctctttctgagctggctgcattgtgctatctcatagcatttcaggttccaagaccaaagattaaattaataaaaggtgaagctggacaaaatctgctggaaatgatggcctgtgaccgactgagccaatcagggcacatgttgctaaacttaagtcgtggcaagcaagattttttaaaagtggttgttgaaacttttgccaacaaaagcgggcagtctgcattatatgatgctctgttttctagtcagtcacctaaggatacatcttttcttggtagcgatgatattggaaacattgatgtacaagaaccagagcttgaagatttggctagatacgatgttggtgctattcgagcacataatggtagtcttcagcaccttacttggcttggcttacagtggaattcattgcctgctttacctggaatccgaaaatggctaaaacagcttttccatcatttgccccaggaaacctcaaggcttgaaacaaatgcacctgaatcaatatgtattttagatcttgaagtatttctccttggagtagtatataccagccacttacaattaaaggagaaatgtaattctcaccacagctcctatcagccgttatgcctgccccttcctgtgtgtaaacagctttgtacagaaagacaaaaatcttggtgggatgcggtttgtactctgattcacagaaaagcagtacctggaaactcagcaaaattgagacttctagttcagcatgaaataaacactctaagagcccaggaaaaacatggccttcaacctgctctgcttgtacattgggcaaaatgccttcagaaaatgggcagcggtcttaattctttttatgatcaacgagaatacatagggagaagtgttcattattggaagaaagttttgccattgttgaagataataaaaaagaagaacagtattcctgaacctattgatcctctgtttaaacattttcatagtgtagacattcaggcatcagaaattgttgaatatgaagaagacgcacacgtaacttttgctatattggatgcagtaaatggaaatatagaagatgctatgactgcttttgaatctataaaaagtgttgtttcttattggaatcttgcactgatttttcacaggaaggcagaagacattgcaaatgatgccctttctcctgaagaacaagaagaatgcaaaaattatctgagaaagaccaggggctacctaataaagattttagatgacagtgattcaaatctttcagtggtcaagaaattgcctgtgcccctggagtctgtaaaagagatgcttaagtcagtcatgcaggaactcgaaaactatagtgaaggaggtcctctctataaaaatggttctttgcgaaatgcggattcagaaataaaacattctacaccatctcctaccaaatattcactatcaccaagtaaaagttacaagtattctcccaaaacaccacctcgatgggcagaagatcagaattctttactgaaaatgattcgccaagaagtaaaggccattaaggaagaaatgcaggagttgaaactaaatagcagtaagtcagcatcccatcatcgttggcccacagagaattatggaccagactcggtgcctgatggatatcaggggtcacagacatttcatggggctccactaacagttgcaactactggcccttcagtatattatagtcagtcaccagcatataattcccagtatcttctcagaccagcagctaatgttactcccacaaagggttcttctaatacagaatttaagtcaaccaaagaaggattttccatccctgtgtctgctgatggatttaaatttggcatttcggaaccaggaaatcaagaaaagaaaagtgaaaagcctcttgaaaatgatactggcttacaggctcaggatattagtggccggaagaagggccgtggtgtgatttttggccaaacaagtagcacttttacatttgcagatgttgcaaaatcaacttcaggagaaggatttcagtttggcaaaaaagacctcaatttcaagggattttcaggtgctggagaaaaattattctcatcacaatacggtaaaatggccaataaagcaaacacttccggtgactttgagaaagatgatgatgcctataagactgaggacagcgatgacatccattttgaaccagtagttcaaatgcctgaaaaagtagaacttgtaacaggagaagaaggtgaaaaagttctgtattcacagggggtaaaactatttagatttgatgctgaggtaagtcagtggaaagaaaggggcttggggaacttaaaaattctcaaaaacgaggtcaatggcaaagtaagaatgctgatgcaaagagaacaagtactaaaagtgtgtgctaatcattggataacgactacaatgaacctgaagcccctctctggatcagatagagcatggatgtggtcagccagtgatttctctgatggtgatgccaaactagagcgattggcagcaaaatttaaaacaccagagctggctgaagaattcaagcagaaatttgaggaatgccagcggcttctgttagacataccacttcaaactccccataaacttgtagatactggcagagctgccaagttaatacagagagctgaagaaatgaagagtggactgaaagatttcaaaacatttttgacaaatgatcaaacaaaagtcgctgaggaagaaaataagggttcaggtacaggtgcggccggtgcctcagacacaacaataaaacccaatgctgaaaacactgggcccacattagaatgggataactatgatttaagggaagatgctttggatgatagtgtcagtagtagctcagtacatgcttctccattggcaagtagccctgtgagaaaaaatcttttccactttgatgagtcaacaacaggatctaacttcagttttaaatctgctttgagtctatctaagtctcctgccaagttgaatcagagtgggacttcagttggcactgatgaagaatctgatgttactcaagaagaagagagagatggacagtactttgaacctgttgttcctttacctgatctagttgaagtatccagtggtgaggaaaatgaacaagttgtttttagtcacagggcagaattctacagatatgataaagatgttggtcaatggaaagaaaggggcattggtgatataaagattttacagaattatgataataagcacgttcgtatactgatgagaagggaccaagtattaaaactttgtgccaatcacagaataactccagacatgagtttgcaaaatatgaaagggacagaaagagtatgggtgtggactgcatgtgattttgcagatggagaaagaaaagtagagcatttagctgttcgttttaaactacaggatgttgcagactcgtttaagaaaatttttgatgaagcaaaaacagcccaggaaaaagattctttgataacacctcatgtttctcggtcaagcactcccagagagtcaccatgtggcaaaattgctgtagctgtattagaagaaaccacaagagagaggacagatgttattcagggtgatgatgtagcagatgcagcttcagaagttgaagtgtctagcacatctgaaacaacaacaaaagcagtggtttctcctccaaagtttgtatttggttcagagtctgttaaaagaatttttagtagtgaaaaatcaaaaccatttgcatttggcaacagttctgccactgggtctttgtttggatttagttttaatgcacctttgaaaagtaacaatagtgaaactagttcagtagcccagagtggatctgaaagcaaagtggaacctaaaaaatgtgaactgtcaaagaactctgatatcgaacagtcttcagatagcaaagtcaaaaatctctctgcttcctttccaacggaagaatcttcaatcaactacacatttaaaacaccagaaaaggagcctccattatggtatgctgaatttactaaagaagaattggttcagaagctcagttccaccacaaaaagtgcagatcacttaaacggcctgcttcgggaaatagaggcaaccaatgcagtccttatggagcaaattaagcttctcaaaagtgaaataagaagattggaaaggaatcaagagcaagaggtgtctgcagctaacgtggaacacttgaagaacgtcttgctgcagttcattttcttgaagccaggtagtgaaagagagagacttcttcctgttataaatacgatgttgcagctcagccttgaagaaaagggaaaacttgctgcggttgctcaagctgaacgtggttttgttttaaattctactttttaa

SEQ ID NO: 25460 - DNA, 736 bp, Homo sapiens
  source 1..736: mol_type = unassigned DNA
tagttctcgggggcttgggcacccgggtgctgtatcggcgggtttcttcccatctcctggacatttactttatatgctgcggcggaggtcatacctccttggcctggaggaacccagtggggactgacgcagctccgggtgagctttggcggctgcgtcgagtgacaagaagtcaacgagaggattctattttgcaaagctgtattatgaagctaaagaatatgatcttgctaaaaaatacatatgtacttacattaatgtgcgagagatggatcccagagctcacagatttctgggtcttctttatgaattggaagaaaacacagagaaagccgttgaatgttacaggcgttcagtggaattaaacccaacacaaaaagatcttgtgttgaagattgcagaattgctttgtaaaaatgatgttactgatggaagagcagaatactgggtggaaagagcagcaaaacttttcccaggaagtcctgcaatttataaactaaaggaacagcttctagattgtgaaggtgaagatggatggaataaactttttgacttgattcagtcagaactttatgtaagacctgatgacgtccatgtgaacatccggctagtggagttgtatcgctcaactaaaagattgaaggatgctgtggcccgctgccatgaggcagagaggaacatagctttgcgttcaagtttagagtggaattcgtgtgttgtacagacccttaagttt

SEQ ID NO: 25461 - DNA, 3599 bp, Homo sapiens
  source 1..3599: mol_type = unassigned DNA
attcgtgtgttgtacagacccttaaggaatatctggagtctttacagtgtttggagtctgataaaagtgactggcgagcaaccaatacagacttactgctggcctatgctaatcttatgcttcttacgctttccactagagatgtgcaggaaagtagagaattactggaaagttttgatagtgctcttcagtctgcgaaatcttctttgggtggaaatgatgaactgtcagctactttcttagaaatgaaaggacatttctacatgcatgctggttctctgctcttgaagatgggtcagcatggtaataatgttcaatggcgagctctttctgagctggctgcattgtgctatctcatagcatttcaggttccaagaccaaagattaaattaataaaaggtgaagctggacaaaatctgctggaaatgatggcctgtgaccgactgagccaatcagggcacatgttgctaaacttaagtcgtggcaagcaagattttttaaaagtggttgttgaaacttttgccaacaaaagcgggcagtctgcattatatgatgctctgttttctagtcagtcacctaaggatacatcttttcttggtagcgatgatattggaaacattgatgtacaagaaccagagcttgaagatttggctagatacgatgttggtgctattcgagcacataatggtagtcttcagcaccttacttggcttggcttacagtggaattcattgcctgctttacctggaatccgaaaatggctaaaacagcttttccatcatttgccccaggaaacctcaaggcttgaaacaaatgcacctgaatcaatatgtattttagatcttgaagtatttctccttggagtagtatataccagccacttacaattaaaggagaaatgtaattctcaccacagctcctatcagccgttatgcctgccccttcctgtgtgtaaacagctttgtacagaaagacaaaaatcttggtgggatgcggtttgtactctgattcacagaaaagcagtacctggaaactcagcaaaattgagacttctagttcagcatgaaataaacactctaagagcccaggaaaaacatggccttcaacctgctctgcttgtacattgggcaaaatgccttcagaaaatgggcagcggtcttaattctttttatgatcaacgagaatacatagggagaagtgttcattattggaagaaagttttgccattgttgaagataataaaaaagaagaacagtattcctgaacctattgatcctctgtttaaacattttcatagtgtagacattcaggcatcagaaattgttgaatatgaagaagacgcacacgtaacttttgctatattggatgcagtaaatggaaatatagaagatgctatgactgcttttgaatctataaaaagtgttgtttcttattggaatcttgcactgatttttcacaggaaggcagaagacattgcaaatgatgccctttctcctgaagaacaagaagaatgcaaaaattatctgagaaagaccaggggctacctaataaagattttagatgacagtgattcaaatctttcagtggtcaagaaattgcctgtgcccctggagtctgtaaaagagatgcttaagtcagtcatgcaggaactcgaaaactatagtgaaggaggtcctctctataaaaatggttctttgcgaaatgcggattcagaaataaaacattctacaccatctcctaccaaatattcactatcaccaagtaaaagttacaagtattctcccaaaacaccacctcgatgggcagaagatcagaattctttactgaaaatgattcgccaagaagtaaaggccattaaggaagaaatgcaggagttgaaactaaatagcagtaagtcagcatcccatcatcgttggcccacagagaattatggaccagactcggtgcctgatggatatcaggggtcacagacatttcatggggctccactaacagttgcaactactggcccttcagtatattatagtcagtcaccagcatataattcccagtatcttctcagaccagcagctaatgttactcccacaaagggttcttctaatacagaatttaagtcaaccaaagaaggattttccatccctgtgtctgctgatggatttaaatttggcatttcggaaccaggaaatcaagaaaagaaaagtgaaaagcctcttgaaaatgatactggcttacaggctcaggatattagtggccggaagaagggccgtggtgtgatttttggccaaacaagtagcacttttacatttgcagatgttgcaaaatcaacttcaggagaaggatttcagtttggcaaaaaagacctcaatttcaagggattttcaggtgctggagaaaaattattctcatcacaatacggtaaaatggccaataaagcaaacacttccggtgactttgagaaagatgatgatgcctataagactgaggacagcgatgacatccattttgaaccagtagttcaaatgcctgaaaaagtagaacttgtaacaggagaagaaggtgaaaaagttctgtattcacagggggtaaaactatttagatttgatgctgaggtaagtcagtggaaagaaaggggcttggggaacttaaaaattctcaaaaacgaggtcaatggcaaagtaagaatgctgatgcaaagagaacaagtactaaaagtgtgtgctaatcattggataacgactacaatgaacctgaagcccctctctggatcagatagagcatggatgtggtcagccagtgatttctctgatggtgatgccaaactagagcgattggcagcaaaatttaaaacaccagagctggctgaagaattcaagcagaaatttgaggaatgccagcggcttctgttagacataccacttcaaactccccataaacttgtagatactggcagagctgccaagttaatacagagagctgaagaaatgaagagtggatctgaaagcaaagtggaacctaaaaaatgtgaactgtcaaagaactctgatatcgaacagtcttcagatagcaaagtcaaaaatctctctgcttcctttccaacggaagaatcttcaatcaactacacatttaaaacaccagaaaaggagcctccattatggtatgctgaatttactaaagaagaattggttcagaagctcagttccaccacaaaaagtgcagatcacttaaacggcctgcttcgggaaatagaggcaaccaatgcagtccttatggagcaaattaagcttctcaaaagtgaaataagaagattggaaaggaatcaagagcaagaggtgtctgcagctaacgtggaacacttgaagaacgtcttgctgcagttcattttcttgaagccaggtagtgaaagagagagacttcttcctgttataaatacgatgttgcagctcagccttgaagaaaagggaaaacttgctgcggttgctcaaggtgaggaataaaatgcttcccgttcttctggatgggcatcctatcttcgtagttggtttggacttcgataggttgatggaaggaatgtttttattaaccaaataaaatctatttac

SEQ ID NO: 25462 - DNA, 1136 bp, Homo sapiens
  source 1..1136: mol_type = unassigned DNA
gtagcagatgcagcttcagaagttgaagtgtctagcacatctgaaacaacaacaaaagcagtggtttctcctccaaagtttgtatttggttcagagtctgttaaaagaatttttagtagtgaaaaatcaaaaccatttgcatttggcaacagttctgccactgggtctttgtttggatttagttttaatgcacctttgaaaagtaacaatagtgaaactagttcagtagcccagagtggatctgaaagcaaagtggaacctaaaaaatgtgaactgtcaaagaactctgatatcgaacagtcttcagatagcaaagtcaaaaatctctctgcttcctttccaacggaagaatcttcaatcaactacacatttaaaacaccagaaaaggagcctccattatggtatgctgaatttactaaagaagaattggttcagaagctcagttccaccacaaaaagtgcagatcacttaaacggcctgcttcgggaaatagaggcaaccaatgcagtccttatggagcaaattaagcttctcaaaagtgaaataagaagattggaaaggaatcaagagcaagaggtgtctgcagctaacgtggaacacttgaagaacgtcttgctgcagttcattttcttgaagccaggtagtgaaagagagagacttcttcctgttataaatacgatgttgcagctcagccttgaagaaaagggaaaacttgctgcggttgctcaaggtcttcaagaaacctccatacccaagaaaaaatagaaagcaacgatgttctactatggtgccaaaaatagttgaacatcgacatcaaaaagattctttctgtctgcttattcacatattctggtttgaattaaaagtgatgaaattatcctaaatacagttggccctctgtatccatgggttccacatccacaaattcaaccaactgtggatggaaaagacttgaaaaagatgagagaaaataacaatatgacaataaaacataatacaaataaaaacaatacagcataacaacgattacatagcatttacattatattagggattgcacaagagaaggtatgtaggttatatgcaaatactgcaccattttacataagggacttgagaagcatggattttggtag

SEQ ID NO: 25463 - DNA, 5594 bp, Homo sapiens
  source 1..5594: mol_type = unassigned DNA
gctttcaggcgctttcctcttggaattggcgactgctgcggggctgagcgctggtctcacgcatctcgggagccaggttggtggcgcgatgagttgcagcaaggcctacggggagcggtacgtcgcctcggtgcagggctccgccccgtcgcctcgaaagaagtcaacgagaggattctattttgcaaagctgtattatgaagctaaagaatatgatcttgctaaaaaatacatatgtacttacattaatgtgcgagagatggatcccagagctcacagatttctgggtcttctttatgaattggaagaaaacacagagaaagccgttgaatgttacaggcgttcagtggaattaaacccaacacaaaaagatcttgtgttgaagattgcagaattgctttgtaaaaatgatgttactgatggaagagcagaatactgggtggaaagagcagcaaaacttttcccaggaagtcctgcaatttataaactaaaggaacagcttctagattgtgaaggtgaagatggatggaataaactttttgacttgattcagtcagaactttatgtaagacctgatgacgtccatgtgaacatccggctagtggagttgtatcgctcaactaaaagattgaaggatgctgtggcccgctgccatgaggcagagaggaacatagctttgcgttcaagtttagagtggaattcgtgtgttgtacagacccttaaggaatatctggagtctttacagtgtttggagtctgataaaagtgactggcgagcaaccaatacagacttactgctggcctatgctaatcttatgcttcttacgctttccactagagatgtgcaggaaagtagagaattactggaaagttttgatagtgctcttcagtctgcgaaatcttctttgggtggaaatgatgaactgtcagctactttcttagaaatgaaaggacatttctacatgcatgctggttctctgctcttgaagatgggtcagcatggtaataatgttcaatggcgagctctttctgagctggctgcattgtgctatctcatagcatttcaggttccaagaccaaagattaaattaataaaaggtgaagctggacaaaatctgctggaaatgatggcctgtgaccgactgagccaatcagggcacatgttgctaaacttaagtcgtggcaagcaagattttttaaaagtggttgttgaaacttttgccaacaaaagcgggcagtctgcattatatgatgctctgttttctagtcagtcacctaaggatacatcttttcttggtagcgatgatattggaaacattgatgtacaagaaccagagcttgaagatttggctagatacgatgttggtgctattcgagcacataatggtagtcttcagcaccttacttggcttggcttacagtggaattcattgcctgctttacctggaatccgaaaatggctaaaacagcttttccatcatttgccccaggaaacctcaaggcttgaaacaaatgcacctgaatcaatatgtattttagatcttgaagtatttctccttggagtagtatataccagccacttacaattaaaggagaaatgtaattctcaccacagctcctatcagccgttatgcctgccccttcctgtgtgtaaacagctttgtacagaaagacaaaaatcttggtgggatgcggtttgtactctgattcacagaaaagcagtacctggaaactcagcaaaattgagacttctagttcagcatgaaataaacactctaagagcccaggaaaaacatggccttcaacctgctctgcttgtacattgggcaaaatgccttcagaaaatgggcagcggtcttaattctttttatgatcaacgagaatacatagggagaagtgttcattattggaagaaagttttgccattgttgaagataataaaaaagaagaacagtattcctgaacctattgatcctctgtttaaacattttcatagtgtagacattcaggcatcagaaattgttgaatatgaagaagacgcacacgtaacttttgctatattggatgcagtaaatggaaatatagaagatgctatgactgcttttgaatctataaaaagtgttgtttcttattggaatcttgcactgatttttcacaggaaggcagaagacattgcaaatgatgccctttctcctgaagaacaagaagaatgcaaaaattatctgagaaagaccaggggctacctaataaagattttagatgacagtgattcaaatctttcagtggtcaagaaattgcctgtgcccctggagtctgtaaaagagatgcttaagtcagtcatgcaggaactcgaaaactatagtgaaggaggtcctctctataaaaatggttctttgcgaaatgcggattcagaaataaaacattctacaccatctcctaccaaatattcactatcaccaagtaaaagttacaagtattctcccaaaacaccacctcgatgggcagaagatcagaattctttactgaaaatgattcgccaagaagtaaaggccattaaggaagaaatgcaggagttgaaactaaatagcagtaagtcagcatcccatcatcgttggcccacagagaattatggaccagactcggtgcctgatggatatcaggggtcacagacatttcatggggctccactaacagttgcaactactggcccttcagtatattatagtcagtcaccagcatataattcccagtatcttctcagaccagcagctaatgttactcccacaaagggttcttctaatacagaatttaagtcaaccaaagaaggattttccatccctgtgtctgctgatggatttaaatttggcatttcggaaccaggaaatcaagaaaagaaaagtgaaaagcctcttgaaaatgatactggcttacaggctcaggatattagtggccggaagaagggccgtggtgtgatttttggccaaacaagtagcacttttacatttgcagatgttgcaaaatcaacttcaggagaaggatttcagtttggcaaaaaagacctcaatttcaagggattttcaggtgctggagaaaaattattctcatcacaatacggtaaaatggccaataaagcaaacacttccggtgactttgagaaagatgatgatgcctataagactgaggacagcgatgacatccattttgaaccagtagttcaaatgcctgaaaaagtagaacttgtaacaggagaagaaggtgaaaaagttctgtattcacagggggtaaaactatttagatttgatgctgaggtaagtcagtggaaagaaaggggcttggggaacttaaaaattctcaaaaacgaggtcaatggcaaagtaagaatgctgatgcaaagagaacaagtactaaaagtgtgtgctaatcattggataacgactacaatgaacctgaagcccctctctggatcagatagagcatggatgtggtcagccagtgatttctctgatggtgatgccaaactagagcgattggcagcaaaatttaaaacaccagagctggctgaagaattcaagcagaaatttgaggaatgccagcggcttctgttagacataccacttcaaactccccataaacttgtagatactggcagagctgccaagttaatacagagagctgaagaaatgaagagtggactgaaagatttcaaaacatttttgacaaatgatcaaacaaaagtcgctgaggaagaaaataagggttcaggtacaggtgcggccggtgcctcagacacaacaataaaacccaatgctgaaaacactgggcccacattagaatgggataactatgatttaagggaagatgctttggatgatagtgtcagtagtagctcagtacatgcttctccattggcaagtagccctgtgagaaaaaatcttttccactttgatgagtcaacaacaggatctaacttcagttttaaatctgctttgagtctatctaagtctcctgccaagttgaatcagagtgggacttcagttggcactgatgaagaatctgatgttactcaagaagaagagagagatggacagtactttgaacctgttgttcctttacctgatctagttgaagtatccagtggtgaggaaaatgaacaagttgtttttagtcacagggcagaattctacagatatgataaagatgttggtcaatggaaagaaaggggcattggtgatataaagattttacagaattatgataataagcacgttcgtatactgatgagaagggaccaagtattaaaactttgtgccaatcacagaataactccagacatgagtttgcaaaatatgaaagggacagaaagagtatgggtgtggactgcatgtgattttgcagatggagaaagaaaagtagagcatttagctgttcgttttaaactacaggatgttgcagactcgtttaagaaaatttttgatgaagcaaaaacagcccaggaaaaagattctttgataacacctcatgtttctcggtcaagcactcccagagagtcaccatgtggcaaaattgctgtagctgtattagaagaaaccacaagagagaggacagatgttattcagggtgatgatgtagcagatgcagcttcagaagttgaagtgtctagcacatctgaaacaacaacaaaagcagtggtttctcctccaaagtttgtatttggttcagagtctgttaaaagaatttttagtagtgaaaaatcaaaaccatttgcatttggcaacagttctgccactgggtctttgtttggatttagttttaatgcacctttgaaaagtaacaatagtgaaactagttcagtagcccagagtggatctgaaagcaaagtggaacctaaaaaatgtgaactgtcaaagaactctgatatcgaacagtcttcagatagcaaagtcaaaaatctctctgcttcctttccaacggaagaatcttcaatcaactacacatttaaaacaccagaaaaggagcctccattatggtatgctgaatttactaaagaagaattggttcagaagctcagttccaccacaaaaagtgcagatcacttaaacggcctgcttcgggaaatagaggcaaccaatgcagtccttatggagcaaattaagcttctcaaaagtgaaataagaagattggaaaggaatcaagagcaagaggtgtctgcagctaacgtggaacacttgaagaacgtcttgctgcagttcattttcttgaagccaggtagtgaaagagagagacttcttcctgttataaatacgatgttgcagctcagccttgaagaaaagggaaaacttgctgcggttgctcaaggtgaggaataaaatgcttcccgttcttctggatgggcatcctatcttcgtagttggtttggacttcgataggttgatggaaggaatgtttttattaaccaaataaaatctatttacaaaaatggttcatgtgtattaccatcattcttttgtcaaaaagtgtgtatatgtttgcatttacatatatttgtacatctatatgacagatgtattttaaaagtttcaacttgaagtaaaagta

SEQ ID NO: 25464 - DNA, 5383 bp, Homo sapiens
  source 1..5383: mol_type = unassigned DNA
aggcgctttcctgttggaattggcgactgctgcggggctgagcgctggtttcacgcgtctcgggagccaggttggtggcgcgatgagttgcagcaaggcctacggggagcggtacgtcgcctccgtgcagggctccgccccgtcgcctcgaaagaagtcaacgagaggattctattttgcaaagctgtattatgaagctaaagaatatgatcttgctaaaaaatacatatgtacttacattaatgtgcgagagatggatcccagagctcacagatttctgggtcttctttatgaattggaagaaaacacagagaaagccgttgaatgttacaggcgttcagtggaattaaacccaacacaaaaagatctggtgttgaagattgcagaattgctttgtaaaaatgatgttactgatggaagagcaaaatactgggtggaaagagcagcaaaacttttcccaggaagtcctgcaatttataaactaaaggaacagcttctagattgtgaaggtgaagatggatggaataaactttttgacttgattcagtcagaactttatgtaagacctgatgacgtccatgtgaacatccggctagtggagttgtatcgctcaactaaaagattgaaggatgctgtggcccgctgccatgaggcagagaggaacatagctttgcgttcaagtttagagtggaattcgtgtgttgtacagacccttaaggaatatctggagtctttacagtgtttggagtctgataaaagtgactggcgagcaaccaatacagacttactgctggcctatgctaatcttatgcttcttacgctttccactagagatgtgcaggaaagtagagaattactggaaagttttgatagtgctcttcagtctgcgaaatcttctttgggtggaaatgatgaactgtcagctactttcttagaaatgaaaggacatttctacatgcatgctggttctctgctcttgaagatgggtcagcatggtaataatgttcaatggcgagctctttctgagctggctgcattgtgctatctcatagcatttcaggttccaagaccaaagattaaattaataaaaggtgaagctggacaaaatctgctggaaatgatggcctgtgaccgactgagccaatcagggcacatgttgctaaacttaagtcgtggcaagcaagattttttaaaagtggttgttgaaacttttgccaacaaaagcgggcagtctgcattatatgatgctctgttttctagtcagtcacctaaggatacatcttttcttggtagcgatgatattggaaacattgatgtacaagaaccagagcttgaagatttggctagatacgatgttggtgctattcgagcacataatggtagtcttcagcaccttacttggcttggcttacagtggaattcattgcctgctttacctggaatccgaaaatggctaaaacagcttttccatcatttgccccaggaaacctcaaggcttgaaacaaatgcacctgaatcaatatgtattttagatcttgaagtatttctccttggagtagtatataccagccacttacaattaaaggagaaatgtaattctcaccacagctcctatcagccgttatgcctgccccttcctgtatgtaaacagctttgtacagaaagacaaaaatcttggtgggatgcggtttgtactctgattcacagaaaagcagtacctggaaactcagcaaaattgagacttttagttcagcatgaaataaacactctaagagcccaggaaaaacatggccttcaacctgctctgcttgtacattgggcaaaatgccttcagaaaatgggcagtggtcttaattctttttatgatcaacgagaatacatagggagaagtgttcattattggaagaaagttttgccattgttgaagataataaaaaagaagaacagtattcctgaacctattgatcctctgtttaaacattttcatagtgtagacattcaggcatcagaaattgttgaatatgaagaagacgcacacgtaacttttgctatattggatgcagtaaatggaaatatagaagatgctatgactgcttttgaatctataaaaagtgttgtttcttattggaatcttgcactgatttttcacaggaaggcagaagacattgcaaatgatgccctttctcctgaagaacaagaagaatgcaaaaattatctgagaaagaccaggggctacctaataaagattttagatgacagtgattcaaatctttcagtggtcaagaaattgcctgtgcccctggagtctgtaaaagagatgcttaagtcagtcatgcaggaactcgaaaactatagtgaaggagatcctctctataaaaatggttctttgcgaaatgcggattcagaaataaaacattctacaccatctcctaccaaatattcactatcaccaagtaaaagttacaagtattctcccaaaacaccacctcgatgggcagaagatcagaattctttactgaaaatgattcgccaagaagtaaaggccattaaggaagaaatgcaggagttgaaactaaatagcagtaagtcagcatcccatcatcgttggcccacagagaattatggaccagactcggtgcctgatggatatcaggggtcacagacatttcatggggctccactaacagttgcaactactggcccttcagtatattatagtcagtcaccagcatataattcccagtatcttctcagaccagcagctaatgttactcccacaaagggttcttctaatacagaatttaagtcaaccaaagaaggattttccatccctgtgtctgctgatggatttaaatttggcatttcggaaccaggaaatcaagaaaaggaaagtgaaaagcctcttgaaaatgatactggcttccaggctcaggatattagtggccagaagaatggccgtggtgtgatttttggccaaacaagtagcacttttacatttgcagatgttgcaaaatcaacttcaggagaaggatttcagtttggcaaaaaagaccccaatttcaagggattttcaggtgctggagaaaaattattctcatcacaatgcggtaaaatggccaataaagcaaacacttccggtgactttgagaaagatgatgatgcctataagactgaggacagcgatgacatccattttgaaccagtagttcaaatgcctgaaaaagtagaacttgtaataggagaagaaggtgaaaaagttctgtattcacagggggtaaaactatttagatttgatgctgaggtaaggcagtggaaagaaaggggcttggggaacttaaaaattctcaaaaacgaggtcaatggcaaaccaagaatgctgatgcgaagagaacaagtactaaaagtgtgtgctaatcattggataacgactacaatgaacctgaagcccctgtctggatcagatagagcatggatgtggtcagccagtgatttctctgatggtgatgccaaactagagcggttagcagcaaaatttaaaacaccagagctggctgaagaattcaagcagaaatttgaggaatgccagcagcttctgttagacataccacttcaaactccccataaacttgtagatactggcagagctgccaagttaatacagagagctgaagaaatgaagagtggactgaaagatttcaaaacatttttgacaaatgatcaaacaaaagtcactgaggaagaaaataagggttcaggtacaggtgcggccggtgcctcagacacaacaataaaacccaatcctgaaaacactgggcccacattagaatgggataactgtgatttaagggaagatgctttggatgatagtgtcagtagtagctcagtacatgcttctccattggcaagtagccctgtgagaaaaaatcttttccattttggtgagtcaacaacaggatctaacttcagttttaaatctgctttgagtccatctaagtctcctgccaagttgaatcagagtgggacttcagttggcactgatgaagaatctgatgttactcaagaagaagagagagatggacagtactttgaacctgttgttcctttacctgatctagttgaagtatccagtggtgaggaaaatgaaaaagttgtttttagtcacagggcagaactctacagatatgataaagatgttggtcaatggaaagaaaggggcattggtgatataaagattttacagaattatgataataagcaagttcgtatagtgatgagaagggaccaagtattaaaactttgtgccaatcacacaataactccagacatgagtttgcaaaatatgaaagggacagaaagagtatgggtgtggactgcatgtgattttgcagatggagaaagaaaagtagagcatttagctgttcgttttaaactacaggatgttgcagactcgtttaagaaaatttttgatgaagcaaaaacagcccaggaaaaagattctttgataacacctcatgtttctcggtcaagcactcccagagagtcaccatgtggcaaaattgctgtagctgtattagaagaaaccacaagagagaggacagatgttattcagggtgatgatgtagcagatgcagcttcagaagttgaagtgtctagcacatctgaaacaacaacaaaagcagtggtttctcctccaaagtttgtatttggttcagagtctgttaaaagaatttttagtagtgaaaaatcaaaaccatttgcatttggcaacagttctgccactgggtctttgtttggatttagttttaatgcatctttgaaaagtaacaacagtgaaactagttcagtagcccagagtggatctgaaagcaaagtggaacctaaaaaatgtgaactgtcaaagaactctgatatcgaacagtcttcagatagcaaagtcaaaaatctctctgcttcctttccaatggaagaatcttcaatcaactacacatttaaaacaccagaaaaggagcctccattatggcatgctgaatttaccaaagaagaattggttcagaagctcagttccaccacaaaaagtgcagatcacttaaacggcctgcttcgggaagcagaggcaaccagtgcagtccttatggagcaaattaagcttctcaaaagtgaaataagaagattggaaaggaatcaagagcaagaggagtctgcagctaacgtggaacacttgaagaacgtcttgctgcagttcattttcttgaagccaggtagtgaaagagagagacttcttcctgttataaatacgatgttgcagctcagccctgaagaaaagggaaaacttgctgcggttgctcaagctgaacgtggttttgttttaaattctactttttaa

SEQ ID NO: 25465 - DNA, 3599 bp, Homo sapiens
  source 1..3599: mol_type = unassigned DNA
attcgtgtgttgtacagacccttaaggaatatctggagtctttacagtgtttggagtctgataaaagtgactggcgagcaaccaatacagacttactgctggcctatgctaatcttatgcttcttacgctttccactagagatgtgcaggaaagtagagaattactggaaagttttgatagtgctcttcagtctgcgaaatcttctttgggtggaaatgatgaactgtcagctactttcttagaaatgaaaggacatttctacatgcatgctggttctctgctcttgaagatgggtcagcatggtaataatgttcaatggcgagctctttctgagctggctgcattgtgctatctcatagcatttcaggttccaagaccaaagattaaattaataaaaggtgaagctggacaaaatctgctggaaatgatggcctgtgaccgactgagccaatcagggcacatgttgctaaacttaagtcgtggcaagcaagattttttaaaagtggttgttgaaacttttgccaacaaaagcgggcagtctgcattatatgatgctctgttttctagtcagtcacctaaggatacatcttttcttggtagcgatgatattggaaacattgatgtacaagaaccagagcttgaagatttggctagatacgatgttggtgctattcgagcacataatggtagtcttcagcaccttacttggcttggcttacagtggaattcattgcctgctttacctggaatccgaaaatggctaaaacagcttttccatcatttgccccaggaaacctcaaggcttgaaacaaatgcacctgaatcaatatgtattttagatcttgaagtatttctccttggagtagtatataccagccacttacaattaaaggagaaatgtaattctcaccacagctcctatcagccgttatgcctgccccttcctgtatgtaaacagctttgtacagaaagacaaaaatcttggtgggatgcggtttgtactctgattcacagaaaagcagtacctggaaactcagcaaaattgagacttttagttcagcatgaaataaacactctaagagcccaggaaaaacatggccttcaacctgctctgcttgtacattgggcaaaatgccttcagaaaatgggcagtggtcttaattctttttatgatcaacgagaatacatagggagaagtgttcattattggaagaaagttttgccattgttgaagataataaaaaagaagaacagtattcctgaacctattgatcctctgtttaaacattttcatagtgtagacattcaggcatcagaaattgttgaatatgaagaagacgcacacgtaacttttgctatattggatgcagtaaatggaaatatagaagatgctatgactgcttttgaatctataaaaagtgttgtttcttattggaatcttgcactgatttttcacaggaaggcagaagacattgcaaatgatgccctttctcctgaagaacaagaagaatgcaaaaattatctgagaaagaccaggggctacctaataaagattttagatgacagtgattcaaatctttcagtggtcaagaaattgcctgtgcccctggagtctgtaaaagagatgcttaagtcagtcatgcaggaactcgaaaactatagtgaaggagatcctctctataaaaatggttctttgcgaaatgcggattcagaaataaaacattctacaccatctcctaccaaatattcactatcaccaagtaaaagttacaagtattctcccaaaacaccacctcgatgggcagaagatcagaattctttactgaaaatgattcgccaagaagtaaaggccattaaggaagaaatgcaggagttgaaactaaatagcagtaagtcagcatcccatcatcgttggcccacagagaattatggaccagactcggtgcctgatggatatcaggggtcacagacatttcatggggctccactaacagttgcaactactggcccttcagtatattatagtcagtcaccagcatataattcccagtatcttctcagaccagcagctaatgttactcccacaaagggttcttctaatacagaatttaagtcaaccaaagaaggattttccatccctgtgtctgctgatggatttaaatttggcatttcggaaccaggaaatcaagaaaaggaaagtgaaaagcctcttgaaaatgatactggcttccaggctcaggatattagtggccagaagaatggccgtggtgtgatttttggccaaacaagtagcacttttacatttgcagatgttgcaaaatcaacttcaggagaaggatttcagtttggcaaaaaagaccccaatttcaagggattttcaggtgctggagaaaaattattctcatcacaatgcggtaaaatggccaataaagcaaacacttccggtgactttgagaaagatgatgatgcctataagactgaggacagcgatgacatccattttgaaccagtagttcaaatgcctgaaaaagtagaacttgtaataggagaagaaggtgaaaaagttctgtattcacagggggtaaaactatttagatttgatgctgaggtaaggcagtggaaagaaaggggcttggggaacttaaaaattctcaaaaacgaggtcaatggcaaaccaagaatgctgatgcgaagagaacaagtactaaaagtgtgtgctaatcattggataacgactacaatgaacctgaagcccctgtctggatcagatagagcatggatgtggtcagccagtgatttctctgatggtgatgccaaactagagcggttagcagcaaaatttaaaacaccagagctggctgaagaattcaagcagaaatttgaggaatgccagcagcttctgttagacataccacttcaaactccccataaacttgtagatactggcagagctgccaagttaatacagagagctgaagaaatgaagagtggatctgaaagcaaagtggaacctaaaaaatgtgaactgtcaaagaactctgatatcgaacagtcttcagatagcaaagtcaaaaatctctctgcttcctttccaatggaagaatcttcaatcaactacacatttaaaacaccagaaaaggagcctccattatggcatgctgaatttaccaaagaagaattggttcagaagctcagttccaccacaaaaagtgcagatcacttaaacggcctgcttcgggaagcagaggcaaccagtgcagtccttatggagcaaattaagcttctcaaaagtgaaataagaagattggaaaggaatcaagagcaagaggagtctgcagctaacgtggaacacttgaagaacgtcttgctgcagttcattttcttgaagccaggtagtgaaagagagagacttcttcctgttataaatacgatgttgcagctcagccctgaagaaaagggaaaacttgctgcggttgctcaaggtgaggaataaaatgcttcccgttcttctggatgggcatcctatcttcgtagttggtttggacttcgataggttgatggaaggaatatttttattaaccaaataaaatctatttac

SEQ ID NO: 25466 - DNA, 736 bp, Homo sapiens
  source 1..736: mol_type = unassigned DNA
tggttctcgggggcttaggcacccgggtgctgtatcggcgggtttcttcccatctcctggacatttactttatatgctgcggcggaggtcgtacctccttggcctggaggaacccagtggggactgacgcagctccgggtgagctttggcggctgcgtcgagtgacaagaagtcaacgagaggattctattttgcaaagctgtattatgaagctaaagaatatgatcttgctaaaaaatacatatgtacttacattaatgtgcgagagatggatcccagagctcacagatttctgggtcttctttatgaattggaagaaaacacagagaaagccgttgaatgttacaggcgttcagtggaattaaacccaacacaaaaagatctggtgttgaagattgcagaattgctttgtaaaaatgatgttactgatggaagagcaaaatactgggtggaaagagcagcaaaacttttcccaggaagtcctgcaatttataaactaaaggaacagcttctagattgtgaaggtgaagatggatggaataaactttttgacttgattcagtcagaactttatgtaagacctgatgacgtccatgtgaacatccggctagtggagttgtatcgctcaactaaaagattgaaggatgctgtggcccgctgccatgaggcagagaggaacatagctttgcgttcaagtttagagtggaattcgtgtgttgtacagacccttaagttt

SEQ ID NO: 25467 - DNA, 5464 bp, Homo sapiens
  source 1..5464: mol_type = unassigned DNA
ctttcctgttggaattggcgactgctgcggggctgagcgctggtttcacgcgtctcgggagccaggttggtggcgcgatgagttgcagcaaggcctacggggagcggtacgtcgcctccgtgcagggctccgccccgtcgcctcgaaagaagtcaacgagaggattctattttgcaaagctgtattatgaagctaaagaatatgatcttgctaaaaaatacatatgtacttacattaatgtgcgagagatggatcccagagctcacagatttctgggtcttctttatgaattggaagaaaacacagagaaagccgttgaatgttacaggcgttcagtggaattaaacccaacacaaaaagatctggtgttgaagattgcagaattgctttgtaaaaatgatgttactgatggaagagcaaaatactgggtggaaagagcagcaaaacttttcccaggaagtcctgcaatttataaactaaaggaacagcttctagattgtgaaggtgaagatggatggaataaactttttgacttgattcagtcagaactttatgtaagacctgatgacgtccatgtgaacatccggctagtggagttgtatcgctcaactaaaagattgaaggatgctgtggcccgctgccatgaggcagagaggaacatagctttgcgttcaagtttagagtggaattcgtgtgttgtacagacccttaaggaatatctggagtctttacagtgtttggagtctgataaaagtgactggcgagcaaccaatacagacttactgctggcctatgctaatcttatgcttcttacgctttccactagagatgtgcaggaaagtagagaattactggaaagttttgatagtgctcttcagtctgcgaaatcttctttgggtggaaatgatgaactgtcagctactttcttagaaatgaaaggacatttctacatgcatgctggttctctgctcttgaagatgggtcagcatggtaataatgttcaatggcgagctctttctgagctggctgcattgtgctatctcatagcatttcaggttccaagaccaaagattaaattaataaaaggtgaagctggacaaaatctgctggaaatgatggcctgtgaccgactgagccaatcagggcacatgttgctaaacttaagtcgtggcaagcaagattttttaaaagtggttgttgaaacttttgccaacaaaagcgggcagtctgcattatatgatgctctgttttctagtcagtcacctaaggatacatcttttcttggtagcgatgatattggaaacattgatgtacaagaaccagagcttgaagatttggctagatacgatgttggtgctattcgagcacataatggtagtcttcagcaccttacttggcttggcttacagtggaattcattgcctgctttacctggaatccgaaaatggctaaaacagcttttccatcatttgccccaggaaacctcaaggcttgaaacaaatgcacctgaatcaatatgtattttagatcttgaagtatttctccttggagtagtatataccagccacttacaattaaaggagaaatgtaattctcaccacagctcctatcagccgttatgcctgccccttcctgtatgtaaacagctttgtacagaaagacaaaaatcttggtgggatgcggtttgtactctgattcacagaaaagcagtacctggaaactcagcaaaattgagacttttagttcagcatgaaataaacactctaagagcccaggaaaaacatggccttcaacctgctctgcttgtacattgggcaaaatgccttcagaaaatgggcagtggtcttaattctttttatgatcaacgagaatacatagggagaagtgttcattattggaagaaagttttgccattgttgaagataataaaaaagaagaacagtattcctgaacctattgatcctctgtttaaacattttcatagtgtagacattcaggcatcagaaattgttgaatatgaagaagacgcacacgtaacttttgctatattggatgcagtaaatggaaatatagaagatgctatgactgcttttgaatctataaaaagtgttgtttcttattggaatcttgcactgatttttcacaggaaggcagaagacattgcaaatgatgccctttctcctgaagaacaagaagaatgcaaaaattatctgagaaagaccaggggctacctaataaagattttagatgacagtgattcaaatctttcagtggtcaagaaattgcctgtgcccctggagtctgtaaaagagatgcttaagtcagtcatgcaggaactcgaaaactatagtgaaggagatcctctctataaaaatggttctttgcgaaatgcggattcagaaataaaacattctacaccatctcctaccaaatattcactatcaccaagtaaaagttacaagtattctcccaaaacaccacctcgatgggcagaagatcagaattctttactgaaaatgattcgccaagaagtaaaggccattaaggaagaaatgcaggagttgaaactaaatagcagtaagtcagcatcccatcatcgttggcccacagagaattatggaccagactcggtgcctgatggatatcaggggtcacagacatttcatggggctccactaacagttgcaactactggcccttcagtatattatagtcagtcaccagcatataattcccagtatcttctcagaccagcagctaatgttactcccacaaagggttcttctaatacagaatttaagtcaaccaaagaaggattttccatccctgtgtctgctgatggatttaaatttggcatttcggaaccaggaaatcaagaaaaggaaagtgaaaagcctcttgaaaatgatactggcttccaggctcaggatattagtggccagaagaatggccgtggtgtgatttttggccaaacaagtagcacttttacatttgcagatgttgcaaaatcaacttcaggagaaggatttcagtttggcaaaaaagaccccaatttcaagggattttcaggtgctggagaaaaattattctcatcacaatgcggtaaaatggccaataaagcaaacacttccggtgactttgagaaagatgatgatgcctataagactgaggacagcgatgacatccattttgaaccagtagttcaaatgcctgaaaaagtagaacttgtaataggagaagaaggtgaaaaagttctgtattcacagggggtaaaactatttagatttgatgctgaggtaaggcagtggaaagaaaggggcttggggaacttaaaaattctcaaaaacgaggtcaatggcaaaccaagaatgctgatgcgaagagaacaagtactaaaagtgtgtgctaatcattggataacgactacaatgaacctgaagcccctgtctggatcagatagagcatggatgtggtcagccagtgatttctctgatggtgatgccaaactagagcggttagcagcaaaatttaaaacaccagagctggctgaagaattcaagcagaaatttgaggaatgccagcagcttctgttagacataccacttcaaactccccataaacttgtagatactggcagagctgccaagttaatacagagagctgaagaaatgaagagtggactgaaagatttcaaaacatttttgacaaatgatcaaacaaaagtcactgaggaagaaaataagggttcaggtacaggtgcggccggtgcctcagacacaacaataaaacccaatcctgaaaacactgggcccacattagaatgggataactgtgatttaagggaagatgctttggatgatagtgtcagtagtagctcagtacatgcttctccattggcaagtagccctgtgagaaaaaatcttttccattttggtgagtcaacaacaggatctaacttcagttttaaatctgctttgagtccatctaagtctcctgccaagttgaatcagagtgggacttcagttggcactgatgaagaatctgatgttactcaagaagaagagagagatggacagtactttgaacctgttgttcctttacctgatctagttgaagtatccagtggtgaggaaaatgaaaaagttgtttttagtcacagggcagaactctacagatatgataaagatgttggtcaatggaaagaaaggggcattggtgatataaagattttacagaattatgataataagcaagttcgtatagtgatgagaagggaccaagtattaaaactttgtgccaatcacacaataactccagacatgagtttgcaaaatatgaaagggacagaaagagtatgggtgtggactgcatgtgattttgcagatggagaaagaaaagtagagcatttagctgttcgttttaaactacaggatgttgcagactcgtttaagaaaatttttgatgaagcaaaaacagcccaggaaaaagattctttgataacacctcatgtttctcggtcaagcactcccagagagtcaccatgtggcaaaattgctgtagctgtattagaagaaaccacaagagagaggacagatgttattcagggtgatgatgtagcagatgcagcttcagaagttgaagtgtctagcacatctgaaacaacaacaaaagcagtggtttctcctccaaagtttgtatttggttcagagtctgttaaaagaatttttagtagtgaaaaatcaaaaccatttgcatttggcaacagttctgccactgggtctttgtttggatttagttttaatgcatctttgaaaagtaacaacagtgaaactagttcagtagcccagagtggatctgaaagcaaagtggaacctaaaaaatgtgaactgtcaaagaactctgatatcgaacagtcttcagatagcaaagtcaaaaatctctctgcttcctttccaatggaagaatcttcaatcaactacacatttaaaacaccagaaaaggagcctccattatggcatgctgaatttaccaaagaagaattggttcagaagctcagttccaccacaaaaagtgcagatcacttaaacggcctgcttcgggaagcagaggcaaccagtgcagtccttatggagcaaattaagcttctcaaaagtgaaataagaagattggaaaggaatcaagagcaagaggagtctgcagctaacgtggaacacttgaagaacgtcttgctgcagttcattttcttgaagccaggtagtgaaagagagagacttcttcctgttataaatacgatgttgcagctcagccctgaagaaaagggaaaacttgctgcggttgctcaaggtgaggaataaaatgcttcccgttcttctggatgggcatcctatcttcgtagttggtttggacttcgataggttgatggaaggaatatttttattaaccaaataaaatctatttacaaaaa

SEQ ID NO: 25468 - DNA, 7253 bp, Homo sapiens
  source 1..7253: mol_type = unassigned DNA
gtgggcctccgtgggcggcgccgcacgctcgtcacagtgggcctccgccggctacgccgctgcttcagtggcttgcaggcactttcctcttggaagtggcgactgctgcggggctgagcggtgctcgcacgcgtctcgggagccaggttggcggcgcgatgaggcgcagcaaggccgatgtggagcggtacgtcgcctcggtgctgggtctcaccccgtcgcctcgacagaagtcaatgaaaggattctattttgcaaagctgtattatgaagctaaagaatatgatcttgctaaaaaatacatatgtacttacattaatgtgcaagagagggatcccaaagctcacagatttctgggtcttctttatgaattggaagaaaacacagagaaagccgttgaatgttacaggcgttcagtggaattaaacccaacacaaaaagatcttgtgttgaagattgcagaattgctttgtaaaaatgatgttactgatggaagagcaaaatactgggtcgaaagagcagcaaaacttttcccaggaagtcctgcaatttataaactaaaggaacagcttctagattgtgaaggtgaagatggatggaataaactttttgacttgattcagtcagaactttatgtaagacctgatgacgtccatgtgaacatccggctagtggagttgtatcgctcaactaaaagattgaaggatgctgtggcccactgccatgaggcagagaggaacatagctttgcgttcaagtttagagtggaattcgtgtgttgtacagacccttaaggaatatctggagtctttacagtgtttggagtctgataaaagtgactggcaagcaaccaatacagacttactgctggcctatgctaatcttatgcttcttacgctttccactagagatgtgcaggaaaatagagaattactggaaagttttgatagtgctcttcagtctgcgaaatcttctttgggtggaaatgatgaactgtcagctactttcttagaaatgaaaggacatttctatatgtatgctggttctctgctcttgaagatgggtcagcatggtaataatgttcaatggcgagctctttctgagctggctgcattgtgctatctcatagcatttcaggttccaagaccaaagattaaattaagagaaggtaaagctggacaaaatctgctggaaatgatggcctgtgaccgactgagccaatcagggcacatgttgctaagcttaagtcgtggcaagcaagatttcttaaaagaggttgttgaaacttttgccaacaaaattgggcagtctgcgttatatgatgctctgttttctagtcagtcacctaaggatacatcttttcttggtagcgatgatattggaaaaattgatgtacaagaaccagagcttgaagatttggctagatacgatgttggtgctattcgagcacataatggtagtcttcagcatcttacttggcttggcttacagtggaattcattgcctgctttacctggaatccgaaaatggctaaaacagcttttccatcgtttgccccatgaaacctcaaggcttgaaacaaatgcgcctgaatcaatatgtattttagatcttgaagtatttctccttggagtagtatataccagccacttacaattaaaggagaaatgtaattctcaccatagctcctatcagccgttatgcctgccctttcctgtgtgtaaacagctttgtacagaaagacaaaaatcttggtgggatgcggtttgtactctgattcacagaaaagcagtacctggaaacttggcaaaattgagacttctagttcagcatgaaataaacactctaagagcccaggaaaaacatggccttcaacctgctctgcttgtacattgggcaaaataccttcagaaaacgggcagcggtcttaattctttttatggtcaactagaatacatagggagaagtgttcattattggaagaaagttttgccattgttgaagataataaagaagaacagtattcctgaacctattgatcctctgtttaaacattttcatagtgtagacattcaggcatcagaaattgttgaatatgaagaagacgcacacataacttttgctatgttggatgcagtaaatggaaatatagaagatgctgtgactgcttttgaatctataaaaagtgttgtttcttattggaatcttgcactgatttttcacaggaaggcagaagacattgaaaatgatgccctttctcctgaagaacaagaagaatgcagaaattatctgacaaagaccagggactacctaataaagattatagatgacggtgattcaaatctttcagtggtcaagaaattgcctgtgcccctggagtctgtaaaacagatgcttaattcagtcatgcaggaactcgaagactatagtgaaggaggtcctctctataaaaatggttctttgcgaaatgcagattcagaaataaaacattctacaccgtctcctaccaaatattcactatcaccaagtaaaagttacaagtattctcccgaaacaccacctcgatggacagaagatcggaattctttactgaatatgatttgccaacaagtagaggccattaagaaagaaatgcaggagttgaaactaaatagcagtaagtcagcatcccgtcatcgttggcccacagagaattatggaccagactcggtgcctgatggatatcaggggtcacagacatttcatggggctccactaacagttgcaactactggcccttcagtatattatagtcagtcaccagcatataattcccagtatcttctcagaccagcagctaatgttactcccacaaagggttcttctaatacagaatttaagtcaaccaaagaaggattttccatccctgtgtctgctgatggatttaaatttggcatttcggaaccaggaaatcaagaaaagaaaagggaaaagcctcttgaaaatgatactggcttccaggctcaggatattagtggccggaagaagggccgtggtgtgatttttggccaaacaagtagcacttttacatttgcagatgttgcaaaatcaacttcaggagaaggatttcagtttggcaaaaaagacctcaatttcaagggattttcaggtgctggagaaaaattattctcatcacgatacggtaaaatggccaataaagcaaacacttccggtgactttgagaaagatgatgatgcctataagactgaggacagcgatgacatccattttgaaccagtagttcaaatgcctgaaaaagtagaacttgtaacaggagaagaaggtgaaaaagttctgtattcacagggggtaaaactatttagatttgatgctgaggtaaggcagtggaaagaaaggggcttggggaacttaaaaattctcaaaaacgaggtcaatggcaaactaagaatgctgatgcgaagagaacaagtactaaaagtgtgtgctaatcattggataacgactacaatgaacctgaagcccctctctggatcagatagagcatggatgtggtcagccagtgatttctctgacggtgatgccaaactagagcggttggcagcaaaatttaaaacaccagagctggctgaagaattcaagcagaaatttgaggaatgccagcggcttctgttagacataccacttcaaactccccataaacttgtagatactggcagagctgccaagttaatacagagagctgaagaaatgaagagtggactgaaagatttcaaaacatttttgacaaatgatcaaacaaaagtcactgaggaagaaaataagggttcaggtacaggtgcggccggtgcctcagacacaacaataaaacccaatgctgaaaacactgggcccacattagaatgggataactatgacttaagggaagatgctttggatgatagtgtcagtagtagctcagtacatgcttctccattggcaagtagccctgtgagaaaaaatcttttccgctttgatgagtcaacaacaggatctaacttcagttttaaatctgctttgagtctatctaagtctcctgccaagttgaatcagagtgggacttcagttggcactgatgaagaatctgttgttactcaagaagaagagagagatggacagtactttgaacctgttgttcctttacctgatctagttgaagtatccagtggtgaggaaaatgaacaagttgtttttagtcacagggcagaaatctacagatatgataaagatgttggtcaatggaaagaaaggggcattggtgatataaagattttacagaattatgataataagcaagttcgtatagtgatgagaagggaccaagtattaaaactttgtgccaatcacagaataactccagacatgagtttgcaaaatatgaaagggacagaaagagtatgggtgtggactgcatgtgattttgcagatggagaaagaaaagtagagcatttagctgttcgttttaaactacaggatgttgcagactcgtttaagaaaatttttgatgaagcaaaaacagcccaggaaaaagattctttgataacacctcatgtttctcggtcaagcactcccagagagtcaccatgtggcaaaattgctgtagctatattagaagaaaccacaagagagaggacagatgttattcagggtgatgatgtagcagatgcagcttcagaagttgaagtgtctagcacatctgaaacaacaacaaaagcagtggtttctcctccaaagtttgtatttgtttcagagtctgttaaaagaatttttagtagtgaaaaatcaaaaccatttgtatttggcaacagttctgccactgggtctttgtttggatttagttttaatgcacctttgaaaagtaacaatagtgaaactagttcagtagcccagagtggatctgaaagcaaagtggaacctaaaaaatgtgaactgtcaaagaactctgatatcgaacagtcttcagatagcaaagtcaaaaatctctctgcttcctttccaacggaagaatcttcaatcaactacacatttaaaacaccagaaaaggagcctccattatggcatgctgaatttaccaaagaagaattggttcagaagctccgttccaccacaaaaagtgcagatcacttaaacggcctgcttcgggaaatagaggcaaccaatgcagtccttatggagcaaattaagcttctcaaaagtgaaataagaagattggaaaggaatcaagagcgagagaagtctgcagctaacctggaatacttgaagaacgtcttgctgcagttcattttcttgaagccaggtagtgaaagagagagacttcttcctgttataaatacgatgttgcagctcagccctgaagaaaagggaaaacttgctgcggttgctcaagatgaggaagaaaatgcttcccgttcttctggatgagcatcctatcttcgtagttggtttggacttcgataggttgatggaaggaatacttctattaaccaaatagaatctgtttacaaaaatggttcgtgtgtgttaccattattcttttgtcaaaaagtgtgtatatatgtttgcatttacatatatttgtacatctgtatgacagatgtattttaaaagtttcaacttgaagtaaaagtacaacagcttgaagtgttgataccaggccacagccctctaactcatgtgatctcccatgcatgctgccagaataaaaccaccaggaatgaattcactccccacttctctggaacctcaggacccgcccatttctcggcagtactgtgaattttgaagttaaactaaattttggtaccataccaactggaatttaggctttaaaaataatgtttcaaggccaggtgtggtgattcatgcctgaaatcccactactttgggaggctgaggctggagaatcgcttgaggctagtgagctgtgattgtaccactgcactccagctcggggaacagagcgagaccttgtctctaaaaataataatagtaataaaaataacgttttatgactatttattgcaaggtcagatttacagattgttataaattgttgagaaatttttgtgattagaatatgaaggaaaaagctttgttggtaaaagtgacatgttaaggggctatgaagtaaatatgctgcagttaattgtgctaagttaaaatacagtttagttatttgctttaaaataaactcttctttttttctttaaagtatactacctcaaaactcattatgttgtcagagccctagagctggctagtgtaacactgactatgagtaggtgggcccaccacttgagttgaggtgatttcatggtgtctttccaggctcttgatagggtgtcactgcatgcaagccatgaatctgttttgagaatcctctccattttcccaaataaaaacctatcccaacagtgactatatcactcagcattggatctaaatataaaagtggtgctttcagtgtttttggcagatagtgttccataacctttccatcagaagggattttagacaccttagaggtccgtgctacatcttcacagttcctccgaataaccttaggtggtagtgttacttgcctttgacacctgtgcatatgttttaatgactagatccaaactgtgttgttcttaaatcaaaaattggataatttttaatatttatgtattaatcacacagtgtgctctctgaagttctcttaagccttcagtttatactcttaattttctttctgagctggggaactgactttgcactttggttacacagaacattggtttccaatttagtttaactgaaatttgctgctgatatgttgagtttgttctttaaaaaatatctcatatatctcgtctttcctccttagaagaacagacctaactagcgaatgtatgaatgaaaatgcatctatttcagagccgacatgaagagtttagtttttttactttataaactgtgaatatgagtatgccagctgcattagatgtaactaatcatatttaaatatatttcactttgactttagaccttttgaagtctgtataaacttgttttgaaatacagtctccacttacgaatgtcataacaaaatacttttttgcatgataaaaaattactttgattacaaaaggcatattctttcatggtttctgcaatgagaggaagtgtaatgattattttaatatttctattaaaactgtatatttttatggctgc

SEQ ID NO: 25469 - DNA, 2907 bp, Homo sapiens
  source 1..2907: mol_type = unassigned DNA
acacagtgctgaggcagaacgcaggttcgtcacagtgggcctccgtgggcggcgccgcacgctcgtcacagtgggcctccgccggctacgccgctgcttcagtggcttgcaggcactttcctcttggaagtggcgactgctgcggggctgagcggtgctcgcacgcgtctcgggagccaggttggcggcgcgatgaggcgcagcaaggccgatgtggagcggtacgtcgcctcggtgctgggtctcaccccgtcgcctcgacagaagtcaatgaaaggattctattttgcaaagctgtattatgaagctaaagaatatgatcttgctaaaaaatacatatgtacttacattaatgtgcaagagagggatcccaaagctcacagatttctgggtcttctttatgaattggaagaaaacacagagaaagccgttgaatgttacaggcgttcagtggaattaaacccaacacaaaaagatcttgtgttgaagattgcagaattgctttgtaaaaatgatgttactgatggaagagcaaaatactgggtcgaaagagcagcaaaacttttcccaggaagtcctgcaatttataaactaaaggaacagcttctagattgtgaaggtgaagatggatggaataaactttttgacttgattcagtcagaactttatgtaagacctgatgacgtccatgtgaacatccggctagtggagttgtatcgctcaactaaaagattgaaggatgctgtggcccactgccatgaggcagagaggaacatagctttgcgttcaagtttagagtggaattcgtgtgttgtacagacccttaaggaatatctggagtctttacagtgtttggagtctgataaaagtgactggcaagcaaccaatacagacttactgctggcctatgctaatcttatgcttcttacgctttccactagagatgtgcaggaaaatagagaattactggaaagttttgatagtgctcttcagtctgcgaaatcttctttgggtggaaatgatgaactgtcagctactttcttagaaatgaaaggacatttctatatgtatgctggttctctgctcttgaagatgggtcagcatggtaataatgttcaatggcgagctctttctgagctggctgcattgtgctatctcatagcatttcaggttccaagaccaaagattaaattaagagaaggtaaagctggacaaaatctgctggaaatgatggcctgtgaccgactgagccaatcagggcacatgttgctaagcttaagtcgtggcaagcaagatttcttaaaagaggttgttgaaacttttgccaacaaaattgggcagtctgcgttatatgatgctctgttttctagtcagtcacctaaggatacatcttttcttggtagcgatgatattggaaaaattgatgtacaagaaccagagcttgaagatttggctagatacgatgttggtgctattcgagcacataatggtagtcttcagcatcttacttggcttggcttacagtggaattcattgcctgctttacctggaatccgaaaatggctaaaacagcttttccatcgtttgccccatgaaacctcaaggcttgaaacaaatgcgcctgaatcaatatgtattttagatcttgaagtatttctccttggagtagtatataccagccacttacaattaaaggagaaatgtaattctcaccatagctcctatcagccgttatgcctgccctttcctgtgtgtaaacagctttgtacagaaagacaaaaatcttggtgggatgcggtttgtactctgattcacagaaaagcagtacctggaaacttggcaaaattgagacttctagttcagcatgaaataaacactctaagagcccaggaaaaacatggccttcaacctgctctgcttgtacattgggcaaaataccttcagaaaacgggcagcggtcttaattctttttatggtcaactagaatacatagggagaagtgttcattattggaagaaagttttgccattgttgaagataataaagaagaacagtattcctgaacctattgatcctctgtttaaacattttcatagtgtagacattcaggcatcagaaattgttgaatatgaagaagacgcacacataacttttgctatgttggatgcagtaaatggaaatatagaagatgctgtgactgcttttgaatctataaaaagtgttgtttcttattggaatcttgcactgatttttcacaggaaggcagaagacattgaaaatgatgccctttctcctgaagaacaagaagaatgcagaaattatctgacaaagaccagggactacctaataaagattatagatgacggtgattcaaatctttcagtggtcaagaaattgcctgtgcccctggagtctgtaaaacagatgcttaattcagtcatgcaggaactcgaagactatagtgaaggaggtcctctctataaaaatggttctttgcgaaatgcagattcagaaataaaacattctacaccgtctcctaccaaatattcactatcaccaagtaaaagttacaagtattctcccgaaacaccacctcgatggacagaagatcggaattctttactgaatatgatttgccaacaagtagaggccattaagaaagaaatgcaggagttgaaactaaatagcagtaagtcagcatcccgtcatcgttggcccacagagaattatggaccagactcggtgcctgatggatatcaggggtcacagacatttcatggggctccactaacagaagcagcacatcgtcattttacaattgagaaacatggagactccaaatggattatttacaggttcacaaaacagctttgtggcactgaaagggcgagagccaagatctcctga

SEQ ID NO: 25470 - DNA, 541 bp, Homo sapiens
  source 1..541: mol_type = unassigned DNA
gaagtggcgactgctgcggggctgagcggtgctcgcacgcgtctcgggagccaggttggcggcgcgatgaggcgcagcaaggccgatgtggagcggtacgtcgcctcggtgctgggtctcaccccgtcgcctcgacagatacatatgtacttacattaatgtgcaagagagggatcccaaagctcacagatttctgggtcttctttatgaattggaagaaaacacagagaaagccgttgaatgttacaggcgttcagtggaattaaacccaacacaaaaagatcttgtgttgaagattgcagaattgctttgtaaaaatgatgttactgatggaagagcaaaatactgggtcgaaagagcagcaaaacttttcccaggaagtcctgcaatttataaactaaaggaacagcttctagattgtgaaggtgaagatggatggaataaactttttgacttgattcagtcagaactttatgtaagacctgatgacgtccatgtgaacatccggctagtggagttgtatcgctcaactaaaagattg

SEQ ID NO: 25471 - DNA, 3304 bp, Homo sapiens
  source 1..3304: mol_type = unassigned DNA
ataaaccccagggctcattcttgagctgctcctgcatagatctcgtcctgttcaacacaccaaagattgacagctgaactgagagaccatcacccacagacacaactggccactgggtggtgcacaagtcagacagaactgaatagtcctgtgaagactctggacactgaactgactttggaaccagactgcagaatggaggggtgggaacttgtggcttgaacctaatcaggtttcattaaggttttctatagataagatcatgtcaagacaccctcagaccacagggcggcgccacgagcccggccgagtgcagctggagcgccgacgtcgccgaggatacacagtgctgaggcagaacgcaggttcgtcacagtgggcctccgtgggcggcgccgcacgctcgtcacagtgggcctccgccggctacgccgctgcttcagtggcttgcaggcactttcctcttggaagtggcgactgctgcggggctgagcggtgctcgcacgcgtctcgggagccaggttggcggcgcgatgaggcgcagcaaggccgatgtggagcggtacgtcgcctcggtgctgggtctcaccccgtcgcctcgacagaagtcaatgaaaggattctattttgcaaagctgtattatgaagctaaagaatatgatcttgctaaaaaatacatatgtacttacattaatgtgcaagagagggatcccaaagctcacagatttctgggtcttctttatgaattggaagaaaacacagagaaagccgttgaatgttacaggcgttcagtggaattaaacccaacacaaaaagatcttgtgttgaagattgcagaattgctttgtaaaaatgatgttactgatggaagagcaaaatactgggtcgaaagagcagcaaaacttttcccaggaagtcctgcaatttataaactaaaggaacagcttctagattgtgaaggtgaagatggatggaataaactttttgacttgattcagtcagaactttatgtaagacctgatgacgtccatgtgaacatccggctagtggagttgtatcgctcaactaaaagattgaaggatgctgtggcccactgccatgaggcagagaggaacatagctttgcgttcaagtttagagtggaattcgtgtgttgtacagacccttaaggaatatctggagtctttacagtgtttggagtctgataaaagtgactggcaagcaaccaatacagacttactgctggcctatgctaatcttatgcttcttacgctttccactagagatgtgcaggaaaatagagaattactggaaagttttgatagtgctcttcagtctgcgaaatcttctttgggtggaaatgatgaactgtcagctactttcttagaaatgaaaggacatttctatatgtatgctggttctctgctcttgaagatgggtcagcatggtaataatgttcaatggcgagctctttctgagctggctgcattgtgctatctcatagcatttcaggttccaagaccaaagattaaattaagagaaggtaaagctggacaaaatctgctggaaatgatggcctgtgaccgactgagccaatcagggcacatgttgctaagcttaagtcgtggcaagcaagatttcttaaaagaggttgttgaaacttttgccaacaaaattgggcagtctgcgttatatgatgctctgttttctagtcagtcacctaaggatacatcttttcttggtagcgatgatattggaaaaattgatgtacaagaaccagagcttgaagatttggctagatacgatgttggtgctattcgagcacataatggtagtcttcagcatcttacttggcttggcttacagtggaattcattgcctgctttacctggaatccgaaaatggctaaaacagcttttccatcgtttgccccatgaaacctcaaggcttgaaacaaatgcgcctgaatcaatatgtattttagatcttgaagtatttctccttggagtagtatataccagccacttacaattaaaggagaaatgtaattctcaccatagctcctatcagccgttatgcctgccctttcctgtgtgtaaacagctttgtacagaaagacaaaaatcttggtgggatgcggtttgtactctgattcacagaaaagcagtacctggaaacttggcaaaattgagacttctagttcagcatgaaataaacactctaagagcccaggaaaaacatggccttcaacctgctctgcttgtacattgggcaaaataccttcagaaaacgggcagcggtcttaattctttttatggtcaactagaatacatagggagaagtgttcattattggaagaaagttttgccattgttgaagataataaagaagaacagtattcctgaacctattgatcctctgtttaaacattttcatagtgtagacattcaggcatcagaaattgttgaatatgaagaagacgcacacataacttttgctatgttggatgcagtaaatggaaatatagaagatgctgtgactgcttttgaatctataaaaagtgttgtttcttattggaatcttgcactgatttttcacaggaaggcagaagacattgaaaatgatgccctttctcctgaagaacaagaagaatgcagaaattatctgacaaagaccagggactacctaataaagattatagatgacggtgattcaaatctttcagtggtcaagaaattgcctgtgcccctggagtctgtaaaacagatgcttaattcagtcatgcaggaactcgaagactatagtgaaggaggtcctctctataaaaatggttctttgcgaaatgcagattcagaaataaaacattctacaccgtctcctaccaaatattcactatcaccaagtaaaagttacaagtattctcccgaaacaccacctcgatggacagaagatcggaattctttactgaatatgatttgccaacaagtagaggccattaagaaagaaatgcaggagttgaaactaaatagcagtaagtcagcatcccgtcatcgttggcccacagagaattatggaccagactcggtgcctgatggatatcaggggtcacagacatttcatggggctccactaacagaagcagcacatcgtcattttacaattgagaaacatggagactccaaatggattatttacaggttcacaaaacagctttgtggcactgaaagggcgagagccaagatctcctgatttctgttcctgtgttcatagattctttttccttaataaaagtaaacatatatcaa

SEQ ID NO: 25472 - DNA, 7165 bp, Homo sapiens
  source 1..7165: mol_type = unassigned DNA
ctttcctcttggaagtggcgactgctgcggggctgagcggtgctcgcacgcgtctcgggagccaggttggcggcgcgatgaggcgcagcaaggccgatgtggagcggtacgtcgcctcggtgctgggtctcaccccgtcgcctcgacagaagtcaatgaaaggattctattttgcaaagctgtattatgaagctaaagaatatgatcttgctaaaaaatacatatgtacttacattaatgtgcaagagagggatcccaaagctcacagatttctgggtcttctttatgaattggaagaaaacacagagaaagccgttgaatgttacaggcgttcagtggaattaaacccaacacaaaaagatcttgtgttgaagattgcagaattgctttgtaaaaatgatgttactgatggaagagcaaaatactgggtcgaaagagcagcaaaacttttcccaggaagtcctgcaatttataaactaaaggaacagcttctagattgtgaaggtgaagatggatggaataaactttttgacttgattcagtcagaactttatgtaagacctgatgacgtccatgtgaacatccggctagtggagttgtatcgctcaactaaaagattgaaggatgctgtggcccactgccatgaggcagagaggaacatagctttgcgttcaagtttagagtggaattcgtgtgttgtacagacccttaaggaatatctggagtctttacagtgtttggagtctgataaaagtgactggcaagcaaccaatacagacttactgctggcctatgctaatcttatgcttcttacgctttccactagagatgtgcaggaaaatagagaattactggaaagttttgatagtgctcttcagtctgcgaaatcttctttgggtggaaatgatgaactgtcagctactttcttagaaatgaaaggacatttctatatgtatgctggttctctgctcttgaagatgggtcagcatggtaataatgttcaatggcgagctctttctgagctggctgcattgtgctatctcatagcatttcaggttccaagaccaaagattaaattaagagaaggtaaagctggacaaaatctgctggaaatgatggcctgtgaccgactgagccaatcagggcacatgttgctaagcttaagtcgtggcaagcaagatttcttaaaagaggttgttgaaacttttgccaacaaaattgggcagtctgcgttatatgatgctctgttttctagtcagtcacctaaggatacatcttttcttggtagcgatgatattggaaaaattgatgtacaagaaccagagcttgaagatttggctagatacgatgttggtgctattcgagcacataatggtagtcttcagcatcttacttggcttggcttacagtggaattcattgcctgctttacctggaatccgaaaatggctaaaacagcttttccatcgtttgccccatgaaacctcaaggcttgaaacaaatgcgcctgaatcaatatgtattttagatcttgaagtatttctccttggagtagtatataccagccacttacaattaaaggagaaatgtaattctcaccatagctcctatcagccgttatgcctgccctttcctgtgtgtaaacagctttgtacagaaagacaaaaatcttggtgggatgcggtttgtactctgattcacagaaaagcagtacctggaaacttggcaaaattgagacttctagttcagcatgaaataaacactctaagagcccaggaaaaacatggccttcaacctgctctgcttgtacattgggcaaaataccttcagaaaacgggcagcggtcttaattctttttatggtcaactagaatacatagggagaagtgttcattattggaagaaagttttgccattgttgaagataataaagaagaacagtattcctgaacctattgatcctctgtttaaacattttcatagtgtagacattcaggcatcagaaattgttgaatatgaagaagacgcacacataacttttgctatgttggatgcagtaaatggaaatatagaagatgctgtgactgcttttgaatctataaaaagtgttgtttcttattggaatcttgcactgatttttcacaggaaggcagaagacattgaaaatgatgccctttctcctgaagaacaagaagaatgcagaaattatctgacaaagaccagggactacctaataaagattatagatgacggtgattcaaatctttcagtggtcaagaaattgcctgtgcccctggagtctgtaaaacagatgcttaattcagtcatgcaggaactcgaagactatagtgaaggaggtcctctctataaaaatggttctttgcgaaatgcagattcagaaataaaacattctacaccgtctcctaccaaatattcactatcaccaagtaaaagttacaagtattctcccgaaacaccacctcgatggacagaagatcggaattctttactgaatatgatttgccaacaagtagaggccattaagaaagaaatgcaggagttgaaactaaatagcagtaagtcagcatcccgtcatcgttggcccacagagaattatggaccagactcggtgcctgatggatatcaggggtcacagacatttcatggggctccactaacagttgcaactactggcccttcagtatattatagtcagtcaccagcatataattcccagtatcttctcagaccagcagctaatgttactcccacaaagggttcttctaatacagaatttaagtcaaccaaagaaggattttccatccctgtgtctgctgatggatttaaatttggcatttcggaaccaggaaatcaagaaaagaaaagggaaaagcctcttgaaaatgatactggcttccaggctcaggatattagtggccggaagaagggccgtggtgtgatttttggccaaacaagtagcacttttacatttgcagatgttgcaaaatcaacttcaggagaaggatttcagtttggcaaaaaagacctcaatttcaagggattttcaggtgctggagaaaaattattctcatcacgatacggtaaaatggccaataaagcaaacacttccggtgactttgagaaagatgatgatgcctataagactgaggacagcgatgacatccattttgaaccagtagttcaaatgcctgaaaaagtagaacttgtaacaggagaagaaggtgaaaaagttctgtattcacagggggtaaaactatttagatttgatgctgaggtaaggcagtggaaagaaaggggcttggggaacttaaaaattctcaaaaacgaggtcaatggcaaactaagaatgctgatgcgaagagaacaagtactaaaagtgtgtgctaatcattggataacgactacaatgaacctgaagcccctctctggatcagatagagcatggatgtggtcagccagtgatttctctgacggtgatgccaaactagagcggttggcagcaaaatttaaaacaccagagctggctgaagaattcaagcagaaatttgaggaatgccagcggcttctgttagacataccacttcaaactccccataaacttgtagatactggcagagctgccaagttaatacagagagctgaagaaatgaagagtggactgaaagatttcaaaacatttttgacaaatgatcaaacaaaagtcactgaggaagaaaataagggttcaggtacaggtgcggccggtgcctcagacacaacaataaaacccaatgctgaaaacactgggcccacattagaatgggataactatgacttaagggaagatgctttggatgatagtgtcagtagtagctcagtacatgcttctccattggcaagtagccctgtgagaaaaaatcttttccgctttgatgagtcaacaacaggatctaacttcagttttaaatctgctttgagtctatctaagtctcctgccaagttgaatcagagtgggacttcagttggcactgatgaagaatctgttgttactcaagaagaagagagagatggacagtactttgaacctgttgttcctttacctgatctagttgaagtatccagtggtgaggaaaatgaacaagttgtttttagtcacagggcagaaatctacagatatgataaagatgttggtcaatggaaagaaaggggcattggtgatataaagattttacagaattatgataataagcaagttcgtatagtgatgagaagggaccaagtattaaaactttgtgccaatcacagaataactccagacatgagtttgcaaaatatgaaagggacagaaagagtatgggtgtggactgcatgtgattttgcagatggagaaagaaaagtagagcatttagctgttcgttttaaactacaggatgttgcagactcgtttaagaaaatttttgatgaagcaaaaacagcccaggaaaaagattctttgataacacctcatgtttctcggtcaagcactcccagagagtcaccatgtggcaaaattgctgtagctatattagaagaaaccacaagagagaggacagatgttattcagggtgatgatgtagcagatgcagcttcagaagttgaagtgtctagcacatctgaaacaacaacaaaagcagtggtttctcctccaaagtttgtatttgtttcagagtctgttaaaagaatttttagtagtgaaaaatcaaaaccatttgtatttggcaacagttctgccactgggtctttgtttggatttagttttaatgcacctttgaaaagtaacaatagtgaaactagttcagtagcccagagtggatctgaaagcaaagtggaacctaaaaaatgtgaactgtcaaagaactctgatatcgaacagtcttcagatagcaaagtcaaaaatctctctgcttcctttccaacggaagaatcttcaatcaactacacatttaaaacaccagaaaaggagcctccattatggcatgctgaatttaccaaagaagaattggttcagaagctccgttccaccacaaaaagtgcagatcacttaaacggcctgcttcgggaaatagaggcaaccaatgcagtccttatggagcaaattaagcttctcaaaagtgaaataagaagattggaaaggaatcaagagcgagagaagtctgcagctaacctggaatacttgaagaacgtcttgctgcagttcattttcttgaagccaggtagtgaaagagagagacttcttcctgttataaatacgatgttgcagctcagccctgaagaaaagggaaaacttgctgcggttgctcaagatgaggaagaaaatgcttcccgttcttctggatgagcatcctatcttcgtagttggtttggacttcgataggttgatggaaggaatacttctattaaccaaatagaatctgtttacaaaaatggttcgtgtgtgttaccattattcttttgtcaaaaagtgtgtatatatgtttgcatttacatatatttgtacatctgtatgacagatgtattttaaaagtttcaacttgaagtaaaagtacaacagcttgaagtgttgataccaggccacagccctctaactcatgtgatctcccatgcatgctgccagaataaaaccaccaggaatgaattcactccccacttctctggaacctcaggacccgcccatttctcggcagtactgtgaattttgaagttaaactaaattttggtaccataccaactggaatttaggctttaaaaataatgtttcaaggccaggtgtggtgattcatgcctgaaatcccactactttgggaggctgaggctggagaatcgcttgaggctagtgagctgtgattgtaccactgcactccagctcggggaacagagcgagaccttgtctctaaaaataataatagtaataaaaataacgttttatgactatttattgcaaggtcagatttacagattgttataaattgttgagaaatttttgtgattagaatatgaaggaaaaagctttgttggtaaaagtgacatgttaaggggctatgaagtaaatatgctgcagttaattgtgctaagttaaaatacagtttagttatttgctttaaaataaactcttctttttttctttaaagtatactacctcaaaactcattatgttgtcagagccctagagctggctagtgtaacactgactatgagtaggtgggcccaccacttgagttgaggtgatttcatggtgtctttccaggctcttgatagggtgtcactgcatgcaagccatgaatctgttttgagaatcctctccattttcccaaataaaaacctatcccaacagtgactatatcactcagcattggatctaaatataaaagtggtgctttcagtgtttttggcagatagtgttccataacctttccatcagaagggattttagacaccttagaggtccgtgctacatcttcacagttcctccgaataaccttaggtggtagtgttacttgcctttgacacctgtgcatatgttttaatgactagatccaaactgtgttgttcttaaatcaaaaattggataatttttaatatttatgtattaatcacacagtgtgctctctgaagttctcttaagccttcagtttatactcttaattttctttctgagctggggaactgactttgcactttggttacacagaacattggtttccaatttagtttaactgaaatttgctgctgatatgttgagtttgttctttaaaaaatatctcatatatctcgtctttcctccttagaagaacagacctaactagcgaatgtatgaatgaaaatgcatctatttcagagccgacatgaagagtttagtttttttactttataaactgtgaatatgagtatgccagctgcattagatgtaactaatcatatttaaatatatttcactttgactttagaccttttgaagtctgtataaacttgttttgaaatacagtctccacttacgaatgtcataacaaaatacttttttgcatgataaaaaattactttgattacaaaaggcatattctttcatggtttctgcaatgagaggaagtgtaatgattattttaatatttctattaaaactgtatattttta

SEQ ID NO: 25473 - DNA, 2848 bp, Homo sapiens
  source 1..2848: mol_type = unassigned DNA
ctttcctcttggaagtggcgactgctgcggggctgagcggtgctcgcacgcgtctcgggagccaggttggcggcgcgatgaggcgcagcaaggccgatgtggagcggtacgtcgcctcggtgctgggtctcaccccgtcgcctcgacagaagtcaatgaaaggattctattttgcaaagctgtattatgaagctaaagaatatgatcttgctaaaaaatacatatgtacttacattaatgtgcaagagagggatcccaaagctcacagatttctgggtcttctttatgaattggaagaaaacacagagaaagccgttgaatgttacaggcgttcagtggaattaaacccaacacaaaaagatcttgtgttgaagattgcagaattgctttgtaaaaatgatgttactgatggaagagcaaaatactgggtcgaaagagcagcaaaacttttcccaggaagtcctgcaatttataaactaaaggaacagcttctagattgtgaaggtgaagatggatggaataaactttttgacttgattcagtcagaactttatgtaagacctgatgacgtccatgtgaacatccggctagtggagttgtatcgctcaactaaaagattgaaggatgctgtggcccactgccatgaggcagagaggaacatagctttgcgttcaagtttagagtggaattcgtgtgttgtacagacccttaaggaatatctggagtctttacagtgtttggagtctgataaaagtgactggcaagcaaccaatacagacttactgctggcctatgctaatcttatgcttcttacgctttccactagagatgtgcaggaaaatagagaattactggaaagttttgatagtgctcttcagtctgcgaaatcttctttgggtggaaatgatgaactgtcagctactttcttagaaatgaaaggacatttctatatgtatgctggttctctgctcttgaagatgggtcagcatggtaataatgttcaatggcgagctctttctgagctggctgcattgtgctatctcatagcatttcaggttccaagaccaaagattaaattaagagaaggtaaagctggacaaaatctgctggaaatgatggcctgtgaccgactgagccaatcagggcacatgttgctaagcttaagtcgtggcaagcaagatttcttaaaagaggttgttgaaacttttgccaacaaaattgggcagtctgcgttatatgatgctctgttttctagtcagtcacctaaggatacatcttttcttggtagcgatgatattggaaaaattgatgtacaagaaccagagcttgaagatttggctagatacgatgttggtgctattcgagcacataatggtagtcttcagcatcttacttggcttggcttacagtggaattcattgcctgctttacctggaatccgaaaatggctaaaacagcttttccatcgtttgccccatgaaacctcaaggcttgaaacaaatgcgcctgaatcaatatgtattttagatcttgaagtatttctccttggagtagtatataccagccacttacaattaaaggagaaatgtaattctcaccatagctcctatcagccgttatgcctgccctttcctgtgtgtaaacagctttgtacagaaagacaaaaatcttggtgggatgcggtttgtactctgattcacagaaaagcagtacctggaaacttggcaaaattgagacttctagttcagcatgaaataaacactctaagagcccaggaaaaacatggccttcaacctgctctgcttgtacattgggcaaaataccttcagaaaacgggcagcggtcttaattctttttatggtcaactagaatacatagggagaagtgttcattattggaagaaagttttgccattgttgaagataataaagaagaacagtattcctgaacctattgatcctctgtttaaacattttcatagtgtagacattcaggcatcagaaattgttgaatatgaagaagacgcacacataacttttgctatgttggatgcagtaaatggaaatatagaagatgctgtgactgcttttgaatctataaaaagtgttgtttcttattggaatcttgcactgatttttcacaggaaggcagaagacattgaaaatgatgccctttctcctgaagaacaagaagaatgcagaaattatctgacaaagaccagggactacctaataaagattatagatgacggtgattcaaatctttcagtggtcaagaaattgcctgtgcccctggagtctgtaaaacagatgcttaattcagtcatgcaggaactcgaagactatagtgaaggaggtcctctctataaaaatggttctttgcgaaatgcagattcagaaataaaacattctacaccgtctcctaccaaatattcactatcaccaagtaaaagttacaagtattctcccgaaacaccacctcgatggacagaagatcggaattctttactgaatatgatttgccaacaagtagaggccattaagaaagaaatgcaggagttgaaactaaatagcagtaagtcagcatcccgtcatcgttggcccacagagaattatggaccagactcggtgcctgatggatatcaggggtcacagacatttcatggggctccactaacagaagcagcacatcgtcattttacaattgagaaacatggagactccaaatggattatttacaggttcacaaaacagctttgtggcactgaaagggcgagagccaagatctcctgatttctgttcctgtgttcatagattctttttccttaataaaagtaaacatatatcaa

SEQ ID NO: 25474 - DNA, 5576 bp, Homo sapiens
  source 1..5576: mol_type = unassigned DNA
acacagtgctgaggcagaacgcaggttcgtcacagtgggcctccgtgggcggcgccgcacgctcgtcacagtgggcctccgccggctacgccgctgcttcagtggcttgcaggcactttcctcttggaagtggcgactgctgcggggctgagcggtgctcgcacgcgtctcgggagccaggttggcggcgcgatgaggcgcagcaaggccgatgtggagcggtacgtcgcctcggtgctgggtctcaccccgtcgcctcgacagaagtcaatgaaaggattctattttgcaaagctgtattatgaagctaaagaatatgatcttgctaaaaaatacatatgtacttacattaatgtgcaagagagggatcccaaagctcacagatttctgggtcttctttatgaattggaagaaaacacagagaaagccgttgaatgttacaggcgttcagtggaattaaacccaacacaaaaagatcttgtgttgaagattgcagaattgctttgtaaaaatgatgttactgatggaagagcaaaatactgggtcgaaagagcagcaaaacttttcccaggaagtcctgcaatttataaactaaaggaacagcttctagattgtgaaggtgaagatggatggaataaactttttgacttgattcagtcagaactttatgtaagacctgatgacgtccatgtgaacatccggctagtggagttgtatcgctcaactaaaagattgaaggatgctgtggcccactgccatgaggcagagaggaacatagctttgcgttcaagtttagagtggaattcgtgtgttgtacagacccttaaggaatatctggagtctttacagtgtttggagtctgataaaagtgactggcgagcaaccaatacagacttactgctggcctatgctaatcttatgcttcttacgctttccactagagatgtgcaggaaaatagagaattactggaaagttttgatagtgctcttcagtctgcgaaatcttctttgggtggaaatgatgaactgtcagctactttcttagaaatgaaaggacatttctatatgtatgctggttctctgctcttgaagatgggtcagcatggtaataatgttcaatggcgagctctttctgagctggctgcattgtgctatctcatagcatttcaggttccaagaccaaagattaaattaagagaaggtaaagctggacaaaatctgctggaaatgatggcctgtgaccgactgagccaatcagggcacatgttgctaagcttaagtcgtggcaagcaagatttcttaaaagaggttgttgaaacttttgccaacaaaattgggcagtctgcgttatatgatgctctgttttctagtcagtcacctaaggatacatcttttcttggtagcgatgatattggaaaaattgatgtacaagaaccagagcttgaagatttggctagatacgatgttggtgctattcgagcacataatggtagtcttcagcatcttacttggcttggcttacagtggaattcattgcctgctttacctggaatccgaaaatggctaaaacagcttttccatcgtttgccccatgaaacctcaaggcttgaaacaaatgcgcctgaatcaatatgtattttagatcttgaagtatttctccttggagtagtatataccagccacttacaattaaaggagaaatgtaattctcaccatagctcctatcagccgttatgcctgccctttcctgtgtgtaaacagctttgtacagaaagacaaaaatcttggtgggatgcggtttgtactctgattcacagaaaagcagtacctggaaacttggcaaaattgagacttctagttcagcatgaaataaacactctaagagcccaggaaaaacatggccttcaacctgctctgcttgtacattgggcaaaataccttcagaaaacgggcagcggtcttaattctttttatggtcaactagaatacatagggagaagtgttcattattggaagaaagttttgccattgttgaagataataaagaagaacagtattcctgaacctattgatcctctgtttaaacattttcatagtgtagacattcaggcatcagaaattgttgaatatgaagaagacgcacacataacttttgctatattggatgcagtaaatggaaatatagaagatgctgtgactgcttttgaatctataaaaagtgttgtttcttattggaatcttgcactgatttttcacaggaaggcagaagacattgaaaatgatgccctttctcctgaagaacaagaagaatgcagaaattatctgacaaagaccagggactacctaataaagattatagatgacggtgattcaaatctttcagtggtcaagaaattgcctgtgcccctggagtctgtaaaacagatgcttaattcagtcatgcaggaactcgaagactatagtgaaggaggtcctctctataaaaatggttctttgcgaaatgcagattcagaaataaaacattctacaccgtctcctaccaaatattcactatcaccaagtaaaagttacaagtattctcccgaaacaccacctcgatggacagaagatcggaattctttactgaatatgatttgccaacaagtagaggccattaagaaagaaatgcaggagttgaaactaaatagcagtaagtcagcatcccgtcatcgttggcccacagagaattatggaccagactcggtgcctgatggatatcaggggtcacagacatttcatggggctccactaacagttgcaactactggcccttcagtatattatagtcagtcaccagcatataattcccagtatcttctcagaccagcagctaatgttactcccacaaagggttcttctaatacagaatttaagtcaaccaaagaaggattttccatccctgtgtctgctgatggatttaaatttggcatttcggaaccaggaaatcaagaaaagaaaagggaaaagcctcttgaaaatgatactggcttacaggctcaggatattaggggccggaagaagggccgtggtgtgatttttggccaaacaagtagcacttttacatttgcagatgttgcaaaatcaacttcaggagaaggatttcagtttggcaaaaaagacctcaatttcaagggattttcaggtgctggagaaaaattattctcatcacgatacggtaaaatggccaataaagcaaacacttccggtgactttgagaaagatgatgatgcctataagactgaggacagcgatgacatccattttgaaccagtagttcaaatgcctgaaaaagtagaacttgtaacaggagaagaaggtgaaaaagttctgtattcacagggggtaaaactatttagatttgatgctgaggtaaggcagtggaaagaaaggggcttggggaacttaaaaattctcaaaaacgaggtcaatggcaaactaagaatgctgatgcgaagagaacaagtactaaaagtgtgtgctaatcattggataacgactacaatgaacctgaagcccctctctggatcagatagagcatggatgtggtcagccagtgatttctctgatggtgatgccaaactagagcggttggcagcaaaatttaaaacaccagagctggctgaagaattcaagcagaaatttgaggaatgccagcggcttctgttagacataccacttcaaactccccataaacttgtagatactggcagagctgccaagttaatacagagagctgaagaaatgaagagtggactgaaagatttcaaaacatttttgacaaatgatcaaacaaaagtcactgaggaagaaaataagggttcaggtacaggtgtggccggtgcctcagacacaacaataaaacccaatgctgaaaacactgggcccacattagaatgggataactatgacttaagggaagatgctttggatgatagtgtcagtagtagctcagtacatgcttctccattggcaagtagccctgtgagaaaaaatcttttccgctttgatgagtcaacaacaggatctaacttcagttttaaatctgctttgagtctatctaagtctcctgccaagttgaatcagagtgggacttcagttggcactgatgaagaatctgttgttactcaagaagaagagagagatggacagtactttgaacctgttgttcctttacctgatctagttgaagtatccagtggtgaggaaaatgaacaagttgtttttagtcacagggcagaaatctacagatatgataaagatgttggtcaatggaaagaaaggggcattggtgatataaagattttacagaattatgataataagcaagttcgtatagtgatgagaagggaccaagtattaaaactttgtgccaatcacagaataactccagacatgagtttgcaaaatatgaaagggacagaaagagtatgggtgtggactgcatgtgattttgcagatggagaaagaaaagtagagcatttagctgttcgttttaaactacaggatgttgcagactcgtttaagaaaatttttgatgaagcaaaaacagcccaggaaaaagattctttgataacacctcatgtttctcggtcaagcactcccagagagtcaccatgtggcaaaattgctgtagctgtattagaagaaatcacaagagagaggacagatgttattcagggtgatgatgtagcagatgcagcttcagaagttgaagtgtctagcacatctgaaacaacaacaaaagcagtggtttctcctccaaagtttgtatttgtttcagagtctgttaaaagaatttttagtagtgaaaaatcaaaaccatttgcatttggcaacagttctgccactgggtctttgtttggatttagttttaatgcacctttgaaaagtaacaatagtgaaactagttcagtagcccagagtggatctgaaagcaaagtggaacctaaaaaatgtgaactgtcaaagaactctgatatcgaacagtcttcagatagcaaagtcaaaaatctctctgcttcctttccaacggaagaatcttcaatcaactacacatttaaaacaccagaaaaggagcctccattatggcatgctgaatttaccaaagaagaattggttcagaagctccgttccaccacaaaaagtgcagatcacttaaacggcctgcttcgggaaatagaggcaaccaatgcagtccttatggagcaaattaagcttctcaaaagtgaaataagaagattggaaaggaatcaagagcgagagaagtctgcagctaacctggaatacttgaagaacgtcttgctgcagttcattttcttgaagccaggtagtgaaagagagagacttcttcctgttataaatacgatgttgcagctcagccctgaagaaaagggaaaacttgctgcggttgctcaagatgaggaagaaaatccttcccgttcttctggatgagcatcctatcttcgtagttggtttggacttcgataggttgatggaaggaatacttctattaaccaaatagaatctgtttacaaaaa

SEQ ID NO: 25475 - DNA, 2511 bp, Homo sapiens
  source 1..2511: mol_type = unassigned DNA
gcgccgggaccgctgggaccccgcactcggcgtccgccgccgccgggtagccgggcagtggaggtcccggatgaggcgacaatttttccggccccccctcccagtcccgccccacttccggggccgccactttcactttctcttccgccgaagccgctccccttgcgaagaactggggcctcccgggaggagagagggctttgccttgaaacccgggacgccaggggcgctcccgcaagtgggggtcctccgggacttggaacgccccggctgggtggtgtccgggcgtcctttccccgcttcttcccacctcggctggtcccgtttcctcctgcgcccagtgcggacctgtctcggcgcccgctgccctctcaccgccccacgcaggatcccggcctggtcaccgggcagtgtgatgcttcccgactgccgcggggacagcgaggcacacacagggcttgggccgcgccggaggccacacggcctggctgagttgctcctggtctcccgcctctcccaggcgacccggaggtagcatttcccaggaggcacggtcccccccagggggatgggcacagccacgccagatggacgagaagaccaagaaaggctgtgggtgagcgtggaggatgctcagatgcacaccgtcaccatctggctcacagtgcgccctgatatgacagtggcgtctctcaaggacatggtttttctggactatggcttcccaccagtcttgcagcagtgggtgattgggcagcggctggcacgagaccaggagaccctgcactcccatggggtgcggcagaatggggacagtgcctacctctatctgctgtcagcccgcaacacctccctcaaccctcaggagctgcagcgggagcggcagctgcggatgctggaagatctgggcttcaaggacctcacgctgcagccgcggggccctctggagccaggccccccaaagcccggggtcccccaggaacccggacgggggcagccagatgcagtgcctgagcccccaccggtgggctggcagtgccccgggtgcaccttcatcaacaagcccacgcggcctggctgtgagatgtgctgccgggcgcgccccgaggcctaccaggtccccgcctcataccagcccgacgaggaggagcgagcgcgcctggcgggcgaggaggaggcgctgcgtcagtaccagcagcggaagcagcagcagcaggaggggaactacctgcagcacgtccagctggaccagaggagcctggtgctgaacacggagcccgccgagtgccccgtgtgctactcggtgctggcgcccggcgaggccgtggtgctgcgtgagtgtctgcacaccttctgcagggagtgcctgcagggcaccatccgcaacagccaggaggcggaggtctcctgccccttcattgacaacacctactcgtgctcgggcaagctgctggagagggagatcaaggcgctcctgacccctgaggattaccagcgatttctagacctgggcatctccattgctgaaaaccgcagtgccttcagctaccattgcaagaccccagattgcaagggatggtgcttctttgaggatgatgtcaatgagttcacctgccctgtgtgtttccacgtcaactgcctgctctgcaaggccatccatgagcagatgaactgcaaggagtatcaggaggacctggccctgcgggctcagaacgatgtggctgcccggcagacgacagagatgctgaaggtgatgctgcagcagggcgaggccatgcgctgcccccagtgccagatcgtggtacagaagaaggacggctgcgactggatccgctgcaccgtctgccacaccgagatctgctgggtcaccaagggcccacgctggggccctgggggcccaggagacaccagcgggggctgccgctgcagggtaaatgggattccttgccacccaagctgtcagaactgccactgagctaaagatggtggggccacatgctgacccagccccacatccacattctgttagaatgtagctcagggagcttcgtggacggccttgcttgctgtagcgttgtaggggccctgcctgcactgcggttgtccacggtcacatctgccccagtgcctttgtccttcccttggggcttgccggccagacttctctcccctgcggctcccacctctgcctgaccccagccttaaacatagcccctggccagaggccttgctgggtggagcctctgtgtgactccatactcctcccaccacaacactcatctgtcaaacaccaagcactctcagcctccccgccttcagctgtcagctttctggggctaacttctctgcctttgtggttggaggcctgaggcctcttggaactcttgctaacctgttcagagccaggaaggagactgcacagttttgaaagcacagcccgtcaggtccggctctgcgtctccctctctgcagcctgtgtaagctattataattaaaatggttttccgggaa

SEQ ID NO: 25476 - DNA, 2774 bp, Homo sapiens
  source 1..2774: mol_type = unassigned DNA
cgcctgcggcccagctccttcccgcggctctgcgatgcggcccgcagggtgacccgggcgggagtccggggacccgcgatcagccccggaggacggggtggggtcgccccaaacaggagcgccgggaccgctgggaccccgcactcggcgtccgccgccgccgggtagccgggcagtggaggtcccggatgaggcgacaatttttccggccccccctcccagtcccgccccacttccggggccgccactttcactttctcttccgccgaagccgctccccttgcgaagaactggggcctcccgggaggagagagggctttgccttgaaacccgggacgccaggggcgctcccgcaagtgggggtcctccgggacttggaacgccccggctgggtggtgtccgggcgtcctttccccgcttcttcccacctcggctggtcccgtttcctcctgcgcccagtgcggacctgtctcggcgcccgctgccctctcaccgccccacgcaggatcccggcctggtcaccgggcagtgtgatgcttcccgactgccgcggggacagcgaggcacacacagggcttgggccgcgccggaggccacacggcctggctgagttgctcctggtctcccgcctctcccaggcgacccggaggtagcatttcccaggaggcacggtcccccccagggggatgggcacagccacgccagatggacgagaagaccaagaaagcagaggaaatggccctgagcctcacccgagcagtggcgggcggggatgaacaggtggcaatgaagtgtgccatctggctggcagagcaacgggtgcccctgagtgtgcaactgaagcctgaggtctccccaacgcaggacatcaggctgtgggtgagcgtggaggatgctcagatgcacaccgtcaccatctggctcacagtgcgccctgatatgacagtggcgtctctcaaggacatggtttttctggactatggcttcccaccagtcttgcagcagtgggtgattgggcagcggctggcacgagaccaggagaccctgcactcccatggggtgcggcagaatggggacagtgcctacctctatctgctgtcagcccgcaacacctccctcaaccctcaggagctgcagcgggagcggcagctgcggatgctggaagatctgggcttcaaggacctcacgctgcagccgcggggccctctggagccaggccccccaaagcccggggtcccccaggaacccggacgggggcagccagatgcagtgcctgagcccccaccggtgggctggcagtgccccgggtgcaccttcatcaacaagcccacgcggcctggctgtgagatgtgctgccgggcgcgccccgaggcctaccaggtccccgcctcataccagcccgacgaggaggagcgagcgcgcctggcgggcgaggaggaggcgctgcgtcagtaccagcagcggaagcagcagcagcaggaggggaactacctgcagcacgtccagctggaccagaggagcctggtgctgaacacggagcccgccgagtgccccgtgtgctactcggtgctggcgcccggcgaggccgtggtgctgcgtgagtgtctgcacaccttctgcagggagtgcctgcagggcaccatccgcaacagccaggaggcggaggtctcctgccccttcattgacaacacctactcgtgctcgggcaagctgctggagagggagatcaaggcgctcctgacccctgaggattaccagcgatttctagacctgggcatctccattgctgaaaaccgcagtgccttcagctaccattgcaagaccccagattgcaagggatggtgcttctttgaggatgatgtcaatgagttcacctgccctgtgtgtttccacgtcaactgcctgctctgcaaggccatccatgagcagatgaactgcaaggagtatcaggaggacctggccctgcgggctcagaacgatgtggctgcccggcagacgacagagatgctgaaggtgatgctgcagcagggcgaggccatgcgctgcccccagtgccagatcgtggtacagaagaaggacggctgcgactggatccgctgcaccgtctgccacaccgagatctgctgggtcaccaagggcccacgctggggccctgggggcccaggagacaccagcgggggctgccgctgcagggtaaatgggattccttgccacccaagctgtcagaactgccactgagctaaagatggtggggccacatgctgacccagccccacatccacattctgttagaatgtagctcagggagcttcgtggacggccttgcttgctgtagcgttgtaggggccctgcctgcactgcggttgtccacggtcacatctgccccagtgcctttgtccttcccttggggcttgccggccagacttctctcccctgcggctcccacctctgcctgaccccagccttaaacatagcccctggccagaggccttgctgggtggagcctctgtgtgactccatactcctcccaccacaacactcatctgtcaaacaccaagcactctcagcctccccgccttcagctgtcagctttctggggctaacttctctgcctttgtggttggaggcctgaggcctcttggaactcttgctaacctgttcagagccaggaaggagactgcacagttttgaaagcacagcccgtcaggtccggctctgcgtctccctctctgcagcctgtgtaagctattataattaaaatggttttccgggaa

SEQ ID NO: 25477 - DNA, 2752 bp, Homo sapiens
  source 1..2752: mol_type = unassigned DNA
ccccgcctgcggcccagctccttcccgcggctctgcgatgcggcccgcagggtgacccgggcgggagtccggggacccgcgatcagccccggaggacggggtggggtcgccccaaacaggagcgccgggaccgctgggaccccgcactcggcgtccgccgccgccgggtagccgggcagtggaggtcccggatgaggcgacaatttttccggccccccctcccagtcccgccccacttccggggccgccactttcactttctcttccgccgaagccgctccccttgcgaagaactggggcctcccgggaggagagagggctttgccttgaaacccgggacgccaggggcgctcccgcaagtgggggtcctccgggacttggaacgccccggctgggtggtgtccgggcgtcctttccccgcttcttcccacctcggctggtcccgtttcctcctgcgcccagtgcggacctgtctcggcgcccgctgccctctcaccgccccacgcaggatcccggcctggtcaccgggcagtgtgatgcttcccgactgccgcggggacagcgaggcacacacagggcttgggccgcgccggaggccacacggcctggctgagttgctcctggtctcccgcctctcccaggcgacccggaggtagcatttcccaggaggcacggtcccccccagggggatgggcacagccacgccagatggacgagaagaccaagaaagcagaggaaatggccctgagcctcacccgagcagtggcgggcggggatgaacaggtggcaatgaagtgtgccatctggctggcagagcaacgggtgcccctgagtgtgcaactgaagcctgaggtctccccaacgcaggacatcaggctgtgggtgagcgtggaggatgctcagatgcacaccgtcaccatctggctcacagtgcgccctgatatgacagtggcgtctctcaaggacatggtttttctggactatggcttcccaccagtcttgcagcagtgggtgattgggcagcggctggcacgagaccaggagaccctgcactcccatggggtgcggcagaatggggacagtgcctacctctatctgctgtcagcccgcaacacctccctcaaccctcaggagctgcagcgggagcggcagctgcggatgctggaagatctgggcttcaaggacctcacgctgcagccgcggggccctctggagccaggccccccaaagcccggggtcccccaggaacccggacgggggcagccagatgcagtgcctgagcccccaccggtgggctggcagtgccccgggtgcaccttcatcaacaagcccacgcggcctggctgtgagatgtgctgccgggcgcgccccgaggcctaccaggtccccgcctcataccagcccgacgaggaggagcgagcgcgcctggcgggcgaggaggaggcgctgcgtcagtaccagcagcggaagcagcagcagcaggaggggaactacctgcagcacgtccagctggaccagaggagcctggtgctgaacacggagcccgccgagtgccccgtgtgctactcggtgctggcgcccggcgaggccgtggtgctgcggagtgcctgcagggcaccatccgcaacagccaggaggcggaggtctcctgccccttcattgacaacacctactcgtgctcgggcaagctgctggagagggagatcaaggcgctcctgacccctgaggattaccagcgatttctagacctgggcatctccattgctgaaaaccgcagtgccttcagctaccattgcaagaccccagattgcaagggatggtgcttctttgaggatgatgtcaatgagttcacctgccctgtgtgtttccacgtcaactgcctgctctgcaaggccatccatgagcagatgaactgcaaggagtatcaggaggacctggccctgcgggctcagaacgatgtggctgcccggcagacgacagagatgctgaaggtgatgctgcagcagggcgaggccatgcgctgcccccagtgccagatcgtggtacagaagaaggacggctgcgactggatccgctgcaccgtctgccacaccgagatctgctgggtcaccaagggcccacgctggggccctgggggcccaggagacaccagcgggggctgccgctgcagggtaaatgggattccttgccacccaagctgtcagaactgccactgagctaaagatggtggggccacatgctgacccagccccacatccacattctgttagaatgtagctcagggagcttcgtggacggccttgcttgctgtagcgttgtaggggccctgcctgcactgcggttgtccacggtcacatctgccccagtgcctttgtccttcccttggggcttgccggccagacttctctcccctgcggctcccacctctgcctgaccccagccttaaacatagcccctggccagaggccttgctgggtggagcctctgtgtgactccatactcctcccaccacaacactcatctgtcaaacaccaagcactctcagcctccccgccttcagctgtcagctttctggggctaacttctctgcctttgtggttggaggcctgaggcctcttggaactcttgctaacctgttcagagccaggaaggagactgcacagttttgaaagcacagcccgtcaggtccggctctgcgtctccctctctgcagcctgtgtaagctattataattaaaatggttttccgggaa

SEQ ID NO: 25478 - DNA, 1242 bp, Homo sapiens
  source 1..1242: mol_type = unassigned DNA
actttctcttccgccgaagccgctccccttgcgaagaactggggcctcccgggaggagagagggctttgccttgaaacccgggacgccaggggcgctcccgcaagtgggggtcctccgggacttggaacgccccggctgggtggtgtccgggcgtcctttccccgcttcttcccacctcggctggtcccgtttcctcctgcgcccagtgcggacctgtctcggcgcccgctgccctctcaccgccccacgcaggatcccggcctggtcaccgggcagtgtgatgcttcccgactgccgcggggacagcgaggcacacacagggcttgggccgcgccggaggccacacggcctggctgagttgctcctggtctcccgcctctcccaggcgacccggaggtagcatttcccaggaggcacggtcccccccagggggatgggcacagccacgccagatggacgagaagaccaagaaagcagaggaaatggccctgagcctcacccgagcagtggcgggcggggatgaacaggtggcaatgaagtgtgccatctggctggcagagcaacgggtgcccctgagtgtgcaactgaagcctgaggtctccccaacgcaggacatcaggagcaggggagagaagacagaagaggttggagaggtcagggaggtgccagatcatggaggccctcgtgtgctgccacgagttgattctaagagtagcgtggagccattggaggggcctaactggctgtgggtgagcgtggaggatgctcagatgcacaccgtcaccatctggctcacagtgcgccctgatatgacagtggcgtctctcaaggacatggtttttctggactatggcttcccaccagtcttgcagcagtgggtgattgggcagcggctggcacgagaccaggagaccctgcactcccatggggtgcggcagaatggggacagtgcctacctctatctgctgtcagcccgcaacacctccctcaaccctcaggagctgcagcgggagcggcagctgcggatgctggaagatctgggcttcaaggacctcacgctgcagccgcggggccctctggagccaggccccccaaagcccggggtcccccaggaacccggacgggggcagccagatgcagtgcctgagcccccaccggtgggctggcagtgccccgggtgcaccttcatcaacaagcccacgcggcctggctgtgagatgtgctgccgggcgcgccccgag

SEQ ID NO: 25479 - DNA, 1653 bp, Homo sapiens
  source 1..1653: mol_type = unassigned DNA
cactttctcttccgccgaagccgctccccttgcgaagaactggggcctcccgggaggagagagggctttgccttgaaacccgggacgccaggggcgctcccgcaagtgggggtcctccgggacttggaacgccccggctgggtggtgtccgggcgtcctttccccgcttcttcccacctcggctggtcccgtttcctcctgcgcccagtgcggacctgtctcggcgcccgctgccctctcaccgccccacgcaggatcccggcctggtcaccgggcagtgtgatgcttcccgactgccgcggggacagcgaggcacacacagggcttgggccgcgccggaggccacacggcctggctgagttgctcctggtctcccgcctctcccaggcgacccggaggtagcatttcccaggaggcacggtcccccccagggggatgggcacagccacgccagatggacgagaagaccaagaaagcagaggaaatggccctgagcctcacccgagcagtggcgggcggggatgaacaggtggcaatgaagtgtgccatctggctggcagagcaacgggtgcccctgagtgtgcaactgaagcctgaggtctccccaacgcaggacatcaggctgtgggtgagcgtggaggatgctcagatgcacaccgtcaccatctggctcacagtgcgccctgatatgacagtggcgtctctcaaggacatggtttttctggactatggcttcccaccagtcttgcagcagtgggtgattgggcagcggctggcacgagaccaggagaccctgcactcccatggggtgcggcagaatggggacagtgcctacctctatctgctgtcagcccgcaacacctccctcaaccctcaggagctgcagcgggagcggcagctgcggatgctggaagatctgggcttcaaggacctcacgctgcagccgcggggccctctggagccaggccccccaaagcccggggtcccccaggaacccggacgggggcagccagatgcagtgcctgagcccccaccggtgggctggcagtgccccgggtgcaccttcatcaacaagcccacgcggcctggctgtgagatgtgctgccgggcgcgccccgaggcctaccaggtccccgcctcataccagcccgacgaggaggagcgagcgcgcctggcgggcgaggaggaggcgctgcgtcagtaccagcagggagtgcctgcagggcaccatccgcaacagccaggaggcggaggtctcctgccccttcattgacaacacctactcgtgctcgggcaagctgctggagagggagatcaaggcgctcctgacccctgaggattaccagcgatttctagacctgggcatctccattgctgaaaaccgcagtgccttcagctaccattgcaagaccccagattgcaagggatggtgcttctttgaggatgatgtcaatgagttcacctgccctgtgtgtttccacgtcaactgcctgctctgcaaggccatccatgagcagatgaactgcaaggagtatcaggagacaccagcgggggctgccgctgcagggtaaatgggattccttgccacccaagctgtcagaactgccactgagctaaagatggtggggccacatgctgacccagccccacatc

SEQ ID NO: 25480 - DNA, 593 bp, Homo sapiens
  source 1..593: mol_type = unassigned DNA
gccggaggaggtgagggatgagattctgcaagtggagcccgcaggatctgctgatcgatgggacgaggaacgggagaaaaattaaagcggcgcatgaggcagacgaatgcaaacttcaccaatagctcaacgaaaagacagacggtgaccgctgagaggcagcgtcggatctgggcgacccggaggtagcatttcccaggaggcacggtcccccccagggggatgggcacagccacgccagatggacgagaagaccaagaaagcagaggaaatggccctgagcctcacccgagcagtggcgggcggggatgaacaggtggcaatgaagtgtgccatctggctggcagagcaacgggtgcccctgagtgtgcaactgaagcctgaggtctccccaacgcaggacatcaggctgtgggtgagcgtggaggatgctcagatgcacaccgtcaccatctggctcacagtgcgccctgatatgacagtggcgtctctcaaggacatggtttttctggactatggcttcccaccagtcttgcagcagtgggtgattgggcagcggctggcacgagaccaggagaccctgcactcccatg

SEQ ID NO: 25481 - DNA, 765 bp, Homo sapiens
  source 1..765: mol_type = unassigned DNA
aggaaatggccctgagcctcacccgagcagtggcgggcggggatgaacaggtggcaatgaagtgtgccatctggctggcagagcaacgggtgcccctgagtgtgcaactgaagcctgaggtctccccaacgcaggacatcaggagcaggggagagaagacagaagaggttggagaggtcagggaggtgccagatcatggaggccctcgtgtgctgccacgagttgattctaagagtagcgtggagccattggaggggcctaactggctgtgggtgagcgtggaggatgctcagatgcacaccgtcaccatctggctcacagtgcgccctgatatgacagtggcgtctctcaaggacatggtttttctggactatggcttcccaccagtcttgcagcagtgggtgattgggcagcggctggcacgagaccaggagaccctgcactcccatggggtgcggcagaatggggacagtgcctacctctatctgctgtcagcccgcaacacctccctcaaccctcaggagctgcagcgggagcggcagctgcggatgctggaagatctgggcttcaaggacctcacgctgcagccgcggggccctctggagccaggccccccaaagcccggggtcccccaggaacccggacgggggcagccagatgcagtgcctgagcccccaccggtgggctggcagtgccccgggtgcaccttcatcaacaagcccacgcggcctggctgtgagatgtgctgccgggcgcgccccgagg

SEQ ID NO: 25482 - DNA, 2613 bp, Homo sapiens
  source 1..2613: mol_type = unassigned DNA
cgcctgcggcccagctccttcccgcggctctgcgatgcggcccgcagggtgacccgggcgggagtccggggacccgcgatcagccccggaggacggggtggggtcgccccaaacaggagcgccgggaccgctgggaccccgcactcggcgtccgccgccgccgggtagccgggcagtggaggtcccggatgaggcgacaatttttccggccccccctcccagtcccgccccacttccggggccgccactttcactttctcttccgccgaagccgctccccttgcgaagaactggggcctcccgggaggagagagggctttgccttgaaacccgggacgccaggggcgctcccgcaagtgggggtcctccgggacttggaacgccccggctgggtggtgtccgggcgtcctttccccgcttcttcccacctcggctggtcccgtttcctcctgcgcccagtgcggacctgtctcggcgcccgctgccctctcaccgccccacgcaggatcccggcctggtcaccgggcagtgtgatgcttcccgactgccgcggggacagcgaggcacacacagggcttgggccgcgccggaggccacacggcctggctgagttgctcctggtctcccgcctctcccaggcgacccggaggtagcatttcccaggaggcacggtcccccccagggggatgggcacagccacgccagatggacgagaagaccaagaaagcagaggaaatggccctgagcctcacccgagcagtggcgggcggggatgaacaggtggcaatgaagtgtgccatctggctggcagagcaacgggtgcccctgagtgtgcaactgaagcctgaggtctccccaacgcaggacatcaggctgtgggtgagcgtggaggatgctcagatgcacaccgtcaccatctggctcacagtgcgccctgatatgacagtggcgtctctcaaggacatggtttttctggactatggcttcccaccagtcttgcagcagtgggtgattgggcagcggctggcacgagaccaggagaccctgcactcccatggggtgcggcagaatggggacagtgcctacctctatctgctgtcagcccgcaacacctccctcaaccctcaggagctgcagcgggagcggcagctgcggatgctggaagatctgggcttcaaggacctcacgctgcagccgcggggccctctggagccaggccccccaaagcccggggtcccccaggaacccggacgggggcagccagatgcagtgcctgagcccccaccggtgggctggcagtgccccgggtgcaccttcatcaacaagcccacgcggcctggctgtgagatgtgctgccgggcgcgccccgaggcctaccaggtccccgcctcataccagcccgacgaggaggagcgagcgcgcctggcgggcgaggaggaggcgctgcgtcagtaccagcagggagtgcctgcagggcaccatccgcaacagccaggaggcggaggtctcctgccccttcattgacaacacctactcgtgctcgggcaagctgctggagagggagatcaaggcgctcctgacccctgaggattaccagcgatttctagacctgggcatctccattgctgaaaaccgcagtgccttcagctaccattgcaagaccccagattgcaagggatggtgcttctttgaggatgatgtcaatgagttcacctgccctgtgtgtttccacgtcaactgcctgctctgcaaggccatccatgagcagatgaactgcaaggagtatcaggaggacctggccctgcgggctcagaacgatgtggctgcccggcagacgacagagatgctgaaggtgatgctgcagcagggcgaggccatgcgctgcccccagtgccagatcgtggtacagaagaaggacggctgcgactggatccgctgcaccgtctgccacaccgagatctgctgggtcaccaagggcccacgctggggccctgggggcccaggagacaccagcgggggctgccgctgcagggtaaatgggattccttgccacccaagctgtcagaactgccactgagctaaagatggtggggccacatgctgacccagccccacatccacattctgttagaatgtagctcagggagcttcgtggacggccttgcttgctgtagcgttgtaggggccctgcctgcactgcggttgtccacggtcacatctgccccagtgcctttgtccttcccttggggcttgccggccagacttctctcccctgcggctcccacctctgcctgaccccagccttaaacatagcccctggccagaggccttgctgggtggagcctctgtgtgactccatactcctcccaccacaacactcatctgtcaaacaccaagcactctcagcctccccgccttcagctgtcagctttctggggctaacttctctgcctttgtggttggaggcctgaggcctcttggaactcttgctaacctgttcagagccaggaaggagactgcacagttttgaaagcacagcccgtcaggtccggctctgcgtctccctctctgcagcctgtgtaagctattataattaaaatggttttccgggaa

SEQ ID NO: 25483 - DNA, 5618 bp, Homo sapiens
  source 1..5618: mol_type = unassigned DNA
ggtaccgcacccgctacctagtgtgaatgaactgtggcgtgggctgctaagggcaggctgcggagtacccgggccgtggccatgaactcacccgtggaccctggcgctaggcaggcgttgaggaagaagccacccgagcggactcccgaggacttaaatactatttattcttatcttcatggaatggaaatattatcaaatctcagggaacatcagcttagattaatgtctgcaagagcacgctatgagagatacagtggcaatcaggttctcttttgttcagaaacgattgccagatgttggtatatcctactttctggatctgtgcttgtgaaaggctccatggtcttgcctccttgcagttttggtaagcagtttggaggaaaaagaggatgtgattgtcttgtattagagccttcagaaatgattgtggtagagaatgccaaagataatgaagatagtattctacaaagagaaattcctgccagacaatcccgaagaagatttcggaaaattaactataaaggagagcgccaaaccattactgatgatgtggaggttaacagctatctttctcttccagctgatcttaccaagatgcatctcacagaaaaccctcatccacaggtgactcatgtgtcttctagtcagtctggttgtagcattgccagtgactctggaagcagcagtttatctgatatctatcaggctacggagagtgaggtaggagatgtagatttgacacgtcttccagaaggacctgttgattctgaggatgacgaagaggaagatgaagagattgatcgaacagatccattgcaggggcgagatcttgttcgagaatgtcttgaaaaagaacctgcagacaaaactgatgatgacattgaacaattgctggagtttatgcaccagctccctgcatttgcaaacatgaccatgtctgtaaggagagaactctgctcagtgatgatttttgaagtggtagagcaggctggagctattattcttgaagatgggcaagagcttgactcatggtatgttattttaaacggcactgtggaaatcagtcatccagatggaaaagttgaaaatttgtttatgggaaatagttttggaattactcccactctggataagcagtacatgcatggaattgtcaggactaaagtagatgattgtcagtttgtctgcatagcccagcaagattattggagaattttaaaccatgtggaaaaaaatacccataaagttgaggaagagggagaaattgttatggtacatgagcatcgggaactagaccggagtggaaccaggaaaggacacattgtgatcaaggcaacacctgagcgtctcataatgcatttaatagaagaacattccatcgtggatccaacttatatagaagattttctattaacttacaggacatttcttgaaagtcctttggatgttgggatcaaactattggaatggtttaagatcgacagcttaagagataaggtgacacggattgtattattatgggtaaataatcattttaatgattttgaaggtgaccctgctatgactcgatttctagaggaatttgaaaaaaatctggaagatacaaagatgaatggtcatctccggttattgaatattgcctgtgctgcaaaggctaagtggagacaggttgtgctgcaaaaggcttcccgcgagtcccctctacaattcagccttaatggagggagtgagaagggatttggtatttttgttgaaggagtagaacctggtagcaaagctgctgattcaggactgaaacgtggtgatcagattatggaagtaaatggacaaaactttgagaatattacatttatgaaagccgttgaaattttgaggaataatactcatcttgcacttactgtgaagaccaacatttttgtgttcaaagagttactttttaggactgaacaagagaaatctggtgttcctcatattcccaaaattgctgaaaaaaaaagtaatcgccattctatccagcatgtgccaggagatattgaacagacatcacaggagaaaggaagtaagaaagttaaagcaaatactgtttcaggtggaagaaacaaaatcaggaagattttggataaaacacgatttagtatcttgcctccaaagctatttagtgatggaggcctaagccaatcacaagatgacagcattgtgggaacaaggcactgtaggcatagtctggctataatgcccatccctggaacactctcatccagcagccctgatctcctgcagcctaccaccagtatgttggatttttccaatccttcagatatccctgatcaagttataagagttttcaaagtggatcagcaaagttgctacattatcatcagtaaagacaccacagctaaagaagtagtttttcatgctgttcatgaatttggtttgaccggtgcatccgacacatattctctctgtgaagtttctgttactcctgagggtgtcataaaacagagaagacttccagatcagttctccaaattagctgatagaattcaactcaatggaaggtattacttaaaaaataacatggaaacagaaaccttatgttcagatgaagatgctcaagaactagttaaggaaagccagctatccatgctgcagctcagtaccattgaggtggccacccagctgtcaatgagggactttgatttgtttcgtaatattgaaccgactgagtacatcgatgacctttttaagttaaattccaaaacaggaaatactcatttgaagaggtttgaggacattgtaaaccaagagacattctgggttgcctcagaaattttaactgaagcaaatcagctcaaacgaatgaagattattaagcattttattaaaattgcacttcattgtcgagaatgtaagaacttcaattccatgtttgcaataataagtggcttgaacctggcatctgtagcaagactcagaggaacttgggaaaagttaccaagcaaatacgagaaacatcttcaagatctacaagacatttttgatccatctagaaacatggcaaagtatagaaatattcttagtagtcaaagtatgcagcctccaattattccactcttccctgttgtcaagaaagatatgacatttctacatgaaggaaatgactccaaagtagatggtttagtaaactttgagaagttaagaatgatttccaaggaaatccgccaagttgttcgaatgacttctgctaacatggacccagctatgatgtttcgacagaggaagaagaggtggcggagtctggggtcactgagtcaaggaagcacaaattcaaacatgctggatgttcagggaggtgctcacaaaaaaagggcacgccgcagctctctgcttaatgccaagaagctatatgaggatgcccaaatggcaaggaaggtgaagcagtatctttccagtctcgatgtagagacagatgaggagaagttccagatgatgtcattacagtgggagcctgcatatggtaccttgaccaagaatttaagtgagaaaagatcagccaaatcatctgaaatgtctccagtgcctatgaggtcagctggccaaacaactaaagcccacttgcatcaaccccacagagtaagccaggtgcttcaggtgccagctgttaatttgcaccccatcaggaagaagggacaaacaaaagaccctgcactgaatacaagtttacctcagaaagttttaggaacaactgaagaaataagtggtaagaagcatacagaagacactatttctgtggcgtcatctttacattctagtcctcctgcatctcctcaaggctcccctcacaaaggttacacacttattccatcagctaaatctgacaacttgtctgactccagccatagtgagatttcttcacggtccagcatcgtgagcaattgttctgttgactccatgtctgcagctctacaggatgaacggtgttcctctcaggccctggcagtccctgaatccactggggcattggaaaagacagagcacgcttcagggataggagatcatagtcaacatggccctgggtggacactcttgaagccatctctaatcaagtgtttagctgtctcatcgtctgtgagcaatgaagagatttctcaagagcatatcattatagaagcagctgacagtggtcgtggaagttggacttcgtgttcaagcagctcccatgacaacttccaaagccttccaaacccaaaaagctgggattttttgaactcttacagacatacccatttggatgaccccattgctgaagttgaacccactgactctgagccctattcctgttctaaaagctgctctagaacttgtgggcagtgtaaaggaagcctagagagaaagagttggacctcctccagttctctgtctgacacgtatgaaccaaactatgggacagttaaacagagagtattggagagcaccccagctgagtcatctgaaggcttggaccccaaggatgccactgacccagtttataaaactgtcacttcaagtacagaaaagggcttgattgtgtactgtgtcacctcacccaagaaggacgataggtatagggagccacctcccactcctccaggatatttggggatttctttagcggacctaaaggaaggaccccacacacacctaaaacctccagattatagtgtggcagtgcagaggtcaaagatgatgcataacagcctctctagactgccaccagcttctctcagtagcaacctcgtggcctgtgttccatcgaagattgtaactcagcctcagaggcataatttgcagccattccatcctaaactaggagatgtgactgatgcagatagcgaagcagatgaaaatgaacaagtttcagcagtctagcctttggatgacctatttgaaaaccactgaaagtcgtggaggaatgggcaagaaccacctcatgattctgcaggccattgctaacgaacagctcattgctacaaccagtccagaggttttattccctctactccgagcaatgaaatagacctgagttatgcttcctttcatttaatttctgcagataaatagtttcctgagcaatggatgctatgcctggataccagtctccactttgcacgccggaactgccttgggaccacagttacagaaaaaatgtaaactcagagtgatccttgtgtatattgctatagatttttctttaacaagctattttaaagataatggcattattatttccaagccatagcttgggctgaaggacaaattgaaattgtctgccaataccaaggatattcttgtatatttgaaaaataacttattatttgaattgttgtggttttgtttgtatttgagagctcttgttagctgatattcatgtttgaggtcataaaattgtctctggtctgaccaaacagaagtcatctttacagaggtgatatgcttgatctacacagagatgtgacttgatctgtagcaccaatgcaatgtaggtctcagtttgagagaaataggaagccctttgcagttgaggtgttaggaacctgctggtcatggtgtggaaggccaaatgaagctgccacagg

SEQ ID NO: 25484 - DNA, 8079 bp, Homo sapiens
  source 1..8079: mol_type = unassigned DNA
cccgcgcagacttgtctccggccagtcgcgcgtgggtagaggccttaggcgggcgttgcgaagggttgtttgctagagttcggaccttgttacggcgcgaagttccctccttggggcgggggaaaggtaccgcacccgctacctagtgtgaatgaactgtggcgtgggctgctaagggcaggctgcggagtacccgggccgtggccatgaactcacccgtggaccctggcgctaggcaggcgttgaggaagaagccacccgagcggactcccgaggacttaaatactatttattcttatcttcatggaatggaaatattatcaaatctcagggaacatcagcttagattaatgtctgcaagagcacgctatgagagatacagtggcaatcaggttctcttttgttcagaaacgattgccagatgttggtatatcctactttctggatctgtgcttgtgaaaggctccatggtcttgcctccttgcagttttggtaagcagtttggaggaaaaagaggatgtgattgtcttgtattagagccttcagaaatgattgtggtagagaatgccaaagataatgaagatagtattctacaaagagaaattcctgccagacaatcccgaagaagatttcggaaaattaactataaaggagagcgccaaaccattactgatgatgtggaggttaacagctatctttctcttccagctgatcttaccaagatgcatctcacagaaaaccctcatccacaggtgactcatgtgtcttctagtcagtctggttgtagcattgccagtgactctggaagcagcagtttatctgatatctatcaggctacggagagtgaggtaggagatgtagatttgacacgtcttccagaaggacctgttgattctgaggatgacgaagaggaagatgaagagattgatcgaacagatccattgcaggggcgagatcttgttcgagaatgtcttgaaaaagaacctgcagacaaaactgatgatgacattgaacaattgctggagtttatgcaccagctccctgcatttgcaaacatgaccatgtctgtaaggagagaactctgctcagtgatgatttttgaagtggtagagcaggctggagctattattcttgaagatgggcaagagcttgactcatggtatgttattttaaacggcactgtggaaatcagtcatccagatggaaaagttgaaaatttgtttatgggaaatagttttggaattactcccactctggataagcagtacatgcatggaattgtcaggactaaagtagatgattgtcagtttgtctgcatagcccagcaagattattggagaattttaaaccatgtggaaaaaaatacccataaagttgaggaagagggagaaattgttatggtacatgagcatcgggaactagaccggagtggaaccaggaaaggacacattgtgatcaaggcaacacctgagcgtctcataatgcatttaatagaagaacattccatcgtggatccaacttatatagaagattttctattaacttacaggacatttcttgaaagtcctttggatgttgggatcaaactattggaatggtttaagatcgacagcttaagagataaggtgacacggattgtattattatgggtaaataatcattttaatgattttgaaggtgaccctgctatgactcgatttctagaggaatttgaaaaaaatctggaagatacaaagatgaatggtcatctccggttattgaatattgcctgtgctgcaaaggctaagtggagacaggttgtgctgcaaaaggcttcccgcgagtcccctctacaattcagccttaatggagggagtgagaagggatttggtatttttgttgaaggagtagaacctggtagcaaagctgctgattcaggactgaaacgtggtgatcagattatggaagtaaatggacaaaactttgagaatattacatttatgaaagccgttgaaattttgaggaataatactcatcttgcacttactgtgaagaccaacatttttgtgttcaaagagttactttttaggactgaacaagagaaatctggtgttcctcatattcccaaaattgctgaaaaaaaaagtaatcgccattctatccagcatgtgccaggagatattgaacagacatcacaggagaaaggaagtaagaaagttaaagcaaatactgtttcaggtggaagaaacaaaatcaggaagattttggataaaacacgatttagtatcttgcctccaaagctatttagtgatggaggcctaagccaatcacaagatgacagcattgtgggaacaaggcactgtaggcatagtctggctataatgcccatccctggaacactctcatccagcagccctgatctcctgcagcctaccaccagtatgttggatttttccaatccttcagctgttggtttttattatatccctgatcaagttataagagttttcaaagtggatcagcaaagttgctacattatcatcagtaaagacaccacagctaaagaagtagtttttcatgctgttcatgaatttggtttgaccggtgcatccgacacatattctctctgtgaagtttctgttactcctgagggtgtcataaaacagagaagacttccagatcagttctccaaattagctgatagaattcaactcaatggaaggtattacttaaaaaataacatggaaacagaaaccttatgttcagatgaagatgctcaagaactagttaaggaaagccagctatccatgctgcagctcagtaccattgaggtggccacccagctgtcaatgagggactttgatttgtttcgtaatattgaaccgactgagtacatcgatgacctttttaagttaaattccaaaacaggaaatactcatttgaagaggtttgaggacattgtaaaccaagagacattctgggttgcctcagaaattttaactgaagcaaatcagctcaaacgaatgaagattattaagcattttattaaaattgcacttcattgtcgagaatgtaagaacttcaattccatgtttgcaataataagtggcttgaacctggcatctgtagcaagactcagaggaacttgggaaaagttaccaagcaaatacgagaaacatcttcaagatctacaagacatttttgatccatctagaaacatggcaaagtatagaaatattcttagtagtcaaagtatgcagcctccaattattccactcttccctgttgtcaagaaagatatgacatttctacatgaaggaaatgactccaaagtagatggtttagtaaactttgagaagttaagaatgatttccaaggaaatccgccaagttgttcgaatgacttctgctaacatggacccagctatgatgtttcgacagaggaagaagaggtggcggagtctggggtcactgagtcaaggaagcacaaattcaaacatgctggatgttcagggaggtgctcacaaaaaaagggcacgccgcagctctctgcttaatgccaagaagctatatgaggatgcccaaatggcaaggaaggtgaagcagtatctttccagtctcgatgtagagacagatgaggagaagttccagatgatgtcattacagtgggagcctgcatatggtaccttgaccaagaatttaagtgagaaaagatcagccaaatcatctgaaatgtctccagtgcctatgaggtcagctggccaaacaactaaagcccacttgcatcaaccccacagagtaagccaggtgcttcaggtgccagctgttaatttgcaccccatcaggaagaagggacaaacaaaagaccctgcactgaatacaagtttacctcagaaagttttaggaacaactgaagaaataagtggtaagaagcatacagaagacactatttctgtggcgtcatctttacattctagtcctcctgcatctcctcaaggctcccctcacaaaggttacacacttattccatcagctaaatctgacaacttgtctgactccagccatagtgagatttcttcacggtccagcatcgtgagcaattgttctgttgactccatgtctgcagctctacaggatgaacggtgttcctctcaggccctggcagtccctgaatccactggggcattggaaaagacagagcacgcttcagggataggagatcatagtcaacatggccctgggtggacactcttgaagccatctctaatcaagtgtttagctgtctcatcgtctgtgagcaatgaagagatttctcaagagcatatcattatagaagcagctgacagtggtcgtggaagttggacttcgtgttcaagcagctcccatgacaacttccaaagccttccaaacccaaaaagctgggattttttgaactcttacagacatacccatttggatgaccccattgctgaagttgaacccactgactctgagccctattcctgttctaaaagctgctctagaacttgtgggcagtgtaaaggaagcctagagagaaagagttggacctcctccagttctctgtctgacacgtatgaaccaaactatgggacagttaaacagagagtattggagagcaccccagctgagtcatctgaaggcttggaccccaaggatgccactgacccagtttataaaactgtcacttcaagtacagaaaagggcttgattgaaaatgaacaagtttcagcagtctagcctttggatgacctatttgaaaaccactgaaagtcgtggaggaatgggcaagaaccacctcatgattctgcaggccattgctaacgaacagctcattgctacaaccagtccagaggttttattccctctactccgagcaatgaaatagacctgagttatgcttcctttcatttaatttctgcagataaatagtttcctgagcaatggatgctatgcctggataccagtctccactttgcacgccggaactgccttgggaccacagttacagaaaaaatgtaaactcagagtgatccttgtgtatattgctatagatttttctttaacaagctattttaaagataatggcattattatttccaagccatagcttgggctgaaggacaaattgaaattgtctgccaataccaaggatattcttgtatatttgaaaaataacttattatttgaattgttgtggttttgtttgtatttgagagctcttgttagctgatattcatgtttgaggtcataaaattgtctctggtctgaccaaacagaagtcatctttacagaggtgatatgcttgatctacacagagatgtgacttgatctgtagcaccaatgcaatgtaggtctcagtttgagagaaataggaagccctttgcagttgaggtgttaggaacctgctggtcatggtgtggaaggccaaatgaagctgccacagggtttcttgtcagtcctttgggaaatgggagggagtagtttggggaggagggtgggaaccctaatttccacagaatgaaattttgatgttaaatgacatgtatacaaattcttccttaagtgaaagttatgctgcatcgaattgtaactgaaagtatagatccaacaaatagagactgggttctagagagttctggtctatagaaacccaaaactaaaatctctcataactcaagtatggaatactttttttaaagaaattcttatcatgggtgttgtaataatgaagacgaatttgactttatgcagtgttctgcagcatgcctcccccacatctcatagcaccaggttgtgtctgacctgacataccctgcagctctcagctggctgcagtaacattttgtgggagaaagaggagctggagttacagaaatgattgtctcttggttctcagtttttagcccttgagaggacatacttttccagcctcatgggtatggcactcttaattaaaatttcagtgactgtttactggatgaggcagatttttcacatttttgcaaattaaatatattttatatatattaagtttaattttttcagtttttttaatgtaaaagcaagtgaaattttaataaacttctgtaattaccaaaaaaaaaaaaaaaaaaaaagccaaagccattaacgtgcactacccagatcaacttggagccaaaaggggtttacttctgaatggctgtccgtatgtgtccacataggatttagttggtttgtggcctcctttatagaaatgtgttgtctttccctagctgtctctgctgtctgtcttcctgcatatcccccttcattttaaaatcatgaatcagttgtaagtggtaaatggtagtagttcatctttcccatcaacatgattgtctctttattttaggaataatagcatttcaaaaattcctgtggtaaagaaacattaatctgaaacttaagccttagaaattaatcgcaggtatgatagaatgaggcttggtggttccatagctttcttggtcctttgaaatgggaaataacctgaaccaaaaatcctagtttgaaagttacacttcagtgatttggcctataaacagtggtcctatgattatacattttttccttcactgatttgcataattttgttttcatggccacagcaaaacaatgtgaaatatatttttgctatacccactttttttatcaaattcagatgtctactctcaccattttatattcatttccccagaaaaatgtgctgttttcataatgtctttatttagcaggtctttcaaaccaaatggaagccttacctgtctttgtccttaatagtgtaaatatcttgcacagagtgttgaggcctatggttttggacttgcaccttacagctgcctttgttttatctatctagctttaactgtgagtgttcagatcagctgatcacattgatcaggagccaaagccaaatgctttgtagtttgttatgtatgtatcccttaaaaaatcatgaggttttgatttttatattttaactaagggtacattcctgccttctcttagtttgtcatatgactagaacaagagaagtcttaagctgcatttactccaattccagatctccatttgtttttgttttataaatttataatcttaatgaagagactagtgccctctcttcctgccacaactctcaatctgccaagactgttgaagcagttaacgctcagtgcaaacttttgccaaatagtaagtttcaacaaaatatctttatagtgaaagattttgagaattagtaaatccagtacatgattccataaaagcttattaaagttaataattctaatttactccaaatgattactttcaatatgatctttggggagaaaaagcctttagtgaattttcttgagggtgataaatcacatcattgcgatctatatcacctccttgagaatctctcccaggctgaaaatgtgatggtaatcatgggtgtttttaagaacaaatctaatttttatcaagtgttctttcctctacaaaaaaggaaggaggagaaaaagcttccttaaaactgattattttgattcaattttaagtttctaaaaaaggtgatattaaagtatatgtattccttcagcattaccttaaaggctagaaaaacgggataaatcttcagaaaagtgtcaaaagtgtcacagtacatgttcaaatttaaacttgaatcctggttcatctttgacttttgttgtgcatttttaatgcttctttatttttgatacacagaatgcagttgaacttgatcttttaaaattgagacatgtaagctaatcagcaaaagacagaaacaaaactgcacatctgtaataatcagatagcaattctactgcacaattcattgattgtaaggtatcctgtaacaagcaatgtttgtctcctattttttgatacctcttaaacttatgtcttttagaaagacagtgcctctgtatgctttttgtatttttactgagtgtaaatatttgttatatttttggttaagagaatgtaaaaataccatttattattatcatatctactaatacattggtggaatcaataaagaatctacatt

SEQ ID NO: 25485 - DNA, 4733 bp, Homo sapiens
  source 1..4733: mol_type = unassigned DNA
cccgcgcagacttgtctccggccagtcgcgcgtgggtagaggccttaggcgggcgttgcgaagggttgtttgctagagttcggaccttgttacggcgcgaagttccctccttggggcgggggaaaggtaccgcacccgctacctagtgtgaatgaactgtggcgtgggctgctaagggcaggctgcggagtacccgggccgtggccatgaactcacccgtggaccctggcgctaggcaggcgttgaggaagaagccacccgagcggactcccgaggacttaaatactatttattcttatcttcatggaatggaaatattatcaaatctcagggaacatcagcttagattaatgtctgcaagagcacgctatgagagatacagtggcaatcaggttctcttttgttcagaaacgattgccagatgttggtatatcctactttctggatctgtgcttgtgaaaggctccatggtcttgcctccttgcagttttggtaagcagtttggaggaaaaagaggatgtgattgtcttgtattagagccttcagaaatgattgtggtagagaatgccaaagataatgaagatagtattctacaaagagaaattcctgccagacaatcccgaagaagatttcggaaaattaactataaaggagagcgccaaaccattactgatgatgtggaggttaacagctatctttctcttccagctgatcttaccaagatgcatctcacagaaaaccctcatccacaggtgactcatgtgtcttctagtcagtctggttgtagcattgccagtgactctggaagcagcagtttatctgatatctatcaggctacggagagtgaggtaggagatgtagatttgacacgtcttccagaaggacctgttgattctgaggatgacgaagaggaagatgaagagattgatcgaacagatccattgcaggggcgagatcttgttcgagaatgtcttgaaaaagaacctgcagacaaaactgatgatgacattgaacaattgctggagtttatgcaccagctccctgcatttgcaaacatgaccatgtctgtaaggagagaactctgctcagtgatgatttttgaagtggtagagcaggctggagctattattcttgaagatgggcaagagcttgactcatggtatgttattttaaacggcactgtggaaatcagtcatccagatggaaaagttgaaaatttgtttatgggaaatagttttggaattactcccactctggataagcagtacatgcatggaattgtcaggactaaagtagatgattgtcagtttgtctgcatagcccagcaagattattggagaattttaaaccatgtggaaaaaaatacccataaagttgaggaagagggagaaattgttatggtacatgagcatcgggaactagaccggagtggaaccaggaaaggacacattgtgatcaaggcaacacctgagcgtctcataatgcatttaatagaagaacattccatcgtggatccaacttatatagaagattttctattaacttacaggacatttcttgaaagtcctttggatgttgggatcaaactattggaatggtttaagatcgacagcttaagagataaggtgacacggattgtattattatgggtaaataatcattttaatgattttgaaggtgaccctgctatgactcgatttctagaggaatttgaaaaaaatctggaagatacaaagatgaatggtcatctccggttattgaatattgcctgtgctgcaaaggctaagtggagacaggttgtgctgcaaaaggcttcccgcgagtcccctctacaattcagccttaatggagggagtgagaagggatttggtatttttgttgaaggagtagaacctggtagcaaagctgctgattcaggactgaaacgtggtgatcagattatggaagtaaatggacaaaactttgagaatattacatttatgaaagccgttgaaattttgaggaataatactcatcttgcacttactgtgaagaccaacatttttgtgttcaaagagttactttttaggactgaacaagagaaatctggtgttcctcatattcccaaaattgctgaaaaaaaaagtaatcgccattctatccagcatgtgccaggagatattgaacagacatcacaggagaaaggaagtaagaaagttaaagcaaatactgtttcaggtggaagaaacaaaatcaggaagattttggataaaacacgatttagtatcttgcctccaaagctatttagtgatggaggcctaagccaatcacaagatgacagcattgtgggaacaaggcactgtaggcatagtctggctataatgcccatccctggaacactctcatccagcagccctgatctcctgcagcctaccaccagtatgttggatttttccaatccttcagcaaaagggtttaaaaatatccctgatcaagttataagagttttcaaagtggatcagcaaagttgctacattatcatcagtaaagacaccacagctaaagaagtagtttttcatgctgttcatgaatttggtttgaccggtgcatccgacacatattctctctgtgaagtttctgttactcctgagggtgtcataaaacagagaagacttccagatcagttctccaaattagctgatagaattcaactcaatggaaggtattacttaaaaaataacatggaaacagaaaccttatgttcagatgaagatgctcaagaactagttaaggaaagccagctatccatgctgcagctcagtaccattgaggtggccacccagctgtcaatgagggactttgatttgtttcgtaatattgaaccgactgagtacatcgatgacctttttaagttaaattccaaaacaggaaatactcatttgaagaggtttgaggacattgtaaaccaagagacattctgggttgcctcagaaattttaactgaagcaaatcagctcaaacgaatgaagattattaagcattttattaaaattgcacttcattgtcgagaatgtaagaacttcaattccatgtttgcaataataagtggcttgaacctggcatctgtagcaagactcagaggaacttgggaaaagttaccaagcaaatacgagaaacatcttcaagatctacaagacatttttgatccatctagaaacatggcaaagtatagaaatattcttagtagtcaaagtatgcagcctccaattattccactcttccctgttgtcaagaaagatatgacatttctacatgaaggaaatgactccaaagtagatggtttagtaaactttgagaagttaagaatgatttccaaggaaatccgccaagttgttcgaatgacttctgctaacatggacccagctatgatgtttcgacagaggaagaagaggtggcggagtctggggtcactgagtcaaggaagcacaaattcaaacatgctggatgttcagggaggtgctcacaaaaaaagggcacgccgcagctctctgcttaatgccaagaagctatatgaggatgcccaaatggcaaggaaggtgaagcagtatctttccagtctcgatgtagagacagatgaggagaagttccagatgatgtcattacagtgggagcctgcatatggtaccttgaccaagaatttaagtgagaaaagatcagccaaatcatctgaaatgtctccagtgcctatgaggtcagctggccaaacaactaaagcccacttgcatcaaccccacagagtaagccaggtgcttcaggtgccagctgttaatttgcaccccatcaggaagaagggacaaacaaaagaccctgcactgaatacaagtttacctcagaaagttttaggaacaactgaagaaataagtggtaagaagcatacagaagacactatttctgtggcgtcatctttacattctagtcctcctgcatctcctcaaggctcccctcacaaaggttacacacttattccatcagctaaatctgacaacttgtctgactccagccatagtgagatttcttcacggtccagcatcgtgagcaattgttctgttgactccatgtctgcagctctacaggatgaacggtgttcctctcaggccctggcagtccctgaatccactggggcattggaaaagacagagcacgcttcagggataggagatcatagtcaacatggccctgggtggacactcttgaagccatctctaatcaagtgtttagctgtctcatcgtctgtgagcaatgaagagatttctcaagagcatatcattatagaagcagctgacagtggtcgtggaagttggacttcgtgttcaagcagctcccatgacaacttccaaagccttccaaacccaaaaagctgggattttttgaactcttacagacatacccatttggatgaccccattgctgaagttgaacccactgactctgagccctattcctgttctaaaagctgctctagaacttgtgggcagtgtaaaggaagcctagagagaaagagttggacctcctccagttctctgtctgacacgtatgaaccaaactatgggacagttaaacagagagtattggagagcaccccagctgagtcatctgaaggcttggaccccaaggatgccactgacccagtttataaaactgtcacttcaagtacagaaaagggcttgattggtaagaaacaaacaagttatttc

SEQ ID NO: 25486 - DNA, 5727 bp, Homo sapiens
  source 1..5727: mol_type = unassigned DNA
gtcgcgcgtgggtagaggccttaggcgggcgttgcgaagggttgtttgctagagttcggaccttgttacggcgcgaagttccctccttggggcgggggaaaggtaccgcacccgctacctagtgtgaatgaactgtggcgtgggctgctaagggcaggctgcggagtacccgggccgtggccatgaactcacccgtggaccctggcgctaggcaggcgttgaggaagaagccacccgagcggactcccgaggacttaaatactatttattcttatcttcatggaatggaaatattatcaaatctcagggaacatcagcttagattaatgtctgcaagagcacgctatgagagatacagtggcaatcaggttctcttttgttcagaaacgattgccagatgttggtatatcctactttctggatctgtgcttgtgaaaggctccatggtcttgcctccttgcagttttggtaagcagtttggaggaaaaagaggatgtgattgtcttgtattagagccttcagaaatgattgtggtagagaatgccaaagataatgaagatagtattctacaaagagaaattcctgccagacaatcccgaagaagatttcggaaaattaactataaaggagagcgccaaaccattactgatgatgtggaggttaacagctatctttctcttccagctgatcttaccaagatgcatctcacagaaaaccctcatccacaggtgactcatgtgtcttctagtcagtctggttgtagcattgccagtgactctggaagcagcagtttatctgatatctatcaggctacggagagtgaggtaggagatgtagatttgacacgtcttccagaaggacctgttgattctgaggatgacgaagaggaagatgaagagattgatcgaacagatccattgcaggggcgagatcttgttcgagaatgtcttgaaaaagaacctgcagacaaaactgatgatgacattgaacaattgctggagtttatgcaccagctccctgcatttgcaaacatgaccatgtctgtaaggagagaactctgctcagtgatgatttttgaagtggtagagcaggctggagctattattcttgaagatgggcaagagcttgactcatggtatgttattttaaacggcactgtggaaatcagtcatccagatggaaaagttgaaaatttgtttatgggaaatagttttggaattactcccactctggataagcagtacatgcatggaattgtcaggactaaagtagatgattgtcagtttgtctgcatagcccagcaagattattggagaattttaaaccatgtggaaaaaaatacccataaagttgaggaagagggagaaattgttatggtacatgagcatcgggaactagaccggagtggaaccaggaaaggacacattgtgatcaaggcaacacctgagcgtctcataatgcatttaatagaagaacattccatcgtggatccaacttatatagaagattttctattaacttacaggacatttcttgaaagtcctttggatgttgggatcaaactattggaatggtttaagatcgacagcttaagagataaggtgacacggattgtattattatgggtaaataatcattttaatgattttgaaggtgaccctgctatgactcgatttctagaggaatttgaaaaaaatctggaagatacaaagatgaatggtcatctccggttattgaatattgcctgtgctgcaaaggctaagtggagacaggttgtgctgcaaaaggcttcccgcgagtcccctctacaattcagccttaatggagggagtgagaagggatttggtatttttgttgaaggagtagaacctggtagcaaagctgctgattcaggactgaaacgtggtgatcagattatggaagtaaatggacaaaactttgagaatattacatttatgaaagccgttgaaattttgaggaataatactcatcttgcacttactgtgaagaccaacatttttgtgttcaaagagttactttttaggactgaacaagagaaatctggtgttcctcatattcccaaaattgctgaaaaaaaaagtaatcgccattctatccagcatgtgccaggagatattgaacagacatcacaggagaaaggaagtaagaaagttaaagcaaatactgtttcaggtggaagaaacaaaatcaggaagattttggataaaacacgatttagtatcttgcctccaaagctatttagtgatggaggcctaagccaatcacaagatgacagcattgtgggaacaaggcactgtaggcatagtctggctataatgcccatccctggaacactctcatccagcagccctgatctcctgcagcctaccaccagtatgttggatttttccaatccttcagatatccctgatcaagttataagagttttcaaagtggatcagcaaagttgctacattatcatcagtaaagacaccacagctaaagaagtagtttttcatgctgttcatgaatttggtttgaccggtgcatccgacacatattctctctgtgaagtttctgttactcctgagggtgtcataaaacagagaagacttccagatcagttctccaaattagctgatagaattcaactcaatggaaggtattacttaaaaaataacatggaaacagaaaccttatgttcagatgaagatgctcaagaactagttaaggaaagccagctatccatgctgcagctcagtaccattgaggtggccacccagctgtcaatgagggactttgatttgtttcgtaatattgaaccgactgagtacatcgatgacctttttaagttaaattccaaaacaggaaatactcatttgaagaggtttgaggacattgtaaaccaagagacattctgggttgcctcagaaattttaactgaagcaaatcagctcaaacgaatgaagattattaagcattttattaaaattgcacttcattgtcgagaatgtaagaacttcaattccatgtttgcaataataagtggcttgaacctggcatctgtagcaagactcagaggaacttgggaaaagttaccaagcaaatacgagaaacatcttcaagatctacaagacatttttgatccatctagaaacatggcaaagtatagaaatattcttagtagtcaaagtatgcagcctccaattattccactcttccctgttgtcaagaaagatatgacatttctacatgaaggaaatgactccaaagtagatggtttagtaaactttgagaagttaagaatgatttccaaggaaatccgccaagttgttcgaatgacttctgctaacatggacccagctatgatgtttcgacagaggaagaagaggtggcggagtctggggtcactgagtcaaggaagcacaaattcaaacatgctggatgttcagggaggtgctcacaaaaaaagggcacgccgcagctctctgcttaatgccaagaagctatatgaggatgcccaaatggcaaggaaggtgaagcagtatctttccagtctcgatgtagagacagatgaggagaagttccagatgatgtcattacagtgggagcctgcatatggtaccttgaccaagaatttaagtgagaaaagatcagccaaatcatctgaaatgtctccagtgcctatgaggtcagctggccaaacaactaaagcccacttgcatcaaccccacagagtaagccaggtgcttcaggtgccagctgttaatttgcaccccatcaggaagaagggacaaacaaaagaccctgcactgaatacaagtttacctcagaaagttttaggaacaactgaagaaataagtggtaagaagcatacagaagacactatttctgtggcgtcatctttacattctagtcctcctgcatctcctcaaggctcccctcacaaaggttacacacttattccatcagctaaatctgacaacttgtctgactccagccatagtgagatttcttcacggtccagcatcgtgagcaattgttctgttgactccatgtctgcagctctacaggatgaacggtgttcctctcaggccctggcagtccctgaatccactggggcattggaaaagacagagcacgcttcagggataggagatcatagtcaacatggccctgggtggacactcttgaagccatctctaatcaagtgtttagctgtctcatcgtctgtgagcaatgaagagatttctcaagagcatatcattatagaagcagctgacagtggtcgtggaagttggacttcgtgttcaagcagctcccatgacaacttccaaagccttccaaacccaaaaagctgggattttttgaactcttacagacatacccatttggatgaccccattgctgaagttgaacccactgactctgagccctattcctgttctaaaagctgctctagaacttgtgggcagtgtaaaggaagcctagagagaaagagttggacctcctccagttctctgtctgacacgtatgaaccaaactatgggacagttaaacagagagtattggagagcaccccagctgagtcatctgaaggcttggaccccaaggatgccactgacccagtttataaaactgtcacttcaagtacagaaaagggcttgattgaaaatgaacaagtttcagcagtctagcctttggatgacctatttgaaaaccactgaaagtcgtggaggaatgggcaagaaccacctcatgattctgcaggccattgctaacgaacagctcattgctacaaccagtccagaggttttattccctctactccgagcaatgaaatagacctgagttatgcttcctttcatttaatttctgcagataaatagtttcctgagcaatggatgctatgcctggataccagtctccactttgcacgccggaactgccttgggaccacagttacagaaaaaatgtaaactcagagtgatccttgtgtatattgctatagatttttctttaacaagctattttaaagataatggcattattatttccaagccatagcttgggctgaaggacaaattgaaattgtctgccaataccaaggatattcttgtatatttgaaaaataacttattatttgaattgttgtggttttgtttgtatttgagagctcttgttagctgatattcatgtttgaggtcataaaattgtctctggtctgaccaaacagaagtcatctttacagaggtgatatgcttgatctacacagagatgtgacttgatctgtagcaccaatgcaatgtaggtctcagtttgagagaaataggaagccctttgcagttgaggtgttaggaacctgctggtcatggtgtggaaggccaaatgaagctgccacagggtttcttgtcagtcctttgggaaatgggagggagtagtttggggaggagggtgggaaccctaatttccacagaatgaaattttgatgttaaatgacatgtatacaaattcttccttaagtgaaagttatgctgcatcgaattgtaactgaaagtatagatccaacaaatagagactgggttctagagagttctggtctatagaaacccaaaactaaaatctctcataactcaagtatggaatactttttttaaagaaattcttatcatgggtgttgtaataatgaagacgaatttgactttatgcagtgttctgcagcatgcc

SEQ ID NO: 25487 - DNA, 8357 bp, Homo sapiens
  source 1..8357: mol_type = unassigned DNA
cccgcgcagacttgtctccggccagtcgcgcgtgggtagaggccttaggcgggcgttgcgaagggttgtttgctagagttcggaccttgttacggcgcgaagttccctccttggggcgggggaaaggtaccgcacccgctacctagtgtgaatgaactgtggcgtgggctgctaagggcaggctgcggagtacccgggccgtggccatgaactcacccgtggaccctggcgctaggcaggcgttgaggaagaagccacccgagcggactcccgaggacttaaatactatttattcttatcttcatggaatggaaatattatcaaatctcagggaacatcagcttagattaatgtctgcaagagcacgctatgagagatacagtggcaatcaggttctcttttgttcagaaacgattgccagatgttggtatatcctactttctggatctgtgcttgtgaaaggctccatggtcttgcctccttgcagttttggtaagcagtttggaggaaaaagaggatgtgattgtcttgtattagagccttcagaaatgattgtggtagagaatgccaaagataatgaagatagtattctacaaagagaaattcctgccagacaatcccgaagaagatttcggaaaattaactataaaggagagcgccaaaccattactgatgatgtggaggttaacagctatctttctcttccagctgatcttaccaagatgcatctcacagaaaaccctcatccacaggtgactcatgtgtcttctagtcagtctggttgtagcattgccagtgactctggaagcagcagtttatctgatatctatcaggctacggagagtgaggtaggagatgtagatttgacacgtcttccagaaggacctgttgattctgaggatgacgaagaggaagatgaagagattgatcgaacagatccattgcaggggcgagatcttgttcgagaatgtcttgaaaaagaacctgcagacaaaactgatgatgacattgaacaattgctggagtttatgcaccagctccctgcatttgcaaacatgaccatgtctgtaaggagagaactctgctcagtgatgatttttgaagtggtagagcaggctggagctattattcttgaagatgggcaagagcttgactcatggtatgttattttaaacggcactgtggaaatcagtcatccagatggaaaagttgaaaatttgtttatgggaaatagttttggaattactcccactctggataagcagtacatgcatggaattgtcaggactaaagtagatgattgtcagtttgtctgcatagcccagcaagattattggagaattttaaaccatgtggaaaaaaatacccataaagttgaggaagagggagaaattgttatggtacatgagcatcgggaactagaccggagtggaaccaggaaaggacacattgtgatcaaggcaacacctgagcgtctcataatgcatttaatagaagaacattccatcgtggatccaacttatatagaagattttctattaacttacaggacatttcttgaaagtcctttggatgttgggatcaaactattggaatggtttaagatcgacagcttaagagataaggtgacacggattgtattattatgggtaaataatcattttaatgattttgaaggtgaccctgctatgactcgatttctagaggaatttgaaaaaaatctggaagatacaaagatgaatggtcatctccggttattgaatattgcctgtgctgcaaaggctaagtggagacaggttgtgctgcaaaaggcttcccgcgagtcccctctacaattcagccttaatggagggagtgagaagggatttggtatttttgttgaaggagtagaacctggtagcaaagctgctgattcaggactgaaacgtggtgatcagattatggaagtaaatggacaaaactttgagaatattacatttatgaaagccgttgaaattttgaggaataatactcatcttgcacttactgtgaagaccaacatttttgtgttcaaagagttactttttaggactgaacaagagaaatctggtgttcctcatattcccaaaattgctgaaaaaaaaagtaatcgccattctatccagcatgtgccaggagatattgaacagacatcacaggagaaaggaagtaagaaagttaaagcaaatactgtttcaggtggaagaaacaaaatcaggaagattttggataaaacacgatttagtatcttgcctccaaagctatttagtgatggaggcctaagccaatcacaagatgacagcattgtgggaacaaggcactgtaggcatagtctggctataatgcccatccctggaacactctcatccagcagccctgatctcctgcagcctaccaccagtatgttggatttttccaatccttcagatatccctgatcaagttataagagttttcaaagtggatcagcaaagttgctacattatcatcagtaaagacaccacagctaaagaagtagtttttcatgctgttcatgaatttggtttgaccggtgcatccgacacatattctctctgtgaagtttctgttactcctgagggtgtcataaaacagagaagacttccagatcagttctccaaattagctgatagaattcaactcaatggaaggtattacttaaaaaataacatggaaacagaaaccttatgttcagatgaagatgctcaagaactagttaaggaaagccagctatccatgctgcagctcagtaccattgaggtggccacccagctgtcaatgagggactttgatttgtttcgtaatattgaaccgactgagtacatcgatgacctttttaagttaaattccaaaacaggaaatactcatttgaagaggtttgaggacattgtaaaccaagagacattctgggttgcctcagaaattttaactgaagcaaatcagctcaaacgaatgaagattattaagcattttattaaaattgcacttcattgtcgagaatgtaagaacttcaattccatgtttgcaataataagtggcttgaacctggcatctgtagcaagactcagaggaacttgggaaaagttaccaagcaaatacgagaaacatcttcaagatctacaagacatttttgatccatctagaaacatggcaaagtatagaaatattcttagtagtcaaagtatgcagcctccaattattccactcttccctgttgtcaagaaagatatgacatttctacatgaaggaaatgactccaaagtagatggtttagtaaactttgagaagttaagaatgatttccaaggaaatccgccaagttgttcgaatgacttctgctaacatggacccagctatgatgtttcgacagaggtcactgagtcaaggaagcacaaattcaaacatgctggatgttcagggaggtgctcacaaaaaaagggcacgccgcagctctctgcttaatgccaagaagctatatgaggatgcccaaatggcaaggaaggtgaagcagtatctttccagtctcgatgtagagacagatgaggagaagttccagatgatgtcattacagtgggagcctgcatatggtaccttgaccaagaatttaagtgagaaaagatcagccaaatcatctgaaatgtctccagtgcctatgaggtcagctggccaaacaactaaagcccacttgcatcaaccccacagagtaagccaggtgcttcaggtgccagctgttaatttgcaccccatcaggaagaagggacaaacaaaagaccctgcactgaatacaagtttacctcagaaagttttaggaacaactgaagaaataagtggtaagaagcatacagaagacactatttctgtggcgtcatctttacattctagtcctcctgcatctcctcaaggctcccctcacaaaggttacacacttattccatcagctaaatctgacaacttgtctgactccagccatagtgagatttcttcacggtccagcatcgtgagcaattgttctgttgactccatgtctgcagctctacaggatgaacggtgttcctctcaggccctggcagtccctgaatccactggggcattggaaaagacagagcacgcttcagggataggagatcatagtcaacatggccctgggtggacactcttgaagccatctctaatcaagtgtttagctgtctcatcgtctgtgagcaatgaagagatttctcaagagcatatcattatagaagcagctgacagtggtcgtggaagttggacttcgtgttcaagcagctcccatgacaacttccaaagccttccaaacccaaaaagctgggattttttgaactcttacagacatacccatttggatgaccccattgctgaagttgaacccactgactctgagccctattcctgttctaaaagctgctctagaacttgtgggcagtgtaaaggaagcctagagagaaagagttggacctcctccagttctctgtctgacacgtatgaaccaaactatgggacagttaaacagagagtattggagagcaccccagctgagtcatctgaaggcttggaccccaaggatgccactgacccagtttataaaactgtcacttcaagtacagaaaagggcttgattgtgtactgtgtcacctcacccaagaaggacgataggtatagggagccacctcccactcctccaggatatttggggatttctttagcggacctaaaggaaggaccccacacacacctaaaacctccagattatagtgtggcagtgcagaggtcaaagatgatgcataacagcctctctagactgccaccagcttctctcagtagcaacctcgtggcctgtgttccatcgaagattgtaactcagcctcagaggcataatttgcagccattccatcctaaactaggagatgtgactgatgcagatagcgaagcagatgaaaatgaacaagtttcagcagtctagcctttggatgacctatttgaaaaccactgaaagtcgtggaggaatgggcaagaaccacctcatgattctgcaggccattgctaacgaacagctcattgctacaaccagtccagaggttttattccctctactccgagcaatgaaatagacctgagttatgcttcctttcatttaatttctgcagataaatagtttcctgagcaatggatgctatgcctggataccagtctccactttgcacgccggaactgccttgggaccacagttacagaaaaaatgtaaactcagagtgatccttgtgtatattgctatagatttttctttaacaagctattttaaagataatggcattattatttccaagccatagcttgggctgaaggacaaattgaaattgtctgccaataccaaggatattcttgtatatttgaaaaataacttattatttgaattgttgtggttttgtttgtatttgagagctcttgttagctgatattcatgtttgaggtcataaaattgtctctggtctgaccaaacagaagtcatctttacagaggtgatatgcttgatctacacagagatgtgacttgatctgtagcaccaatgcaatgtaggtctcagtttgagagaaataggaagccctttgcagttgaggtgttaggaacctgctggtcatggtgtggaaggccaaatgaagctgccacagggtttcttgtcagtcctttgggaaatgggagggagtagtttggggaggagggtgggaaccctaatttccacagaatgaaattttgatgttaaatgacatgtatacaaattcttccttaagtgaaagttatgctgcatcgaattgtaactgaaagtatagatccaacaaatagagactgggttctagagagttctggtctatagaaacccaaaactaaaatctctcataactcaagtatggaatactttttttaaagaaattcttatcatgggtgttgtaataatgaagacgaatttgactttatgcagtgttctgcagcatgcctcccccacatctcatagcaccaggttgtgtctgacctgacataccctgcagctctcagctggctgcagtaacattttgtgggagaaagaggagctggagttacagaaatgattgtctcttggttctcagtttttagcccttgagaggacatacttttccagcctcatgggtatggcactcttaattaaaatttcagtgactgtttactggatgaggcagatttttcacatttttgcaaattaaatatattttatatatattaagtttaattttttcagtttttttaatgtaaaagcaagtgaaattttaataaacttctgtaattaccaaaaaaaaaaaaaaaaaaaaagccaaagccattaacgtgcactacccagatcaacttggagccaaaaggggtttacttctgaatggctgtccgtatgtgtccacataggatttagttggtttgtggcctcctttatagaaatgtgttgtctttccctagctgtctctgctgtctgtcttcctgcatatcccccttcattttaaaatcatgaatcagttgtaagtggtaaatggtagtagttcatctttcccatcaacatgattgtctctttattttaggaataatagcatttcaaaaattcctgtggtaaagaaacattaatctgaaacttaagccttagaaattaatcgcaggtatgatagaatgaggcttggtggttccatagctttcttggtcctttgaaatgggaaataacctgaaccaaaaatcctagtttgaaagttacacttcagtgatttggcctataaacagtggtcctatgattatacattttttccttcactgatttgcataattttgttttcatggccacagcaaaacaatgtgaaatatatttttgctatacccactttttttatcaaattcagatgtctactctcaccattttatattcatttccccagaaaaatgtgctgttttcataatgtctttatttagcaggtctttcaaaccaaatggaagccttacctgtctttgtccttaatagtgtaaatatcttgcacagagtgttgaggcctatggttttggacttgcaccttacagctgcctttgttttatctatctagctttaactgtgagtgttcagatcagctgatcacattgatcaggagccaaagccaaatgctttgtagtttgttatgtatgtatcccttaaaaaatcatgaggttttgatttttatattttaactaagggtacattcctgccttctcttagtttgtcatatgactagaacaagagaagtcttaagctgcatttactccaattccagatctccatttgtttttgttttataaatttataatcttaatgaagagactagtgccctctcttcctgccacaactctcaatctgccaagactgttgaagcagttaacgctcagtgcaaacttttgccaaatagtaagtttcaacaaaatatctttatagtgaaagattttgagaattagtaaatccagtacatgattccataaaagcttattaaagttaataattctaatttactccaaatgattactttcaatatgatctttggggagaaaaagcctttagtgaattttcttgagggtgataaatcacatcattgcgatctatatcacctccttgagaatctctcccaggctgaaaatgtgatggtaatcatgggtgtttttaagaacaaatctaatttttatcaagtgttctttcctctacaaaaaaggaaggaggagaaaaagcttccttaaaactgattattttgattcaattttaagtttctaaaaaaggtgatattaaagtatatgtattccttcagcattaccttaaaggctagaaaaacgggataaatcttcagaaaagtgtcaaaagtgtcacagtacatgttcaaatttaaacttgaatcctggttcatctttgacttttgttgtgcatttttaatgcttctttatttttgatacacagaatgcagttgaacttgatcttttaaaattgagacatgtaagctaatcagcaaaagacagaaacaaaactgcacatctgtaataatcagatagcaattctactgcacaattcattgattgtaaggtatcctgtaacaagcaatgtttgtctcctattttttgatacctcttaaacttatgtcttttagaaagacagtgcctctgtatgctttttgtatttttactgagtgtaaatatttgttatatttttggttaagagaatgtaaaaataccatttattattatcatatctactaatacattggtggaatcaataaagaatctacattaa

SEQ ID NO: 25488 - DNA, 4103 bp, Homo sapiens
  source 1..4103: mol_type = unassigned DNA
agtcgcgcgtgggtagaggccttaggcgggcgttgcgaagggttgtttgctagagttcggaccttgttacggcgcgaagttccctccttggggcgggggaaaggtaccgcacccgctacctagtgtgaatgaactgtggcgtgggctgctaagggcaggctgcggagtacccgggccgtggccatgaactcacccgtggaccctggcgctaggcaggcgttgaggaagaagccacccgagcggactcccgaggacttaaatactatttattcttatcttcatggaatggaaatattatcaaatctcagggaacatcagcttagattaatgtctgcaagagcacgctatgagagatacagtggcaatcaggttctcttttgttcagaaacgattgccagatgttggtatatcctactttctggatctgtgcttgtgaaaggctccatggtcttgcctccttgcagttttggtaagcagtttggaggaaaaagaggatgtgattgtcttgtattagagccttcagaaatgattgtggtagagaatgccaaagataatgaagatagtattctacaaagagaaattcctgccagacaatcccgaagaagatttcggaaaattaactataaaggagagcgccaaaccattactgatgatgtggaggttaacagctatctttctcttccagctgatcttaccaagatgcatctcacagaaaaccctcatccacaggtgactcatgtgtcttctagtcagtctggttgtagcattgccagtgactctggaagcagcagtttatctgatatctatcaggctacggagagtgaggtaggagatgtagatttgacacgtcttccagaaggacctgttgattctgaggatgacgaagaggaagatgaagagattgatcgaacagatccattgcaggggcgagatcttgttcgagaatgtcttgaaaaagaacctgcagacaaaactgatgatgacattgaacaattgctggagtttatgcaccagctccctgcatttgcaaacatgaccatgtctgtaaggagagaactctgctcagtgatgatttttgaagtggtagagcaggctggagctattattcttgaagatgggcaagagcttgactcatggtatgttattttaaacggcactgtggaaatcagtcatccagatggaaaagttgaaaatttgtttatgggaaatagttttggaattactcccactctggataagcagtacatgcatggaattgtcaggactaaagtagatgattgtcagtttgtctgcatagcccagcaagattattggagaattttaaaccatgtggaaaaaaatacccataaagttgaggaagagggagaaattgttatggtacatgagcatcgggaactagaccggagtggaaccaggaaaggacacattgtgatcaaggcaacacctgagcgtctcataatgcatttaatagaagaacattccatcgtggatccaacttatatagaagattttctattaacttacaggacatttcttgaaagtcctttggatgttgggatcaaactattggaatggtttaagatcgacagcttaagagataaggtgacacggattgtattattatgggtaaataatcattttaatgattttgaaggtgaccctgctatgactcgatttctagaggaatttgaaaaaaatctggaagatacaaagatgaatggtcatctccggttattgaatattgcctgtgctgcaaaggctaagtggagacaggttgtgctgcaaaaggcttcccgcgagtcccctctacaattcagccttaatggagggagtgagaagggatttggtatttttgttgaaggagtagaacctggtagcaaagctgctgattcaggactgaaacgtggtgatcagattatggaagtaaatggacaaaactttgagaatattacatttatgaaagccgttgaaattttgaggaataatactcatcttgcacttactgtgaagaccaacatttttgtgttcaaagagttactttttaggactgaacaagagaaatctggtgttcctcatattcccaaaattgctgaaaaaaaaagtaatcgccattctatccagcatgtgccaggagatattgaacagacatcacaggagaaaggaagtaagaaagttaaagcaaatactgtttcaggtggaagaaacaaaatcaggaagattttggataaaacacgatttagtatcttgcctccaaagctatttagtgatggaggcctaagccaatcacaagatgacagcattgtgggaacaaggcactgtaggcatagtctggctataatgcccatccctggaacactctcatccagcagccctgatctcctgcagcctaccaccagtatgttggatttttccaatccttcagatatccctgatcaagttataagagttttcaaagtggatcagcaaagttgctacattatcatcagtaaagacaccacagctaaagaagtagtttttcatgctgttcatgaatttggtttgaccggtgcatccgacacatattctctctgtgaagtttctgttactcctgagggtgtcataaaacagagaagacttccagatcagttctccaaattagctgatagaattcaactcaatggaaggtattacttaaaaaataacatggaaacagaaaccttatgttcagatgaagatgctcaagaactagttaaggaaagccagctatccatgctgcagctcagtaccattgaggtggccacccagctgtcaatgagggactttgatttgtttcgtaatattgaaccgactgagtacatcgatgacctttttaagttaaattccaaaacaggaaatactcatttgaagaggtttgaggacattgtaaaccaagagacattctgggttgcctcagaaattttaactgaagcaaatcagctcaaacgaatgaagattattaagcattttattaaaattgcacttcattgtcgagaatgtaagaacttcaattccatgtttgcaataataagtggcttgaacctggcatctgtagcaagactcagaggaacttgggaaaagttaccaagcaaatacgagaaacatcttcaagatctacaagacatttttgatccatctagaaacatggcaaagtatagaaatattcttagtagtcaaagtatgcagcctccaattattccactcttccctgttgtcaagaaagatatgacatttctacatgaaggaaatgactccaaagtagatggtttagtaaactttgagaagttaagaatgatttccaaggaaatccgccaagttgttcgaatgacttctgctaacatggacccagctatgatgtttcgacagaggtcactgagtcaaggaagcacaaattcaaacatgctggatgttcagggaggtgctcacaaaaaaagggcacgccgcagctctctgcttaatgccaagaagctatatgaggatgcccaaatggcaaggaaggtgaagcagtatctttccagtctcgatgtagagacagatgaggagaagttccagatgatgtcattacagtgggagcctgcatatggtaccttgaccaagaatttaagtgagaaaagatcagccaaatcatctgaaatgtctccagtgcctatgaggtcagctggccaaacaactaaagcccacttgcatcaaccccacagagtaagccaggtgcttcaggtgccagctgttaatttgcaccccatcaggaagaagggacaaacaaaagaccctgcactgatgtgaatttagtgctcttgaaaagggctggactggcagccctgcagcctcttcccgtatacccacagcacagatgcaccacagatacaagtttacctcagaaagttttaggaacaactgaagaaataagtggtaagaagcatacagaagacactatttctgtggcgtcatctttacattctagtcctcctgcatctcctcaaggctcccctcacaaagttggcagtatcatatctgatcacagcagcaagatcagtggccagagctgccccggaataggtggggcttacttgcaaaagaaaatccttcag

SEQ ID NO: 25489 - DNA, 4176 bp, Homo sapiens
  source 1..4176: mol_type = unassigned DNA
atgaactcacccgtggaccctggcgctaggcaggcgttgaggaagaagccacccgagcggactcccgaggacttaaatactatttattcttatcttcatggaatggaaatattatcaaatctcagggaacatcagcttagattaatgtctgcaagagcacgctatgagagatacagtggcaatcaggttctcttttgttcagaaacgattgccagatgttggtatatcctactttctggatctgtgcttgtgaaaggctccatggtcttgcctccttgcagttttggtaagcagtttggaggaaaaagaggatgtgattgtcttgtattagagccttcagaaatgattgtggtagagaatgccaaagataatgaagatagtattctacaaagagaaattcctgccagacaatcccgaagaagatttcggaaaattaactataaaggagagcgccaaaccattactgatgatgtggaggttaacagctatctttctcttccagctgatcttaccaagatgcatctcacagaaaaccctcatccacaggtgactcatgtgtcttctagtcagtctggttgtagcattgccagtgactctggaagcagcagtttatctgatatctatcaggctacggagagtgaggtaggagatgtagatttgacacgtcttccagaaggacctgttgattctgaggatgacgaagaggaagatgaagagattgatcgaacagatccattgcaggggcgagatcttgttcgagaatgtcttgaaaaagaacctgcagacaaaactgatgatgacattgaacaattgctggagtttatgcaccagctccctgcatttgcaaacatgaccatgtctgtaaggagagaactctgctcagtgatgatttttgaagtggtagagcaggctggagctattattcttgaagatgggcaagagcttgactcatggtatgttattttaaacggcactgtggaaatcagtcatccagatggaaaagttgaaaatttgtttatgggaaatagttttggaattactcccactctggataagcagtacatgcatggaattgtcaggactaaagtagatgattgtcagtttgtctgcatagcccagcaagattattggagaattttaaaccatgtggaaaaaaatacccataaagttgaggaagagggagaaattgttatggtacatgagcatcgggaactagaccggagtggaaccaggaaaggacacattgtgatcaaggcaacacctgagcgtctcataatgcatttaatagaagaacattccatcgtggatccaacttatatagaagattttctattaacttacaggacatttcttgaaagtcctttggatgttgggatcaaactattggaatggtttaagatcgacagcttaagagataaggtgacacggattgtattattatgggtaaataatcattttaatgattttgaaggtgaccctgctatgactcgatttctagaggaatttgaaaaaaatctggaagatacaaagatgaatggtcatctccggttattgaatattgcctgtgctgcaaaggctaagtggagacaggttgtgctgcaaaaggcttcccgcgagtcccctctacaattcagccttaatggagggagtgagaagggatttggtatttttgttgaaggagtagaacctggtagcaaagctgctgattcaggactgaaacgtggtgatcagattatggaagtaaatggacaaaactttgagaatattacatttatgaaagccgttgaaattttgaggaataatactcatcttgcacttactgtgaagaccaacatttttgtgttcaaagagttactttttaggactgaacaagagaaatctggtgttcctcatattcccaaaattgctgaaaaaaaaagtaatcgccattctatccagcatgtgccaggagatattgaacagacatcacaggagaaaggaagtaagaaagttaaagcaaatactgtttcaggtggaagaaacaaaatcaggaagattttggataaaacacgatttagtatcttgcctccaaagctatttagtgatggaggcctaagccaatcacaagatgacagcattgtgggaacaaggcactgtaggcatagtctggctataatgcccatccctggaacactctcatccagcagccctgatctcctgcagcctaccaccagtatgttggatttttccaatccttcagatatccctgatcaagttataagagttttcaaagtggatcagcaaagttgctacattatcatcagtaaagacaccacagctaaagaagtagtttttcatgctgttcatgaatttggtttgaccggtgcatccgacacatattctctctgtgaagtttctgttactcctgagggtgtcataaaacagagaagacttccagatcagttctccaaattagctgatagaattcaactcaatggaaggtattacttaaaaaataacatggaaacagaaaccttatgttcagatgaagatgctcaagaactagttaaggaaagccagctatccatgctgcagctcagtaccattgaggtggccacccagctgtcaatgagggactttgatttgtttcgtaatattgaaccgactgagtacatcgatgacctttttaagttaaattccaaaacaggaaatactcatttgaagaggtttgaggacattgtaaaccaagagacattctgggttgcctcagaaattttaactgaagcaaatcagctcaaacgaatgaagattattaagcattttattaaaattgcacttcattgtcgagaatgtaagaacttcaattccatgtttgcaataataagtggcttgaacctggcatctgtagcaagactcagaggaacttgggaaaagttaccaagcaaatacgagaaacatcttcaagatctacaagacatttttgatccatctagaaacatggcaaagtatagaaatattcttagtagtcaaagtatgcagcctccaattattccactcttccctgttgtcaagaaagatatgacatttctacatgaaggaaatgactccaaagtagatggtttagtaaactttgagaagttaagaatgatttccaaggaaatccgccaagttgttcgaatgacttctgctaacatggacccagctatgatgtttcgacagaggtcactgagtcaaggaagcacaaattcaaacatgctggatgttcagggaggtgctcacaaaaaaagggcacgccgcagctctctgcttaatgccaagaagctatatgaggatgcccaaatggcaaggaaggtgaagcagtatctttccagtctcgatgtagagacagatgaggagaagttccagatgatgtcattacagtgggagcctgcatatggtaccttgaccaagaatttaagtgagaaaagatcagccaaatcatctgaaatgtctccagtgcctatgaggtcagctggccaaacaactaaagcccacttgcatcaaccccacagagtaagccaggtgcttcaggtgccagctgttaatttgcaccccatcaggaagaagggacaaacaaaagaccctgcactgaatacaagtttacctcagaaagttttaggaacaactgaagaaataagtggtaagaagcatacagaagacactatttctgtggcgtcatctttacattctagtcctcctgcatctcctcaaggctcccctcacaaagttggcagtatcatatctgatcacagcagcaagatcagtggccagagctgccccggaataggtggggcttacttgcaaaagaaaatccttcagattaccaggagcacagccaaaagaacagacagtactgagaaggccactgaggagaatagagacaggacaagttgtgagaacacaaccagaaaaagaatgacatccccgtttagaagacttagggaaagaatgctttcaagggagagactagtcaacagccaaaaagaggacacagatcacaatcaagctacagaaagctgtgagaaagtgaaggatgttggaagcaacatcaaagatgagaaagggagtgccatcttcaattcaaatagccaaggcaacagtaacactttaaactgcttctatacgcgattcaagtctaaaaggaggaagacactctga

SEQ ID NO: 25490 - DNA, 3107 bp, Homo sapiens
  source 1..3107: mol_type = unassigned DNA
gcagacttgtctccggccagtcgcgcgtgggtagaggccttaggcgggcgttgcgaagggttgtttgctagagttcggaccttgttacggcgcgaagttccctccttggggcgggggaaaggtaccgcacccgctacctagtgtgaatgaactgtggcgtgggctgctaagggcaggctgcggagtacccgggccgtggccatgaactcacccgtggaccctggcgctaggcaggcgttgaggaagaagccacccgagcggactcccgaggacttaaatactatttattcttatcttcatggaatggaaatattatcaaatctcagggaacatcagcttagattaatgtctgcaagagcacgctatgagagatacagtggcaatcaggttctcttttgttcagaaacgattgccagatgttggtatatcctactttctggatctgtgcttgtgaaaggctccatggtcttgcctccttgcagttttggtaagcagtttggaggaaaaagaggatgtgattgtcttgtattagagccttcagaaatgattgtggtagagaatgccaaagataatgaagatagtattctacaaagagaaattcctgccagacaatcccgaagaagatttcggaaaattaactataaaggagagcgccaaaccattactgatgatgtggaggttaacagctatctttctcttccagctgatcttaccaagatgcatctcacagaaaaccctcatccacaggtgactcatgtgtcttctagtcagtctggttgtagcattgccagtgactctggaagcagcagtttatctgatatctatcaggctacggagagtgaggtaggagatgtagatttgacacgtcttccagaaggacctgttgattctgaggatgacgaagaggaagatgaagagattgatcgaacagatccattgcaggggcgagatcttgttcgagaatgtcttgaaaaagaacctgcagacaaaactgatgatgacattgaacaattgctggagtttatgcaccagctccctgcatttgcaaacatgaccatgtctgtaaggagagaactctgctcagtgatgatttttgaagtggtagagcaggctggagctattattcttgaagatgggcaagagcttgactcatggtatgttattttaaacggcactgtggaaatcagtcatccagatggaaaagttgaaaatttgtttatgggaaatagttttggaattactcccactctggataagcagtacatgcatggaattgtcaggactaaagtagatgattgtcagtttgtctgcatagcccagcaagattattggagaattttaaaccatgtggaaaaaaatacccataaagttgaggaagagggagaaattgttatggtacatgagcatcgggaactagaccggagtggaaccaggaaaggacacattgtgatcaaggcaacacctgagcgtctcataatgcatttaatagaagaacattccatcgtggatccaacttatatagaagattttctattaacttacaggacatttcttgaaagtcctttggatgttgggatcaaactattggaatggtttaagatcgacagcttaagagataaggtgacacggattgtattattatgggtaaataatcattttaatgattttgaaggtgaccctgctatgactcgatttctagaggaatttgaaaaaaatctggaagatacaaagatgaatggtcatctccggttattgaatattgcctgtgctgcaaaggctaagtggagacaggttgtgctgcaaaaggcttcccgcgagtcccctctacaattcagccttaatggagggagtgagaagggatttggtatttttgttgaaggagtagaacctggtagcaaagctgctgattcaggactgaaacgtggtgatcagattatggaagtaaatggacaaaactttgagaatattacatttatgaaagccgttgaaattttgaggaataatactcatcttgcacttactgtgaagaccaacatttttgtgttcaaagagttactttttaggactgaacaagagaaatctggtgttcctcatattcccaaaattgctgaaaaaaaaagtaatcgccattctatccagcatgtgccaggagatattgaacagacatcacaggagaaaggaagtaagaaagttaaagcaaatactgtttcaggtggaagaaacaaaatcaggaagattttggataaaacacgatttagtatcttgcctccaaagctatttagtgatggaggcctaagccaatcacaagatgacagcattgtgggaacaaggcactgtaggcatagtctggctataatgcccatccctggaacactctcatccagcagccctgatctcctgcagcctaccaccagtatgttggatttttccaatccttcagatatccctgatcaagttataagagttttcaaagtggatcagcaaagttgctacattatcatcagtaaagacaccacagctaaagaagtagtttttcatgctgttcatgaatttggtttgaccggtgcatccgacacatattctctctgtgaagtttctgttactcctgagggtgtcataaaacagagaagacttccagatcagttctccaaattagctgatagaattcaactcaatggaaggtgaataagcttattagtggatgtgcttatttgtagatgtgcttttgaagatttcctgttaaaacagctattgtaagtagaaacattatcatgttttagtgctcctaaattcactccagaagacgcttgataaaatatcttgtcactcctgctaaaataaactcttagaaccactgatataatctagttcctgtttttttatagaggaagctgaatgatacaaatcttcatatatatctgaatgactgtatctactaatttataaatttgtttttaatatggccagtatgtactttggcaaaagaagccatggttttcacagttctttttctaagtagttttcctttaatgaatatgcaggaaaattttaaaaattttaaaatgtgttctgaaaattatttaataaactagattatttctgtagta

SEQ ID NO: 25491 - DNA, 1686 bp, Homo sapiens
  source 1..1686: mol_type = unassigned DNA
ctccccggcggccgccccccgcgggtccctccctggctgcgggagagacggaggtagagggaggacacagagccgcgccgcccgcaccacagaccttcgcctcgccccgccggttcctcaccctcggggagcaacatggcagataatctcagtgataccttgaagaagctgaagataacagctgttgacaagactgaggatagtttagaaggatgcttggattgtctgcttcaagccctggctcaaaataatacggaaacaagtgaaaaaatccaagcaagtggaatacttcagctgtttgcaagtctgttgactccacagtcttcctgcaaagccaaagtagctaacatcatagcagaagtagccaaaaatgagtttatgcgaattccatgtgtggatgctggattgatttcaccactggtgcagctgctaaatagcaaagaccaggaagtgctgcttcaaacgggcagggctctaggaaacatatgttacgatagccagtcaagtaaagaacagtttgccagtacaaacattgctgaagagctagtaaaactcttcaagaaacaaatagaacatgataagagagaaatgatttttgaagttcttgctccattggcagaaaatgatgctattaaactacagctggttgaagcaggcctagtagagtgtctactagagattgttcagcaaaaagtggatagtgacaaagaagatgatattactgagctcaaaactggttcagatctcatggttttattacttcttggagatgaatccatgcagaagttatttgaaggaggaaaaggtagtgtatttcaaagggtactctcttggatcccatcaaataaccaccagctacagcttgctggagcattggcaattgcaaattttgccagaaatgatgcaaattgtattcatatggtagacaatgggattgtagaaaaacttatggatttactggacagacatgtagaagatggaaatgtaacagtacagcatgcagcactaagtgccctcagaaacctggccattccagttataaataaagcaaagatgttatcagctggggtcacagaggcagttttgaaatttcttaaatctgaaatgcctcctgttcagttcaaacttctgggaacattaagaatgttaatagatgcacaagcagaagctgctgaacaattgggaaagaatgttaagttagtggagcgtttggtggaatggtgtgaagccaaagatcatgctggtgtgatgggggagtcaaacagactgctgtctgcccttatacgacacagtaaatcaaaagatgtaattaaaaccattgtgcagagtggtggcatcaagcatctagttaccatggcaactagtgaacatgtaataatgcagaatgaagctcttgttgctttggcattaatagcagctttagaattgggcactgctgagaaagatctagaaagtgctaaacttgtacagattttacatagactgctagcagatgagagaagtgctcctgaaatcaaatataattccatggtcctgatatgtgctcttatgggatctgaatgtctacacaaggaagtacaggatttggcttttctagatgtcgtatccaaacttcgcagtcatgagaacaaaagtgttgcccagcaggcctctctcacagagcagagacttactgtggaaagctga

SEQ ID NO: 25492 - DNA, 2092 bp, Homo sapiens
  source 1..2092: mol_type = unassigned DNA
cacagaccttcgcctcgccccgccggttcctcaccctcggggagcaacatggcagataatctcagtgataccttgaagaagctgaagataacagctgttgacaagactgaggatagtttagaaggatgcttggattgtctgcttcaagccctggctcaaaataatacggaaacaagtgaaaaaatccaagcaagtggaatacttcagctgtttgcaagtctgttgactccacagtcttcctgcaaagccaaagtagctaacatcatagcagaagtagccaaaaatgagtttatgcgaattccatgtgtggatgctggattgatttcaccactggtgcagctgctaaatagcaaagaccaggaagtgctgcttcaaacgggcagggctctaggaaacatatgttacgatagccatgagggcagaagtgcagttgaccaagcaggtggtgcacagattgtaattgaccatttaaggtcactgtgcagtataacagatcccgccaatgagaagctcttgactgtcttttgtggcatgctgatgaactatagcaatgagaatgattcgcttcaagctcagcttatcaatatgggtgttattcctaccttagtgaaattactgggcatccactgccaaaatgcagctcttacagaaatgtgtcttgttgcatttggtaatttagcagaacttgagtcaagtaaagaacagtttgccagtacaaacattgctgaagagctagtaaaactcttcaagaaacaaatagaacatgataagagagaaatgatttttgaagttcttgctccattggcagaaaatgatgctattaaactacagctggttgaagcaggcctagtagagtgtctactagagattgttcagcaaaaagtggatagtgacaaagaagatgatattactgagctcaaaactggttcagatctcatggttttattacttcttggagatgaatccatgcagaagttatttgaaggaggaaaaggtagtgtatttcaaagggtactctcttggatcccatcaaataaccaccagctacagcttgctggagcattggcaattgcaaattttgccagaaatgatgcaaattgtattcatatggtagacaatgggattgtagaaaaacttatggatttactggacagacatgtagaagatggaaatgtaacagtacagcatgcagcactaagtgccctcagaaacctggccattccagttataaataaagcaaagatgttatcagctggggtcacagaggcagttttgaaatttcttaaatctgaaatgcctcctgttcagttcaaacttctgggaacattaagaatgttaatagatgcacaagcagaagctgctgaacaattgggaaagaatgttaagttagtggagcgtttggtggaatggtgtgaagccaaagatcatgctggtgtgatgggggagtcaaacagactgctgtctgcccttatacgacacagtaaatcaaaagatgtaattaaaaccattgtgcagagtggtggcatcaagcatctagttaccatggcaactagtgaacatgtaataatgcagaatgaagctcttgttgctttggcattaatagcagctttagaattgggcactgctgagaaagatctagaaagtgctaaacttgtacagattttacatagactgctagcagatgagagaagtgctcctgaaatcaaatataattccatggtcctgatatgtgctcttatgggatctgaatgtctacacaaggaagtacaggatttggcttttctagatgtcgtatccaaacttcgcagtcatgagaacaaaagtgttgcccagcaggcctctctcacagagcagagacttactgtggaaagctgagaactgcccgatacacggcatcatcccatctctaatttcccctctgtcctccatccagcggcttcttccgcttcattctctaccataccacttgtgcatgcatgtgatgttctaataccaattgaagaaccgctgtaggtacctccctaataagatttctaaacctatagttagtgtgatcatgactttgtcaaaggcaagtctccacccataaccg

SEQ ID NO: 25493 - DNA, 2085 bp, Homo sapiens
  source 1..2085: mol_type = unassigned DNA
agcaccagctgctcctccccggcggccgccccccgcgggtccctccctggctgcgggagagacggaggtagagggaggacacagagccgcgccgcccgcaccacagaccttcgcctcgccccgccggttcctcaccctcggggagcaacatggcagataatctcagtgataccttgaagaagctgaagataacagctgttgacaagactgaggatagtttagaaggatgcttggattgtctgcttcaagccctggctcaaaataatacggaaacaagtgaaaaaatccaagcaagtggaatacttcagctgtttgcaagtctgttgactccacagtcttcctgcaaagccaaagtagctaacatcatagcagaagtagccaaaaatgagtttatgcgaattccatgtgtggatgctggattgatttcaccactggtgcagctgctaaatagcaaagaccaggaagtgctgcttcaaacgggcagggctctaggaaacatatgttacgatagccattcgcttcaagctcagcttatcaatatgggtgttattcctaccttagtgaaattactgggcatccactgccaaaatgcagctcttacagaaatgtgtcttgttgcatttggtaatttagcagaacttgagtcaagtaaagaacagtttgccagtacaaacattgctgaagagctagtaaaactcttcaagaaacaaatagaacatgataagagagaaatgatttttgaagttcttgctccattggcagaaaatgatgctattaaactacagctggttgaagcaggcctagtagagtgtctactagagattgttcagcaaaaagtggatagtgacaaagaagatgatattactgagctcaaaactggttcagatctcatggttttattacttcttggagatgaatccatgcagaagttatttgaaggaggaaaaggtagtgtatttcaaagggtactctcttggatcccatcaaataaccaccagctacagcttgctggagcattggcaattgcaaattttgccagaaatgatgcaaattgtattcatatggtagacaatgggattgtagaaaaacttatggatttactggacagacatgtagaagatggaaatgtaacagtacagcatgcagcactaagtgccctcagaaacctggccattccagttataaataaagcaaagatgttatcagctggggtcacagaggcagttttgaaatttcttaaatctgaaatgcctcctgttcagttcaaacttctgggaacattaagaatgttaatagatgcacaagcagaagctgctgaacaattgggaaagaatgttaagttagtggagcgtttggtggaatggtgtgaagccaaagatcatgctggtgtgatgggggagtcaaacagactgctgtctgcccttatacgacacagtaaatcaaaagatgtaattaaaaccattgtgcagagtggtggcatcaagcatctagttaccatggcaactagtgaacatgtaataatgcagaatgaagctcttgttgctttggcattaatagcagctttagaattgggcactgctgagaaagatctagaaagtgctaaacttgtacagattttacatagactgctagcagatgagagaagtgctcctgaaatcaaatataattccatggtcctgatatgtgctcttatgggatctgaatgtctacacaaggaagtacaggatttggcttttctagatgtcgtatccaaacttcgcagtcatgagaacaaaagtgttgcccagcaggcctctctcacagagcagagacttactgtggaaagctgagaactgcccgatacacggcatcatcccatctctaatttcccctctgtcctccatccagcggcttcttccgcttcattctctaccataccacttgtgcatgcatgtgatgttctaataccaattgaagaaccgctgtaggtacctccctaataagatttctaaacctatagttagtgtgatcatgactttgtcaaaggcaagtctccacccataaccgttctcttgtattcctgttgcttgagctacattaagtaga

SEQ ID NO: 25494 - DNA, 1942 bp, Homo sapiens
  source 1..1942: mol_type = unassigned DNA
cacagaccttcgcctcgccccgccggttcctcaccctcggggagcaacatggataatctcagtgataccttgaagaagctgaagataacagctgttgacaagactgaggatagtttagaaggatgcttggattgtctgcttcaagccctggctcaaaataatacggaaacaagtgaaaaaatccaagcaagtggaatacttcagctgtttgcaagtctgttgactccacagtcttcctgcaaagccaaagtagctaacatcatagcagaagtagccaaaaatgagtttatgcgaattccatgtgtggatgctggattgatttcaccactggtgcagctgctaaatagcaaagaccaggaagtgctgcttcaaacgggcagggctctaggaaacatatgttacgatagccattcgcttcaagctcagcttatcaatatgggtgttattcctaccttagtgaaattactgggcatccactgccaaaatgcagctcttacagaaatgtgtcttgttgcatttggtaatttagcagaacttgagtcaagtaaagaacagtttgccagtacaaacattgctgaagagctagtaaaactcttcaagaaacaaatagaacatgataagagagaaatgatttttgaagttcttgctccattggcagaaaatgatgctattaaactacagctggttgaagcaggcctagtagagtgtctactagagattgttcagcaaaaagtggatagtgacaaagaagatgatattactgagctcaaaactggttcagatctcatggttttattacttcttggagatgaatccatgcagaagttatttgaaggaggaaaaggtagtgtatttcaaagggtactctcttggatcccatcaaataaccaccagctacagcttgctggagcattggcaattgcaaattttgccagaaatgatgcaaattgtattcatatggtagacaatgggattgtagaaaaacttatggatttactggacagacatgtagaagatggaaatgtaacagtacagcatgcagcactaagtgccctcagaaacctggccattccagttataaataaagcaaagatgttatcagctggggtcacagaggcagttttgaaatttcttaaatctgaaatgcctcctgttcagttcaaacttctgggaacattaagaatgttaatagatgcacaagcagaagctgctgaacaattgggaaagaatgttaagttagtggagcgtttggtggaatggtgtgaagccaaagatcatgctggtgtgatgggggagtcaaacagactgctgtctgcccttatacgacacagtaaatcaaaagatgtaattaaaaccattgtgcagagtggtggcatcaagcatctagttaccatggcaactagtgaacatgtaataatgcagaatgaagctcttgttgctttggcattaatagcagctttagaattgggcactgctgagaaagatctagaaagtgctaaacttgtacagattttacatagactgctagcagatgagagaagtgctcctgaaatcaaatataattccatggtcctgatatgtgctcttatgggatctgaatgtctacacaaggaagtacaggatttggcttttctagatgtcgtatccaaacttcgcagtcatgagaacaaaagtgttgcccagcaggcctctctcacagagcagagacttactgtggaaagctgagaactgcccgatacacggcatcatcccatctctaatttcccctctgtcctccatccagcggcttcttccgcttcattctctaccataccacttgtgcatgcatgtgatgttctaataccaattgaagaaccgctgtaggtacctccctaataagatttctaaacctatagttagtgtgatcatgactttgtcaaaggcaagtctccacccataaccg

SEQ ID NO: 25495 - DNA, 3681 bp, Homo sapiens
  source 1..3681: mol_type = unassigned DNA
gggtccctccctggctgcgggagagacggaggtagagggaggacacagagccgcgccgcccgcaccacagaccttcgcctcgccccgccggttcctcaccctcggggagcaacatggataatctcagtgataccttgaagaagctgaagataacagctgttgacaagactgaggatagtttagaaggatgcttggattgtctgcttcaagccctggctcaaaataatacggaaacaagtgaaaaaatccaagcaagtggaatacttcagctgtttgcaagtctgttgactccacagtcttcctgcaaagccaaagtagctaacatcatagcagaagtagccaaaaatgagtttatgcgaattccatgtgtggatgctggattgatttcaccactggtgcagctgctaaatagcaaagaccaggaagtgctgcttcaaacgggcagggctctaggaaacatatgttacgatagccatgagggcagaagtgcagttgaccaagcaggtggtgcacagattgtaattgaccatttaaggtcactgtgcagtataacagatcccgccaatgagaagctcttgactgtcttttgtggcatgctgatgaactatagcaatgagaatgattcgcttcaagctcagcttatcaatatgggtgttattcctaccttagtgaaattactgggcatccactgccaaaatgcagctcttacagaaatgtgtcttgttgcatttggtaatttagcagaacttgagtcaagtaaagaacagtttgccagtacaaacattgctgaagagctagtaaaactcttcaagaaacaaatagaacatgataagagagaaatgatttttgaagttcttgctccattggcagaaaatgatgctattaaactacagctggttgaagcaggcctagtagagtgtctactagagattgttcagcaaaaagtggatagtgacaaagaagatgatattactgagctcaaaactggttcagatctcatggttttattacttcttggagatgaatccatgcagaagttatttgaaggaggaaaaggtagtgtatttcaaagggtactctcttggatcccatcaaataaccaccagctacagcttgctggagcattggcaattgcaaattttgccagaaatgatgcaaattgtattcatatggtagacaatgggattgtagaaaaacttatggatttactggacagacatgtagaagatggaaatgtaacagtacagcatgcagcactaagtgccctcagaaacctggccattccagttataaataaagcaaagatgttatcagctggggtcacagaggcagttttgaaatttcttaaatctgaaatgcctcctgttcagttcaaacttctgggaacattaagaatgttaatagatgcacaagcagaagctgctgaacaattgggaaagaatgttaagttagtggagcgtttggtggaatggtgtgaagccaaagatcatgctggtgtgatgggggagtcaaacagactgctgtctgcccttatacgacacagtaaatcaaaagatgtaattaaaaccattgtgcagagtggtggcatcaagcatctagttaccatggcaactagtgaacatgtaataatgcagaatgaagctcttgttgctttggcattaatagcagctttagaattgggcactgctgagaaagatctagaaagtgctaaacttgtacagattttacatagactgctagcagatgagagaagtgctcctgaaatcaaatataattccatggtcctgatatgtgctcttatgggatctgaatgtctacacaaggaagtacaggatttggcttttctagatgtcgtatccaaacttcgcagtcatgagaacaaaagtgttgcccagcaggcctctctcacagagcagagacttactgtggaaagctgagaactgcccgatacacggcatcatcccatctctaatttcccctctgtcctccatccagcggcttcttccgcttcattctctaccataccacttgtgcatgcatgtgatgttctaataccaattgaagaaccgctgtaggtacctccctaataagatttctaaacctatagttagtgtgatcatgactttgtcaaaggcaagtctccacccataaccgttctcttgtattcctgttgcttgagctacattaagtagaatgtgcatgttgtagtcctatgatgatgtaaacttggtactacataatgacttgctccacacatgcagtaaactacataatgatgtactggtaaactagaaacaaagaatgcagcaggatctgtctagcttattaaagatgaaactgaattggaaaaatagctccattttttggtgcttgggaagcacagtgaccaaaaaagttgtatggctgcttattcattagtctttcctactgatgtcaaatccatggtacctagagttaaataaaattccaatgctcttactctttaacttctggtttctcctttttcctttttagactattgaaactgccacaaacttggcaagactttctgaggtttctgattccatatttaattgactattatcaatagcctgatattgaaaaacatttgtagttttcagtgtgaaactaaggggttgaagaatcactattacaatccctattacagagcatttcgggttttgcttgtattttagattctgatacatacgctgtttcactcaggaactacttctaccagttaatcagcattatccagcacttgtctttaaaattcatttggcgcttgtttgttttcaactgaggaaattgagtatagttcattgaagaatggaatttttttttttttttttttttttgctgtttttcatcattcagctagaaagtgagaagttttatcttccatagtccttttaaatcttatgttagaactagcaggacgtaggtggaaagatgaagaaataagcttgtctagactaaagaaaggaaagcaggttataaaagccatagtagccagtccagttcattctgcagatggccccataccaatcgctgttagagtttgccacctccactttcccactgagaactgcagcaattttaaaggatatgagaaagccaagactcaagagatgagaagacccccttggcgaaatatagtgtactcttcactgccactgccaccaccaaatgggtttttagagctttgaaacacaatctttgtaaattaatcaaaacctccctgtgacccacctgccttctccccatacccaaatttgaccactactggcctaaaaggcaagatgggcttcgatatagaaggactgcaagacagtagaaagggctgccacggaggtgacagtagctccttcctctccaacatgtgatgctacacatctctgtggataatctaagttggacttttgactctaaaacagctataatccaagaaagttaaattctaatggaggtaaagaatcttgactgattgttccctttgatgtccaaataagggaactattgtgagtacgtatgctacacttactataagaatgatactgtttgttgtctttctcctgggctggatagtggactatattttattacaggctttgaaagacatctgtaatgttgcatatctgttcatattaataacttaataaatagtatatgaagctataa

SEQ ID NO: 25496 - DNA, 2470 bp, Homo sapiens
  source 1..2470: mol_type = unassigned DNA
gcgggagagacggaggtagagggaggacacagagccgcgccgcccgcaccacagaccttcgcctcgccccgccggttcctcaccctcggggagcaacatggcagataatctcagtgataccttgaagaagctgaagataacagctgttgacaagactgaggatagtttagaaggatgcttggattgtctgcttcaagccctggctcaaaataatacggaaacaagtgaaaaaatccaagcaagtggaatacttcagctgtttgcaagtctgttgactccacagtcttcctgcaaagccaaagtagctaacatcatagcagaagtagccaaaaatgagtttatgcgaattccatgtgtggatgctggattgatttcaccactggtgcagctgctaaatagcaaagaccaggaagtgctgcttcaaacgggcagggctctaggaaacatatgttacgatagccatgagggcagaagtgcagttgaccaagcaggtggtgcacagattgtaattgaccatttaaggtcactgtgcagtataacagatcccgccaatgagaagctcttgactgtcttttgtggcatgctgatgaactatagcaatgagaatgattcgcttcaagctcagcttatcaatatgggtgttattcctaccttagtgaaattactgggcatccactgccaaaatgcagctcttacagaaatgtgtcttgttgcatttggtaatttagcagaacttgagtcaagtaaagaacagtttgccagtacaaacattgctgaagagctagtaaaactcttcaagaaacaaatagaacatgataagagagaaatgatttttgaagttcttgctccattggcagaaaatgatgctattaaactacagctggttgaagcaggcctagtagagtgtctactagagattgttcagcaaaaagtggatagtgacaaagaagatgatattactgagctcaaaactggttcagatctcatggttttattacttcttggagatgaatccatgcagaagttatttgaaggaggaaaaggtagtgtatttcaaagggtactctcttggatcccatcaaataaccaccagctacagcttgctggagcattggcaattgcaaattttgccagaaatgatgcaaattgtattcatatggtagacaatgggattgtagaaaaacttatggatttactggacagacatgtagaagatggaaatgtaacagtacagcatgcagcactaagtgccctcagaaacctggccattccagttataaataaagcaaagatgttatcagctggggtcacagaggcagttttgaaatttcttaaatctgaaatgcctcctgttcagttcaaacttctgggaacattaagaatgttaatagatgcacaagaagctgctgaacaattgggaaagaatgttaagttagtggagcgtttggtggaatggtgtgaagccaaagatcatgctggtgtgatgggggagtcaaacagactgctgtctgcccttatacgacacagtaaatcaaaagatgtaattaaaaccattgtgcagagtggtggcatcaagcatctagttaccatggcaactagtgaacatgtaataatgcagaatgaagctcttgttgctttggcattaatagcagctttagaattgggcactgctgagaaagatctagaaagtgctaaacttgtacagattttacatagactgctagcagatgagagaagtgctcctgaaatcaaatataattccatggtcctgatatgtgctcttatgggatctgaatgtctacacaaggaagtacaggatttggcttttctagatgtcgtatccaaacttcgcagtcatgagaacaaaagtgttgcccagcaggcctctctcacagagcagagacttactgtggaaagctgagaactgcccgatacacggcatcatcccatctctaatttcccctctgtcctccatccagcggcttcttccgcttcattctctaccataccacttgtgcatgcatgtgatgttctaataccaattgaagaaccgctgtaggtacctccctaataagatttctaaacctatagttagtgtgatcatgactttgtcaaaggcaagtctccacccataaccgttctcttgtattcctgttgcttgagctacattaagtagaatgtgcatgttgtagtcctatgatgatgtaaacttggtactacataatgacttgctccacacatgcagtaaactacataatgatgtactggtaaactagaaacaaagaatgcagcaggatctgtctagcttattaaagatgaaactgaattggaaaaatagctccattttttggtgcttgggaagcacagtgaccaaaaaagttgtatggctgcttattcattagtctttcctactgatgtcaaatccatggtacctagagttaaataaaattccaatgctcttactctttaa

SEQ ID NO: 25497 - DNA, 2129 bp, Homo sapiens
  source 1..2129: mol_type = unassigned DNA
acccgcgcgccccgcccgcgggcggaagctggagcgaggctgaacgcctgacgtcaaggcgacatcgccaaacctcgcccagattcaggcgtgtaaaccagccggagcggcgcggcagcggcaggaccgccgtggcgcctagagtagcgacccggggggagcgcggggcgacgctggctgcagggacccggtgacagcgtgagaggtactaggttttgacaagcttgcatcatgcgtgagtataagctagtcgttcttggctcaggaggcgttggaaagtctgctttgactgtacaatttgttcaaggaatttttgtagaaaaatacgatcctacgatagaagattcttatagaaagcaagttgaagtagatgcacaacagtgtatgcttgaaatcttggatactgcaggaacggagcaatttacagcaatgagggatttatacatgaaaaatggacaaggatttgcattagtttattccatcacagcacagtccacatttaacgatttacaagacctgagagaacagattcttcgagttaaagacactgatgatgttccaatgattcttgttggtaataagtgtgacttggaagatgaaagagttgtagggaaggaacaaggtcaaaatctagcaagacaatggaacaactgtgcattcttagaatcttctgcaaaatcaaaaataaatgttaatgagatcttttatgacctagtgcggcaaattaacagaaaaactccagtgcctgggaaggctcgcaaaaagtcatcatgtcagctgctttaatatactaaatgcattgtagctctgagccaggtctgaagaactgttgcccaattcaacagtgccagcattccaactttgttaaacctaccaacatcttaaatggactttcctgtggtggtaccctttaagaggcggatgaaagctactatatcagtttgcacattctaatcactttccagtatcacaagagagatttttacttatataatagtcctagagtttgcagctggtaaaaccagaggctacatccagtattactgctaagagacattcttcatccaccaatgttgtacatgtatgaaaatggtgtactgtatactttaacatgccccatactttgtattggagagtacaataatgtaaatcctaaaagcaccactattttagcataataaaagaaagtccaaagagctcctatatagactactccagataacttcgcttctttgatacttgtagcttattgtaattttttttaagaaattcaaggtcattattattgtacaaaataagcgctttgattaacacagctatatagtttttttaatttttaaaaaacctgtggagacggtgatcttgtctttaaaacatgatagtcctttcagtataatgtcttagattaaagacgttgcctttaatatctgttgggaaggaaatgtccagacttttcaaatctcttattatatgtttcctttttttgtttacatagggaacaatgtttatagtcgtgtgtacagtgggggtctacaacaagaagtgtatattttcaaacaattttttaatgatttaacaatttttgtaaatcattttcaggcttctgcagctgtagattctcactgtgaatcccttgcttgctcatgcataagtgtatttgcaataccaaatatacaggtttagtatttttgcctgttagtgattgtttcacatgtgtaacgttttggttgagatgttaaatggtggacgagtactgtggatgtgaatgtgggaagtaattttaatcatatgtaattggtcacaaggcctaatttgcagtaactattgctgttttatttaacaatgccttgttgctttgtatgcattaatgtttggatgtaaagattgtgtgtctatccaacagggagccacagtatttaaattgaccaacctaatgttacaactactttgaggtggccaaatgtaaactaaaagccttaattaaagtggtgcaattttgtataacttagcatcagtagttcaataaatttggattgccatgcaagggcttgcattataattacttgccacttgaatgtgttttgtgtaatgttttaacagtgctagtaaataaatacgggtttaccctg

SEQ ID NO: 25498 - DNA, 714 bp, Homo sapiens
  source 1..714: mol_type = unassigned DNA
aaacctcgcccagattcaggcgtgtaaaccagccggagcggcgcggcagcggcaggaccgccgtggcgcctagagtagcgacccggggggagcgcggggcgacgctggctgcagggacccggtgacagcgtgagaggttttgacaagcttgcatcatgcgtgagtataagctagtcgttcttggctcaggaggcgttggaaagtctgctttgactgtacaatttgttcaaggaatttttgtagaaaaatacgatcctacgatagaagattcttatagaaagcaagttgaagtagatgcacaacagtgtatgcttgaaatcttggatactgcaggaacggagcaatttacagcaatgagggatttatacatgaaaaatggacaaggatttgcattagtttattccatcacagcacagtccacatttaacgatttacaagacctgagagaacagattcttcgagttaaagacactgatgatgttccaatgattcttgttggtaataagtgtgacttggaagatgaaagagttgtagggaaggaacaaggtcaaaatctagcaagacaatggaacaactgtgcattcttagaatcttctgcaaaatcaaaaataaatgttaatgagatcttttatgacctagtgcggcaaattaacagaaaaactccagtgcctgggaaggctcgcaaaaagtcatcatgtcagctgctttaatata

SEQ ID NO: 25499 - DNA, 1017 bp, Homo sapiens
  source 1..1017: mol_type = unassigned DNA
aggcgtgtaaaccagccggagcggcgcggcagcggcaggaccgccgtggcgcctagagtagcgacccggggggagcgcggggcgacgctggctgcagggacccggtgacagcgtgagaggagcaatttacagcaatgagggatttatacatgaaaaatggacaaggatttgcattagtttattccatcacagcacagtccacatttaacgatttacaagacctgagagaacagattcttcgagttaaagacactgatgatgttccaatgattcttgttggtaataagtgtgacttggaagatgaaagagttgtagggaaggaacaaggtcaaaatctagcaagacaatggaacaactgtgcattcttagaatcttctgcaaaatcaaaaataaatgttaatgagatcttttatgacctagtgcggcaaattaacagaaaaactccagtgcctgggaaggctcgcaaaaagtcatcatgtcagctgctttaatatactaaatgcattgtagctctgagccaggtatgttcacttatctttcctctaacttttaatcactcaaccttattaagggcactctgtcatgaaagcaagtatagacttctttttgttggttctgaaaaataaatggtttatttttataagatatccatgagttagtatgctatcttattaattatttacttatcatcatgagtaaagtatttcacataagtattctttttttgagatggagtttcactctgtcacccaggctggagtgcagtggcgcaatatcagctccctgcaacctccgcctcccaggttcaagcaatgcttctgcctcagcctcccgagtagctgggattacaggcacgtgccaccacgcccggctagtttttttgtatttttagtagagatggtgtttcaccattgttggccaggatggtctcaatctcttgacctcgtgatctgcccacctcggcctcccaaagtgctgagattacaggcgtgagccaccactcccagccaaccccgt

SEQ ID NO: 25500 - DNA, 2049 bp, Homo sapiens
  source 1..2049: mol_type = unassigned DNA
gggcggaagctggagcgaggctgaacgcctgacgtcaaggcgacatcgccaaacctcgcccagattcaggcgtgtaaaccagccggagcggcgcggcagcggcaggaccgccgtggcgcctagagtagcgacccggggggagcgcggggcgacgctggctgcagggacccggtgacagcgtgagaggttcgcagagtactaggttttgacaagcttgcatcatgcgtgagtataagctagtcgttcttggctcaggaggcgttggaaagtctgctttgactgtacaatttgttcaaggaatttttgtagaaaaatacgatcctacgatagaagattcttatagaaagcaagttgaagtagatgcacaacagtgtatgcttgaaatcttggatactgcaggaacggagcaatttacagcaatgagggatttatacatgaaaaatggacaaggatttgcattagtttattccatcacagcacagtccacatttaacgatttacaagacctgagagaacagattcttcgagttaaagacactgatgatgttccaatgattcttgttggtaataagtgtgacttggaagatgaaagagttgtagggaaggaacaaggtcaaaatctagcaagacaatggaacaactgtgcattcttagaatcttctgcaaaatcaaaaataaatgttaatgagatcttttatgacctagtgcggcaaattaacagaaaaactccagtgcctgggaaggctcgcaaaaagtcatcatgtcagctgctttaatatactaaatgcattgtagctctgagccaggtctgaagaactgttgcccaattcaacagtgccagcattccaactttgttaaacctaccaacatcttaaatggactttcctgtggtggtaccctttaagaggcggatgaaagctactatatcagtttgcacattctaatcactttccagtatcacaagagagatttttacttatataatagtcctagagtttgcagctggtaaaaccagaggctacatccagtattactgctaagagacattcttcatccaccaatgttgtacatgtatgaaaatggtgtactgtatactttaacatgccccatactttgtattggagagtacaataatgtaaatcctaaaagcaccactattttagcataataaaagaaagtccaaagagctcctatatagactactccagataacttcgcttctttgatacttgtagcttattgtaattttttttaagaaattcaaggtcattattattgtacaaaataagcgctttgattaacacagctatatagtttttttaatttttaaaaaacctgtggagacggtgatcttgtctttaaaacatgatagtcctttcagtataatgtcttagattaaagacgttgcctttaatatctgttgggaaggaaatgtccagacttttcaaatctcttattatatgtttcctttttttgtttacatagggaacaatgtttatagtcgtgtgtacagtgggggtctacaacaagaagtgtatattttcaaacaattttttaatgatttaacaatttttgtaaatcattttcaggcttctgcagctgtagattctcactgtgaatcccttgcttgctcatgcataagtgtatttgcaataccaaatatacaggtttagtatttttgcctgttagtgattgtttcacatgtgtaacgttttggttgagatgttaaatggtggacgagtactgtggatgtgaatgtgggaagtaattttaatcatatgtaattggtcacaaggcctaatttgcagtaactattgctgttttatttaacaatgccttgttgctttgtatgcattaatgtttggatgtaaagattgtgtgtctatccaacagggagccacagtatttaaattgaccaacctaatgttacaactactttgaggtggccaaatgtaaactaaaagccttaattaaagtggtgcaattttgtataacttagcatcagtagttcaataaatttggattgccatgcaagggcttgcattataa

SEQ ID NO: 25501 - DNA, 468 bp, Homo sapiens
  source 1..468: mol_type = unassigned DNA
aaacctcgcccagattcaggcgtgtaaaccagccggagcggcgcggcagcggcaggaccgccgtggcgcctagagtagcgacccggggggagcgcggggcgacgctggctgcagggacccggtgacagcgtgagaggttcgcagagcatggtggtgtgttcctgtagtcccagctactcgggaggctgagcaggagaatcgctggaacctggcaggcagaacttgcagtgagctgagatcgtgccactgcactccagcctaggcgacagagtgagactccgtctcaaacaacaacaacaacaaaagctcctcgatggaaccatttgatagtgacaaggattgaagtactaggttttgacaagcttgcatcatgcgtgagtataagctagtcgttcttggctcaggaggcgttggaaagtctgctttgactgtacaatttgttcaaggaatttttgtagaaaaatacga

SEQ ID NO: 25502 - DNA, 1466 bp, Homo sapiens
  source 1..1466: mol_type = unassigned DNA
aaacctcgcccagattcaggcgtgtaaaccagccggagcggcgcggcagcggcaggaccgccgtggcgcctagagtagcgacccggggggagcgcggggcgacgctggctgcagggacccggtgacagcgtgagaggtactaggttttgacaagcttgcatcatgcgtgagtataagctagtcgttcttggctcaggaggcgttggaaagtctgctttggagcaatttacagcaatgagggatttatacatgaaaaatggacaaggatttgcattagtttattccatcacagcacagtccacatttaacgatttacaagacctgagagaacagattcttcgagttaaagacactgatgatgttccaatgattcttgttggtaataagtgtgacttggaagatgaaagagttgtagggaaggaacaaggtcaaaatctagcaagacaatggaacaactgtgcattcttagaatcttctgcaaaatcaaaaataaatgttaatgagatcttttatgacctagtgcggcaaattaacagaaaaactccagtgcctgggaaggctcgcaaaaagtcatcatgtcagctgctttaatatactaaatgcattgtagctctgagccaggtctgaagaactgttgcccaattcaacagtgccagcattccaactttgttaaacctaccaacatcttaaatggactttcctgtggtggtaccctttaagaggcggatgaaagctactatatcagtttgcacattctaatcactttccagtatcacaagagagatttttacttatataatagtcctagagtttgcagctggtaaaaccagaggctacatccagtattactgctaagagacattcttcatccaccaatgttgtacatgtatgaaaatggtgtactgtatactttaacatgccccatactttgtattggagagtacaataatgtaaatcctaaaagcaccactattttagcataataaaagaaagtccaaagagctcctatatagactactccagataacttcgcttctttgatacttgtagcttattgtaattttttttaagaaattcaaggtcattattattgtacaaaataagcgctttgattaacacagctatatagtttttttaatttttaaaaaacctgtggagacggtgatcttgtctttaaaacatgatagtcctttcagtataatgtcttagattaaagacgttgcctttaatatctgttgggaaggaaatgtccagacttttcaaatctcttattatatgtttcctttttttgtttacatagggaacaatgtttatagtcgtgtgtacagtgggggtctacaacaagaagtgtatattttcaaacaattttttaatgatttaacaatttttgtaaatcattttcaggcttctgcagctgtagattctcactgtgaatcccttgcttgctcatgcataagtgtatttgc

SEQ ID NO: 25503 - DNA, 530 bp, Homo sapiens
  source 1..530: mol_type = unassigned DNA
aggcgtgtaaaccagccggagcggcgcggcagcggcaggaccgccgtggcgcctagagtagcgacccggggggagcgcggggcgacgctggctgcagggacccggtgacagcgtgagaggttcgcagagttttgacaagcttgcatcatgcgtgagtataagctagtcgttcttggctcaggaggcgttggaaagtctgctttgactgtacaatttgttcaaggaatttttgtagaaaaatacgatcctacgatagaagattcttatagaaagcaagttgaagtagatgcacaacagtgtatgcttgaaatcttggatactgcaggaacggagcaatttacagcaatgagggatttatacatgaaaaatggacaaggatttgcattagtttattccatcacagcacagtccacatttaacgatttacaagacctgagagaacagattcttcgagttaaagacactgatgatgttccaatgattcttgttggtaataagtgtgacttggaagatgaaagagttgtagggaa

SEQ ID NO: 25504 - DNA, 1942 bp, Homo sapiens
  source 1..1942: mol_type = unassigned DNA
accagccggagcggcgcggcagcggcaggaccgccgtggcgcctagagtagcgacccggggggagcgcggggcgacgctggctgcagggacccggtgacagcgtgagaggtactaggttttgacaagcttgcatcatgcgtgagtataagctagtcgttcttggctcaggaggcgttggaaagtctgctttgactgtacaatttgttcaaggaatttttgtagaaaaatacgatcctacgatagaagattcttatagaaagcaagttgaagtagatgcacaacagtgtatgcttgaaatcttggatactgcaggaacggagcaatttacagcaatgagggatttatacatgaaaaatggacaaggatttgcattagtttattccatcacagcacagtccacatttaacgatttacaagacctgagagaacagattcttcgagttaaagacactgatgatgttccaatgattcttgttggtaataagtgtgacttggaagatgaaagagttgtagggaaggaacaaggtcaaaatctagacaatggaacaactgtgcattcttagaatcttctgcaaaatcaaaaataaatgttaatgagatcttttatgacctagtgcggcaaattaacagaaaaactccagtgcctgggaaggctcgcaaaaagtcatcatgtcagctgctttaatatactaaatgcattgtagctctgagccaggtctgaagaactgttgcccaattcaacagtgccagcattccaactttgttaaacctaccaacatcttaaatggactttcctgtggtggtaccctttaagaggcggatgaaagctactatatcagtttgcacattctaatcactttccagtatcacaagagagatttttacttatataatagtcctagagtttgcagctggtaaaaccagaggctacatccagtattactgctaagagacattcttcatccaccaatgttgtacatgtatgaaaatggtgtactgtatactttaacatgccccatactttgtattggagagtacaataatgtaaatcctaaaagcaccactattttagcataataaaagaaagtccaaagagctcctatatagactactccagataacttcgcttctttgatacttgtagcttattgtaattttttttaagaaattcaaggtcattattattgtacaaaataagcgctttgattaacacagctatatagtttttttaatttttaaaaaacctgtggagacggtgatcttgtctttaaaacatgatagtcctttcagtataatgtcttagattaaagacgttgcctttaatatctgttgggaaggaaatgtccagacttttcaaatctcttattatatgtttcctttttttgtttacatagggaacaatgtttatagtcgtgtgtacagtgggggtctacaacaagaagtgtatattttcaaacaattttttaatgatttaacaatttttgtaaatcattttcaggcttctgcagctgtagattctcactgtgaatcccttgcttgctcatgcataagtgtatttgcaataccaaatatacaggtttagtatttttgcctgttagtgattgtttcacatgtgtaacgttttggttgagatgttaaatggtggacgagtactgtggatgtgaatgtgggaagtaattttaatcatatgtaattggtcacaaggcctaatttgcagtaactattgctgttttatttaacaatgccttgttgctttgtatgcattaatgtttggatgtaaagattgtgtgtctatccaacagggagccacagtatttaaattgaccaacctaatgttacaactactttgaggtggccaaatgtaaactaaaagccttaattaaagtggtgcaattttgtataacttagcatcagtagttcaataaatttggattgccatgc

SEQ ID NO: 25505 - DNA, 312 bp, Homo sapiens
  source 1..312: mol_type = unassigned DNA
aaaccagccggagcggcgcggcagcggcaggaccgccgtggcgcctagagtagcgacccggggggagcgcggggcgacgctggctgcagggacccggtgacagcgtgagagaattctttttttttttttcctttaataaggtactaggttttgacaagcttgcatcatgcgtgagtataagctagtcgttcttggctcaggaggcgttggaaagtctgctttgactgtacaatttgttcaaggaatttttgtagaaaaatacgatcctacgatagaagattcttatagaaagcaagttgaagtagatgcaca

SEQ ID NO: 25506 - DNA, 561 bp, Homo sapiens
  source 1..561: mol_type = unassigned DNA
aaacctcgcccagattcaggcgtgtaaaccagccggagcggcgcggcagcggcaggaccgccgtggcgcctagagtagcgacccggggggagcgcggggcgacgctggctgcagggacccggtgacagcgtgagagaccagacacggtggctcacgtctgtaatcccagcactttgggaggccaaggcaggcagagcactttgggaggccagggcgggcggatcacttgaggccagaagttcgagaccagtctggccaacatggtgaaaccccatctttactaaaaatatgaaaattagccaggcatggtggtgtgttcctgtagtcccagctactcgggaggctgagcaggagaatcgctggaacctggcaggcagaacttgcagtgagctgagatcgtgccactgcactccagcctaggcgacagagtgagactccgtctcaaacaacaacaacaacaaaagctcctcgatggaaccatttgatagtgacaaggattgaagtactaggttttgacaagcttgcatcatgcgtgagtataagctagtcgttcttggctca

SEQ ID NO: 25507 - DNA, 606 bp, Homo sapiens
  source 1..606: mol_type = unassigned DNA
aggcgtgtaaaccagccggagcggcgcggcagcggcaggaccgccgtggcgcctagagtagcgacccggggggagcgcggggcgacgctggctgcagggacccggtgacagcgtgagaggcatggtggtgtgttcctgtagtcccagctactcgggaggctgagcaggagaatcgctggaacctggcaggcagaacttgcagtgagctgagatcgtgccactgcactccagcctaggcgacagagtgagactccgtctcaaacaacaacaacaacaaaagctcctcgatggaaccatttgatagtgacaaggattgaagtactaggttttgacaagcttgcatcatgcgtgagtataagctagtcgttcttggctcaggaggcgttggaaagtctgctttgactgtacaatttgttcaaggaatttttgtagaaaaatacgatcctacgatagaagattcttatagaaagcaagttgaagtagatgcacaacagtgtatgcttgaaatcttggatactgcaggaacggagcaatttacagcaatgagggatttatacatgaaaaatggacaaggatttgcattagtttattccatcacagcacagt

SEQ ID NO: 25508 - DNA, 1072 bp, Homo sapiens
  source 1..1072: mol_type = unassigned DNA
aaacctcgcccagattcaggcgtgtaaaccagccggagcggcgcggcagcggcaggaccgccgtggcgcctagagtagcgacccggggggagcgcggggcgacgctggctgcagggacccggtgacagcgtgagagccaggcatggtggtgtgttcctgtagtcccagctactcgggaggctgagcaggagaatcgctggaacctggcaggcagaacttgcagtgagctgagatcgtgccactgcactccagcctaggcgacagagtgagactccgtctcaaacaacaacaacaacaaaagctcctcgatggaaccatttgatagtgacaaggattgaagtactaggttttgacaagcttgcatcatgcgtgagtataagctagtcgttcttggctcaggaggcgttggaaagtctgctttgactgtacaatttgttcaaggaatttttgtagaaaaatacgatcctacgatagaagattcttatagaaagcaagttgaagtagatgcacaacagtgtatgcttgaaatcttggatactgcaggaacggagcaatttacagcaatgagggatttatacatgaaaaatggacaaggatttgcattagtttattccatcacagcacagtccacatttaacgatttacaagacctgagagaacagattcttcgagttaaagacactgatgatgttccaatgattcttgttggtaataagtgtgacttggaagatgaaagagttgtagggaaggaacaaggtcaaaatctagcaagacaatggaacaactgtgcattcttagaatcttctgcaaaatcaaaaataaatgttaatgagatcttttatgacctagtgcggcaaattaacagaaaaactccagtgcctgggaaggctcgcaaaaagtcatcatgtcagctgctttaatatactaaatgcattgtagctctgagccaggtctgaagaactgttgcccaattcaacagtgccagcattccaactttgttaaacctaccaacatcttaaatggactttcctgtggtggtaccctttaagaggcggatgaaagctactatatc

SEQ ID NO: 25509 - DNA, 591 bp, Homo sapiens
  source 1..591: mol_type = unassigned DNA
aaacctcgcccagattcaggcgtgtaaaccagccggagcggcgcggcagcggcaggaccgccgtggcgcctagagtagcgacccggggggagcgcggggcgacgctggctgcagggacccggtgacagcgtgagaggttcgcagaggtctcacttgtcacccaggctggagtgcagtggcacaaacatgggtcactgcagcctcgactcctgggctcgagtgatgctcccacctcagcctctcaagtagctgggactacaggtactaggttttgacaagcttgcatcatgcgtgagtataagctagtcgttcttggctcaggaggcgttggaaagtctgctttgactgtacaatttgttcaaggaatttttgtagaaaaatacgatcctacgatagaagattcttatagaaagcaagttgaagtagatgcacaacagtgtatgcttgaaatcttggatactgcaggaacggagcaatttacagcaatgagggatttatacatgaaaaatggacaaggatttgcattagtttattccatcacagcacagtccacatttaacgatttacaagacctgagagaacagattcttc

SEQ ID NO: 25510 - DNA, 550 bp, Homo sapiens
  source 1..550: mol_type = unassigned DNA
agccggagcggcgcggcagcggcaggaccgccgtggcgcctagagtagcgacccggggggagcgcggggcgacgctggctgcagggacccggtgacagcgtgagaggttcgcagagagctctcaacttaatcatccttcagcaaaaaagaattaagactagccaggcatggtggtgtgttcctgtagtcccagctactcgggaggctgagcaggagaatcgctggaacctggcaggcagaacttgcagtgagctgagatcgtgccactgcactccagcctaggcgacagagtgagactccgtctcaaacaacaacaacaacaaaagctcctcgatggaaccatttgatagtgacaaggattgaagtactaggttttgacaagcttgcatcatgcgtgagtataagctagtcgttcttggctcaggaggcgttggaaagtctgctttgactgtacaatttgttcaaggaatttttgtagaaaaatacgatcctacgatagaagattcttatagaaagcaagttgaagtagatgcacaacagtgtatgcttg

SEQ ID NO: 25511 - DNA, 977 bp, Homo sapiens
  source 1..977: mol_type = unassigned DNA
gtgtaaaccagccggagcggcgcggcagcggcaggaccgccgtggcgcctagagtagcgacccggggggagcgcggggcgacgctggctgcagggacccggtgacagcgtgagaggttcgcagagtactaggttttgacaagcttgcatcatgcgtgagtataagctagtcgttcttggctcaggaggcgttggaaagtctgctttggagcaatttacagcaatgagggatttatacatgaaaaatggacaaggatttgcattagtttattccatcacagcacagtccacatttaacgatttacaagacctgagagaacagattcttcgagttaaagacactgatgatgttccaatgattcttgttggtaataagtgtgacttggaagatgaaagagttgtagggaaggaacaaggtcaaaatctagcaagacaatggaacaactgtgcattcttagaatcttctgcaaaatcaaaaataaatgttaatgagatcttttatgacctagtgcggcaaattaacagaaaaactccagtgcctgggaaggctcgcaaaaagtcatcatgtcagctgctttaatatactaaatgcattgtagctctgagccaggtctgaagaactgttgcccaattcaacagtgccagcattccaactttgttaaacctaccaacatcttaaatggactttcctgtggtggtaccctttaagaggcggatgaaagctactatatcagtttgcacattctaatcactttccagtatcacaagagagatttttacttatataatagtcctagagtttgcagctggtaaaaccagaggctacatccagtattactgctaagagacattcttcatccaccaatgttgtacatgtatgaaaatggtgtactgtatactttaacatgccccatactttgtattggagagtacaataatgtaaatcctaaaagcaccactattttagcataataaaag

SEQ ID NO: 25512 - DNA, 1264 bp, Homo sapiens
  source 1..1264: mol_type = unassigned DNA
aggcgtgtaaaccagccggagcggcgcggcagcggcaggaccgccgtggcgcctagagtagcgacccggggggagcgcggggcgacgctggctgcagggacccggtgacagcgtgagaggtactaggttttgacaagcttgcatcatgcgtgagtataagctagtcgttcttggctcaggaggcgttggaaagtctgctttgactgtacaatttgttcaaggaatttttgtagaaaaatacgatcctacgatagaagattcttatagaaaggagcaatttacagcaatgagggatttatacatgaaaaatggacaaggatttgcattagtttattccatcacagcacagtccacatttaacgatttacaagacctgagagaacagattcttcgagttaaagacactgatgatgttccaatgattcttgttggtaataagtgtgacttggaagatgaaagagttgtagggaaggaacaaggtcaaaatctagcaagacaatggaacaactgtgcattcttagaatcttctgcaaaatcaaaaataaatgttaatgagatcttttatgacctagtgcggcaaattaacagaaaaactccagtgcctgggaaggctcgcaaaaagtcatcatgtcagctgctttaatatactaaatgcattgtagctctgagccaggtctgaagaactgttgcccaattcaacagtgccagcattccaactttgttaaacctaccaacatcttaaatggactttcctgtggtggtaccctttaagaggcggatgaaagctactatatcagtttgcacattctaatcactttccagtatcacaagagagatttttacttatataatagtcctagagtttgcagctggtaaaaccagaggctacatccagtattactgctaagagacattcttcatccaccaatgttgtacatgtatgaaaatggtgtactgtatactttaacatgccccatactttgtattggagagtacaataatgtaaatcctaaaagcaccactattttagcataataaaagaaagtccaaagagctcctatatagactactccagataacttcgcttctttgatacttgtagcttattgtaattttttttaagaaattcaaggtcattattattgtacaaaataagcgctttgattaacacagctatatagtttttttaatttttaaaaaacctgtggagacggtgatcttgtctttaaaacatgatagtcctttcagtataatgtcttagatt

SEQ ID NO: 25513 - DNA, 571 bp, Homo sapiens
  source 1..571: mol_type = unassigned DNA
gtgtaaaccagccggagcggcgcggcagcggcaggaccgccgtggcgcctagagtagcgacccggggggagcgcggggcgacgctggctgcagggacccggtgacagcgtgagaggttcgcagagtgagtactaggttttgacaagcttgcatcatgcgtgagtataagctagtcgttcttggctcaggaggcgttggaaagtctgctttgactgtacaatttgttcaaggaatttttgtagaaaaatacgatcctacgatagaagattcttatagaaagcaagttgaagtagatgcacaacagtgtatgcttgaaatcttggatactgcaggaacggagcaatttacagcaatgagggatttatacatgaaaaatggacaaggatttgcattagtttattccatcacagcacagtccacatttaacgatttacaagacctgagagaacagattcttcgagttaaagacactgatgatgttccaatgattcttgttggtaataagtgtgacttggaagatgaaagagttgtagggaaggaacaaggtcaaaatctagcaagacaatggaac

SEQ ID NO: 25514 - DNA, 561 bp, Homo sapiens
  source 1..561: mol_type = unassigned DNA
aaacctcgcccagattcaggcgtgtaaaccagccggagcggcgcggcagcggcaggaccgccgtggcgcctagagtagcgacccggggggagcgcggggcgacgctggctgcagggacccggtgacagcgtgagagacagggtctcacttgtcacccaggctggagtgcagtggcacaaacatgggtcactgcagcctcgactcctgggctcgagtgatgctcccacctcagcctctcaagtagctgggactacaggtactaggttttgacaagcttgcatcatgcgtgagtataagctagtcgttcttggctcaggaggcgttggaaagtctgctttgactgtacaatttgttcaaggaatttttgtagaaaaatacgatcctacgatagaagattcttatagaaagcaagttgaagtagatgcacaacagtgtatgcttgaaatcttggatactgcaggaacggagcaatttacagcaatgagggatttatacatgaaaaatggacaaggatttgcattagtttattccatcacagcacagtccacatttaacgattta

SEQ ID NO: 25515 - DNA, 480 bp, Homo sapiens
  source 1..480: mol_type = unassigned DNA
agccggagcggcgcggcagcggcaggaccgccgtggcgcctagagtagcgacccggggggagcgcggggcgacgctggctgcagggacccggtgacagcgtgagaggttcgcagaccaggcatggtggtgtgttcctgtagtcccagctactcgggaggctgagcaggagaatcgctggaacctggcaggcagaacttgcagtgagctgagatcgtgccactgcactccagcctaggcgacagagtgagactccgtctcaaacaacaacaacaacaaaagctcctcgatggaaccatttgatagtgacaaggattgaagaatgtaggagccttttattctcatgtaatgcccccaccctggaatccttgaagaccttctgtctattgttcatatactgaaattttataatgataagccttggtactaggttttgacaagcttgcatcatgcgtgagtataagctagtcgttcttggctca

SEQ ID NO: 25516 - DNA, 633 bp, Homo sapiens
  source 1..633: mol_type = unassigned DNA
agattcaggcgtgtaaaccagccggagcggcgcggcagcggcaggaccgccgtggcgcctagagtagcgacccggggggagcgcggggcgacgctggctgcagggacccgccaggcatggtggtgtgttcctgtagtcccagctactcgggaggctgagcaggagaatcgctggaacctggcaggcagaacttgcagtgagctgagatcgtgccactgcactccagcctaggcgacagagtgagactccgtctcaaacaacaacaacaacaaaagctcctcgatggaaccatttgatagtgacaaggattgaagtactaggttttgacaagcttgcatcatgcgtgagtataagctagtcgttcttggctcaggaggcgttggaaagtctgctttgactgtacaatttgttcaaggaatttttgtagaaaaatacgatcctacgatagaagattcttatagaaagcaagttgaagtagatgcacaacagtgtatgcttgaaatcttggatactgcaggaacggagcaatttacagcaatgagggatttatacatgaaaaatggacaaggatttgcattagtttattccatcacagcacagtccacatttaacgatttacaagacctgagagaa

SEQ ID NO: 25517 - DNA, 1060 bp, Homo sapiens
  source 1..1060: mol_type = unassigned DNA
gtgtaaaccagccggagcggcgcggcagcggcaggaccgccgtggcgcctagagtagcgacccggggggagcgcggggcgacgctggctgcagggacccggtgacagcgtgagaggtactaggttttgacaagcttgcatcatgcgtgagtataagctagtcgttcttggctcaggaggcgttggaaagtctgctttgactgtacaatttgttcaaggaatttttgtagaaaaatacgatcctacgatagaagattcttatagaaagcaagttgaagtagatgcacaacagtgtatgcttgaaatcttggatactgcaggaacggttccaatgattcttgttggtaataagtgtgacttggaagatgaaagagttgtagggaaggaacaaggtcaaaatctagcaagacaatggaacaactgtgcattcttagaatcttctgcaaaatcaaaaataaatgttaatgagatcttttatgacctagtgcggcaaattaacagaaaaactccagtgcctgggaaggctcgcaaaaagtcatcatgtcagctgctttaatatactaaatgcattgtagctctgagccaggtctgaagaactgttgcccaattcaacagtgccagcattccaactttgttaaacctaccaacatcttaaatggactttcctgtggtggtaccctttaagaggcggatgaaagctactatatcagtttgcacattctaatcactttccagtatcacaagagagatttttacttatataatagtcctagagtttgcagctggtaaaaccagaggctacatccagtattactgctaagagacattcttcatccaccaatgttgtacatgtatgaaaatggtgtactgtatactttaacatgccccatactttgtattggagagtacaataatgtaaatcctaaaagcaccactattttagcataataaaagaaagtccaaagagctcctatatagactactccagataacttcgcttctttgatacttgtagcttattgtaattttttttaagaaattcaaggtcattattattgtac

SEQ ID NO: 25518 - DNA, 874 bp, Homo sapiens
  source 1..874: mol_type = unassigned DNA
agattcaggcgtgtaaaccagccggagcggcgcggcagcggcaggaccgccgtggcgcctagagtagcgacccggggggagcgcggggcgacgctggctgcagggacccggtgacagcgtgagaggagcaatttacagcaatgagggatttatacatgaaaaatggacaaggatttgcattagtttattccatcacagcacagtccacatttaacgatttacaagacctgagagaacagattcttcgagttaaagacactgatgatgttccaatgattcttgttggtaataagtgtgacttggaagatgaaagagttgtagggaaggaacaaggtcaaaatctagcaagacaatggaacaactgtgcattcttagaatcttctgcaaaatcaaaaataaatgttaatgagatcttttatgacctagtgcggcaaattaacagaaaaactccagtgcctgggaaggctcgcaaaaagtcatcatgtcagctgctttaatatactaaatgcattgtagctctgagccaggtctgaagaactgttgcccaattcaacagtgccagcattccaactttgttaaacctaccaacatcttaaatggactttcctgtggtggtaccctttaagaggcggatgaaagctactatatcagtttgcacattctaatcactttccagtatcacaagagagatttttacttatataatagtcctagagtttgcagctggtaaaaccagaggctacatccagtattactgctaagagacattcttcatccaccaatgttgtacatgtatgaaaatggtgtactgtatactttaacatgccccatactttgtattggagagtacaataatgtaaatcctaaaagcacc

SEQ ID NO: 25519 - DNA, 640 bp, Homo sapiens
  source 1..640: mol_type = unassigned DNA
tcgcccagattcaggcgtgtaaaccagccggagcggcgcggcagcggcaggaccgccgtggcgcctagagtagcgacccggggggagcgcggggcgacgctggctgcagggacccggtgacagcgtgagagggtctcacttgtcacccaggctggagtgcagtggcacaaacatgggtcactgcagcctcgactcctgggctcgagtgatgctcccacctcagcctctcaagtagctgggactacaggtactaggttttgacaagcttgcatcatgcgtgagtataagctagtcgttcttggctcaggaggcgttggaaagtctgctttgactgtacaatttgttcaaggaatttttgtagaaaaatacgatcctacgatagaagattcttatagaaagcaagttgaagtagatgcacaacagtgtatgcttgaaatcttggatactgcaggaacggagcaatttacagcaatgagggatttatacatgaaaaatggacaaggatttgcattagtttattccatcacagcacagtccacatttaacgatttacaagacctgagagaacagattcttcgagttaaagacactgatgatgttccaatgattcttgttggtaataagtgtgacttggaagatg

SEQ ID NO: 25520 - DNA, 545 bp, Homo sapiens
  source 1..545: mol_type = unassigned DNA
aggaccgccgtggcgcctagagtagcgacccggggggagcgcggggcgacgctggctgcagggacccggtgacagcgtgagaggttcgcagaccaggcatggtggtgtgttcctgtagtcccagctactcgggaggctgagcaggagaatcgctggaacctggcaggcagaactttgcagtggcacaaacatgggtcactgcagcctcgactcctgggctcgagtgatgctcccacctcagcctctcaagtagctgggactacaggtactaggttttgacaagcttgcatcatgcgtgagtataagctagtcgttcttggctcaggaggcgttggaaagtctgctttgactgtacaatttgttcaaggaatttttgtagaaaaatacgatcctacgatagaagattcttatagaaagcaagttgaagtagatgcacaacagtgtatgcttgaaatcttggatactgcaggaacggagcaatttacagcaatgagggatttatacatgaaaaatggacaaggatttgcattagtttattccatcac

SEQ ID NO: 25521 - DNA, 4349 bp, Homo sapiens
  source 1..4349: mol_type = unassigned DNA
tcgccctcagtcccacccggtgcctacggggccgcatcgccgcccggctcggcccggcccatgcccagggccgctgctccctcagttgccgccgccgccgccggcgcccagggggccgccgcggctgtgaggtgggggcggcagcgggaggcggcggggcgggccgccggggccggggctgggggcgcagcgcggccggcgtaggtctatgtcgcgggcggcggcggcggcggcggccgcggagggacgatgcgcgagtacaaagtggtggtgctgggctcgggcggggtaggcaaatccgccctgaccgtgcagttcgtgaccggcaccttcatcgagaaatacgaccccaccatcgaggacttctaccgcaaggagatcgaggtggattcgtcgccgtcggtgctggagatcctggacacggcgggcaccgagcagttcgcgtccatgcgggacctgtacatcaagaacggccagggcttcatcctcgtctacagcctcgtcaaccagcagagcttccaggacatcaagcccatgcgggaccagatcatccgcgtgaagcggtatgagaaagtgccagtcatcttggttgggaacaaagtggacctggaaagtgagagagaagtatcgtccagcgaaggcagagcccttgctgaagagtggggctgcccctttatggaaacttccgctaagagtaaaacaatggtggacgaactctttgcagaaattgtgaggcagatgaactatgctgctcagcctgacaaagatgacccatgctgttctgcatgtaacatacaatagcatccaaatatggctgtcctggatgggatttgcccaatgtcgtaggtgatagaaaactcgcctactccactgcagaacttgcagaatgcgtggtgttaatctacagagaactgcagcccttattcagaattgagcagtgattgtcagttgatatctctgagtaacatttgggttcagtaactacagttttcaccatttgtcctcagtctcctttatgcatctgcaactttaaggcatagtccatcgatctacagggtgatctcatttgaaagctatgatggcattgtcgctgagttgacagaagcaactattgtacaaattaaaaataaccataagggagaaaccagaagaattcctctgaccacttacaattaaaatattttgtcttctttaaaaaaataagtaaaggagaaatattttcctacaagagtactgaatttcaggaaatgggatagagcttctaaccaatgtattccgtcaagtaagataataacagctgacctgccaacagcattacagggagattctttgctcagctaacacatttctgtttttcaaaattgatgcttaattgtagctgttattctaatttgtgacatggaactaactcatgcttcaatccttgatagagcaaaactcagaacaggttatgtaaaaatatagtctggctttagaatttgttaattcacctgctttgccacagaaaatggaggctttcacaagggtttgatcagaattaaaaccccaaacccgccctctgttaggggtggtctttataactttactgaacaagagggaagcaactgtgatgggaagagattacctagccttactaacaagaagcattctaatagataaactagtaccatcatgtaaggaagatgaagccatgttgcatccacatgttcccgtttgcagaaacctcacaggacagtacgaatatctggcatttttaagttcattaaagcagcaaattccttctcgcctttaagggctatggttgtagtgtgacccgtggctaacctgctttcaaaatcaagtatttgctgtagcagagctttattgcaggcattttaaaaattgaataaccatgtgaaataatttgggcttaaaagtgaacataaattatagagtggaaggtaagggacaaaagccttttacctttaattttcctggagaattatataaaggttttcttagaacaattttgccctgattactgaagcgtcaaataaagctggagtgaaaattttgttttgaaaaggtgctcaagctctgacatttttggttttcatagtcgtgaagtatttatcatttgcatgactaatggcacaggaaaaacctattcataagttttacaatcaagtatagaggggtcttcagctaacttagttatacataaatgctgaaaagattatcttgagctgggccttgggagaagaatttggccttcagaactgcaatatcactgagcctgcgatctatacaccaccccacattttgttggtttcacagtcttgtgcaagtaacctctggtcttacgtgtgtaactgagagaagagtgtgtgtttgtgtgtgcatgtgtgtttattgttcctaagaatttggcacaagtcagagataattgcctatactaagaatctatactgcagaatatagtgtatcaaaaacttttttcttttaaattattaaagtgtcttttatacttttatgaaatcattggtagccccccaagtgtttaataactggcattaagcttagagggtgaaaaaaaaaaaaaagattgatagtatttttcataatgaaaaaactgaagagatacgtgaatgaaaccaggccatagctgtcataaatctttgacttttgaatatttacattcttcagtataattttttataatcctcaattatgaaccaccttgtttataggacaaaaaaatttaaccaattttattgaaacgaatttcactgtgtaaaagttggtttgattcaaacatgtagagaagttgtagattcaagatatatgatttctctatggaaataaaaatatttgttagtgaattggttgagttttgattcctctaacttctcagaatgattctttagaattctataattcatagcaatttttgacaagtaagattgcaaaatagaaatatctataaagattccacagtttgacattatggcttgctatgcagatgtgaaaataggttaaataatatgaaagatatggcagaatgtaaagtggaaaagatgacctaaaattttgagttgtattaatagttaaaaacatttgtgtcagatgacagggtgggcttttactgtcaagacatgaataagaactgatctggctgcctgatgagtgtttccacgcagccctgcatatttagtgaccaaggcatcaaggacatcccgaaactggaaattcatatccatctggtatgaatatataactcagctggcaaatgaatgtgtttgttgagatattacagtaataaaacacttaagaacaggaagattacatttgttggcatacgaaaccttagtggctacagaagaaagttgaccttgtgtcactatttattttatgccctgatcagactagcaacttagataagtgaaagtttttctaacatgccttaaaaatattatggtttgatccaaagacccactttttctttagctcttgtgataagattttcttttttttacttttatacaaaggcagcatctttgaatttttttttcttttgatgttgcaacttttgggttcttttaaactgtgatagtgatggtaactgatgcctttcattttgttcaacttatacaaaacaagccagcatctgatcaaaagtattacataaaatattttcttaaactattgaaaggtgctttgatgattttctcctttggtttgtagaattaggactgaacttttgactcaaattgctacagttgccatcacctttctgtggtaatactactgatatttgcttttctatataaagaaatgttgcctaaggctgtctggtatttcttttcaagggttttccagtatgaatgttaatgttgtcagtgtatgtatgaatatgaaagtgctttgttttgtttgttgctgttttttgtttatgtgtgtgtttttaatttttttgttcttatcagcagtcttgtgttagcactgggtaagctttaattgtcccttagccaatcaaacattaaggactatggaggtctttttttttttatttaacatgtcattgttcatctattaaatcttgatcagggtttcaagaatgactgcagtgggttttggaaacagacttatcattattgatttgaggtttcccagagatatagttcacagttaattgttgcgctctaatacaactgaccatttaaaattgaacaagtttattgttttgtaacaatgtcagttgttaaaccttgacatttcaattaaaacatgaattgtagttataactcaatgcaaattcaacagttgtatttggagttaaattattttaacaaataaatttatttaatgaa

SEQ ID NO: 25522 - DNA, 1951 bp, Homo sapiens
  source 1..1951: mol_type = unassigned DNA
ccatctgtctgatcaccttggactccatagtacactggggcaaagcacagccccagtttctggaggcagatgggtaaccaggaaaaggcatgaatgagggggccccaggagacagtgacttagagactgaggcaagagtgccgtggtcaatcatgggtcattgtcttcgaactggacaggccagaatgtctgccacacccacacctgcaggtgaaggagccagaagggatgaactttttgggattctccaaatactccatcagtgtatcctgtcttcaggtgatgcttttgttcttactggcgtctgttgttcctggaggcagaatggcaagccaccatattcacaaaaggaagataaggaagtacaaactggatacatgaatgctcaaattgaaattattccatgcaagatctgtggagacaaatcatcaggaatccattatggtgtcattacatgtgaaggctgcaagggctttttcaggagaagtcagcaaagcaatgccacctactcctgtcctcgtcagaagaactgtttgattgatcgaaccagtagaaaccgctgccaacactgtcgattacagaaatgccttgccgtagggatgtctcgagatgctgtaaaatttggccgaatgtcaaaaaagcagagagacagcttgtatgcagaagtacagaaacaccggatgcagcagcagcagcgcgaccaccagcagcagcctggagaggctgagccgctgacgcccacctacaacatctcggccaacgggctgacggaacttcacgacgacctcagtaactacattgacgggcacacccctgaggggagtaaggcagactccgccgtcagcagcttctacctggacatacagccttccccagaccagtcaggtcttgatatcaatggaatcaaaccagaaccaatatgtgactacacaccagcatcaggcttctttccctactgttcgttcaccaacggcgagacttccccaactgtgtccatggcagaattagaacaccttgcacagaatatatctaaatcgcatctggaaacctgccaatacttgagagaagagctccagcagataacgtggcagacctttttacaggaagaaattgagaactatcaaaacaagcagcgggaggtgatgtggcaattgtgtgccatcaaaattacagaagctatacagtatgtggtggagtttgccaaacgcattgatggatttatggaactgtgtcaaaatgatcaaattgtgcttctaaaagcaggttctctagaggtggtgtttatcagaatgtgccgtgcctttgactctcagaacaacaccgtgtactttgatgggaagtatgccagccccgacgtcttcaaatccttaggttgtgaagactttattagctttgtgtttgaatttggaaagagtttatgttctatgcacctgactgaagatgaaattgcattattttctgcatttgtactgatgtcagcagatcgctcatggctgcaagaaaaggtaaaaattgaaaaactgcaacagaaaattcagctagctcttcaacacgtcctacagaagaatcaccgagaagatggaatactaacaaagttaatatgcaaggtgtctaccttaagagccttatgtggacgacatacagaaaagctaatggcatttaaagcaatatacccagacattgtgcgacttcattttcctccattatacaaggagttgttcacttcagaatttgagccagcaatgcaaattgatgggtaaatgttatcacctaagcacttctagaatgtctgaagtacaaacatgaaaaacaaacaaaaaaattaaccgagacactttatatggccctgcacagacctggagcgccacacactgcacatcttttggtgatcggggtcaggcaaaggaggggaaacaatgaaaacaaataaaagttgaacttgtttttctca

SEQ ID NO: 25523 - DNA, 1908 bp, Homo sapiens
  source 1..1908: mol_type = unassigned DNA
ggactccatagtacactggggcaaagcacagccccagtttctggaggcagatgggtaaccaggaaaaggcatgaatgagggggccccaggagacagtgacttagagactgaggcaagagtgccgtggtcaatcatgggtcattgtcttcgaactggacaggccagaatgtctgccacacccacacctgcaggtgaaggagccagaagctcttcaacctgtagctccctgagcaggctgttctggtctcaacttgagcacataaactgggatggagccacagccaagaactttattaatttaagggagttcttctcttttctgctccctgcattgagaaaagctcaaattgaaattattccatgcaagatctgtggagacaaatcatcaggaatccattatggtgtcattacatgtgaaggctgcaagggctttttcaggagaagtcagcaaagcaatgccacctactcctgtcctcgtcagaagaactgtttgattgatcgaaccagtagaaaccgctgccaacactgtcgattacagaaatgccttgccgtagggatgtctcgagatgctgtaaaatttggccgaatgtcaaaaaagcagagagacagcttgtatgcagaagtacagaaacaccggatgcagcagcagcagcgcgaccaccagcagcagcctggagaggctgagccgctgacgcccacctacaacatctcggccaacgggctgacggaacttcacgacgacctcagtaactacattgacgggcacacccctgaggggagtaaggcagactccgccgtcagcagcttctacctggacatacagccttccccagaccagtcaggtcttgatatcaatggaatcaaaccagaaccaatatgtgactacacaccagcatcaggcttctttccctactgttcgttcaccaacggcgagacttccccaactgtgtccatggcagaattagaacaccttgcacagaatatatctaaatcgcatctggaaacctgccaatacttgagagaagagctccagcagataacgtggcagacctttttacaggaagaaattgagaactatcaaaacaagcagcgggaggtgatgtggcaattgtgtgccatcaaaattacagaagctatacagtatgtggtggagtttgccaaacgcattgatggatttatggaactgtgtcaaaatgatcaaattgtgcttctaaaagcaggttctctagaggtggtgtttatcagaatgtgccgtgcctttgactctcagaacaacaccgtgtactttgatgggaagtatgccagccccgacgtcttcaaatccttaggttgtgaagactttattagctttgtgtttgaatttggaaagagtttatgttctatgcacctgactgaagatgaaattgcattattttctgcatttgtactgatgtcagcagatcgctcatggctgcaagaaaaggtaaaaattgaaaaactgcaacagaaaattcagctagctcttcaacacgtcctacagaagaatcaccgagaagatggaatactaacaaagttaatatgcaaggtgtctaccttaagagccttatgtggacgacatacagaaaagctaatggcatttaaagcaatatacccagacattgtgcgacttcattttcctccattatacaaggagttgttcacttcagaatttgagccagcaatgcaaattgatgggtaaatgttatcacctaagcacttctagaatgtctgaagtacaaacatgaaaaacaaacaaaaaaattaaccgagacactttatatggccctgcacagacctggagcgccacacactgcacatcttttggtgatcggggtcaggcaaaggaggggaaacaatgaaaacaaataaaagttgaacttgtttttctca

SEQ ID NO: 25524 - DNA, 10844 bp, Homo sapiens
  source 1..10844: mol_type = unassigned DNA
ttttttttttttttttggtaccatagagttgctctgaaaacagaagatagagggagtctcggagctcgccatctccagcgatctctacattgggaaaaaacatggagtcagctccggcagcccccgaccccgccgccagcgagccaggcagcagcggcgcggacgcggccgccggctccagggagaccccgctgaaccaggaatccgcccgcaagagcgagccgcctgccccggtgcgcagacagagctattccagcaccagcagaggtatctcagtaacgaagaagacacatacatctcaaattgaaattattccatgcaagatctgtggagacaaatcatcaggaatccattatggtgtcattacatgtgaaggctgcaagggctttttcaggagaagtcagcaaagcaatgccacctactcctgtcctcgtcagaagaactgtttgattgatcgaaccagtagaaaccgctgccaacactgtcgattacagaaatgccttgccgtagggatgtctcgagatgctgtaaaatttggccgaatgtcaaaaaagcagagagacagcttgtatgcagaagtacagaaacaccggatgcagcagcagcagcgcgaccaccagcagcagcctggagaggctgagccgctgacgcccacctacaacatctcggccaacgggctgacggaacttcacgacgacctcagtaactacattgacgggcacacccctgaggggagtaaggcagactccgccgtcagcagcttctacctggacatacagccttccccagaccagtcaggtcttgatatcaatggaatcaaaccagaaccaatatgtgactacacaccagcatcaggcttctttccctactgttcgttcaccaacggcgagacttccccaactgtgtccatggcagaattagaacaccttgcacagaatatatctaaatcgcatctggaaacctgccaatacttgagagaagagctccagcagataacgtggcagacctttttacaggaagaaattgagaactatcaaaacaagcagcgggaggtgatgtggcaattgtgtgccatcaaaattacagaagctatacagtatgtggtggagtttgccaaacgcattgatggatttatggaactgtgtcaaaatgatcaaattgtgcttctaaaagcaggttctctagaggtggtgtttatcagaatgtgccgtgcctttgactctcagaacaacaccgtgtactttgatgggaagtatgccagccccgacgtcttcaaatccttaggttgtgaagactttattagctttgtgtttgaatttggaaagagtttatgttctatgcacctgactgaagatgaaattgcattattttctgcatttgtactgatgtcagcagatcgctcatggctgcaagaaaaggtaaaaattgaaaaactgcaacagaaaattcagctagctcttcaacacgtcctacagaagaatcaccgagaagatggaatactaacaaagttaatatgcaaggtgtctaccttaagagccttatgtggacgacatacagaaaagctaatggcatttaaagcaatatacccagacattgtgcgacttcattttcctccattatacaaggagttgttcacttcagaatttgagccagcaatgcaaattgatgggtaaatgttatcacctaagcacttctagaatgtctgaagtacaaacatgaaaaacaaacaaaaaaattaaccgagacactttatatggccctgcacagacctggagcgccacacactgcacatcttttggtgatcggggtcaggcaaaggaggggaaacaatgaaaacaaataaaagttgaacttgtttttctcatgcatatgatttccattatgcctacagatatggaccctttttctgtcttgacttcttgatcattgacctctgtttacaacaggaggagggtactaaagtcggaggatttccttttcttgtagctcactgcccacagactttctacagagtcaccaatctgtcagtaacaacagagagtccagcaataatcggtgactggtgtgcatagcggaggttgcggcattactttgcacaactagctctttgtttcatgaaggaagtttttattttttcaccgattattgccagtccgcaggatggcatgaaaagggtccatagcagtagcaacaatagcattataatatattacagggtaaatgggcatgaagactatatatagctaaaagagatattgtttatatattgttttaagtaatataaaatgtagttactggtgtagcttttcctgttgaattgataaggcactttcattttgcacctttttctttaaattaaatgctagcgtgttcactgtcgtgtcgcatgtgcaccagaaacacaagtttaactgagaaggcttggaaggtacgttgggaggtatttatgctgctgtttacaaaattatttttaagagactggctggtcatatctagaaatcaccacgttggattttttttttaacatgtgaatttggaattagaaacggaactctccctaaattatactttgctttttggtaagtttaatgatagatgtgtttatgcttcatacaaagttgaatgattgattggcgtggtggacatataccatcatgctcattttttttttttaaagctttttaaaatgccacctcatggaggcgagggggaggagaagctcattttacacaattcagtagttaaatatggactcggtctcaacttggaattcttatgctttgagaacaaatcaacaaccagaatatttattggaatctagcttttattataagaaggacccaaagattatatcctgagcaaatgcacactccccatgtgaggacatgaagtatttactttgtgaatgtttatgttcttggtataatctaggaaccctatgagtttatctcagagtgaactaattctagatttgttgtcaatagatgctataattcaagaatgttgctctccatatttgaaaaacgatggataggagggtgagggaagcatacaatgttgaaccagtttctcttatttaaatattaaatactttaagcctttaaagtgaagttgatgctagctgcaaacatttactcttgtatttatcttcactaggaaactgtggactgtaatttattttattaaatatttagaagattatttggcttgtgtgttcaggtgagaaatactgagttgtttttgtttaatttcatggtttttttttttttaatgatccctagtgggggaaggggaaaggaatagtctgataaacagatgtgcatattttaaaaacaagtgaccttttgggaatgtaggcatttagacgatgattttagtcgcactaggggtgggattcaaactactggtcaaagaccattttgtacagaaaagggaacatctccgatgggtgttaaggtaggagtttccatgcagccctttatgtctgagaaatagtctcctctgccattggggtccctgcggaatcttctacaggaattgcagctcttcacgtcatgctaggttaccagcatgggcttcccagagcacttcactctgtttctaactccactgacttttctgacttgtttcttgagggacttggaaaaggggaaggtattattcacacagatgtgtgtatgaagcctaaataacatccaactttttttccaaaaacatagtaagagtttaaccataaatagaagagtaatattcctttaaatttcttacaggcatgtaaaattttatgtgtttatagagagatgctaactgtcagcatatagtatttatattggggcaagaagggttaaatcaaatctttaatttaagtaagcatagttcctttaaagatcagtagtatttatactctgaaaagagtaccaagcttagttcagttatttattcatccattttttttctattgtttctcctctggggggaaatggtgttttgtttttgtttgagttttgtgttttagttttttggttttggttttgttttgtttttttgtcattcagattcactaaatttggggatggttttattaaagtatattaacttctttttaaccaaagctttctgaatatgaccagcctcaggtgctagcgcattaaagagcaactaaacctaattccagtgtcgatttgtgaaataataaaagctaattgaatttctctaagggtgagagagaacataatgatgaacttaaaaagaaattccttttcccagaagggattctgcatgtacctacaaacaatcatgctctaaccacagtaatagtcatgccatggtgacattgcttttacggtaaaccaagataggtaatatgatgcttcttcccaggtgtttctgaaagaaaagcagcggtggagcttaagagccaagtccactgattgacataataggatggaattgtagacagagacatgctccatgaaacaaggaaacaactgactactatttggatctaagttgggatctgatgttaaacaataaattcagtttaaaaaaaatatggagctcagaaaaggatgtgaaaaactttgcattttcctttcttcattattacaaaaacacctatgtgatgacataaaatacttgggtgatatcagaacaattatccttaatagtttttataattaaagtttcctaaacttcagtctccaatagtcttttaaggattggaaccacatcactgtcagccccgctgctacaatgcctttgtacaatttttttacataaggcaaataaggcttttgtacaaagcctgaataccttctgttccaatggtgtccaaatggttattatattgtgaaaaacctggccttggtcacaatgcaaacaaaagtacagatgaaagtgctttttggacagtttgcaaattgtgttaaagctacggattttttttaaagtgttcagcatcttaacgtgtattaaagctatggatttttttttaaagtcttcagcatcctaattcaccctttctaacttaagaaaaacatgacttaagacactgcttctaagtttggttgttctttatagtgtggatacccagttatctgtgagcgtatgggggtgggctgagggtcaggtgaggaaggagtgtgtgtgtgtgtgtgtgtgtgtgtgtgtgtgtgtgtgatttgcatgtgtatgatgtgtgtgcgtcggaccgcttctaggctactaagtgtcaatggaaaagaaaatgtattcaaaatacttaaatcaaaactagaagatggggaaaaaaagatttattctatacaaagccttgtctggaccactttagagagacttctatttttttaacccttctataaatatttgatggcacttgaaatattcctgcaataaaatgtgatttgtgtaaagaaaaaaagattttgtaatgtgaaacaaagaaagaaagtaatgtaattttctaaaaaaaaaaatacaaacaaacaaactttgtattattttcttgatggaatttgtctatctgtctttggaaaactttttatttcattgaatgtgccatagtagaaatgtgtgtttttagttttagactaaggaatagctagttgttgtgttccgacattccaaaatgcaaaacaacctagtagtatctttcatgaaaaggtttaagtagtatgtaagcttctctcattgttgcttttttgcacatgttcttcattcctctctagtgcaatatgtacatagagcacttgcgggtgtaccttgatccctcagggaaaaatacatatttgtacagttttttggggtttttttgttttttggttttttttgttttgccttttgtttttggctaaggaatgtcgatcgaatcacttgttattgttgaggggcagccagataataatcctaaagccactgtttccaacattgattgtttaaatcatatgtccttccaatgctattattttaagataataataaaaagttattttctgacagttctttgtgctgactggtgaaaaacaagggtaaataagcaccttataattgacttactgtgaatgacaatccatcttggtatcaacgatagaagccctatcattttggagttggggttaagagtcagaaacaatgtgctcagggatctcctaaaactcttaaaacagggtggccagtactactgggacaaattgtgttttttattattaataataatgataataatactatccctccaaggcacaagtgaactatatagaactgcgtgtgtgtaaactctttactctcgtctcattttgttgagtttagaacttgatgtgctcgtcagtcttgtgtttcaaaacactgaataacttccaaagcaaagttatgccagtgtgttcaaaagataaattaataatgtaccagcaaagagcatcattcaaagtatagtccttgcatattccagttaccatttctctaataattaaaatattcatgataaatatatatatagcatcatatgttaaaaactatttcaaattctacatattaaggatgaaaattttaaaatccagtaataagaggagagacctgcctatcagtacagtgatataggtaaaagatgaaatatgtttttaaaataccagcaattaactattgttttcatgggttctcctctagaagcaaaccaaaaattccttcatggaaaacaattcttacttctacatgtgtagtttatatctgatgcattacaagagctaatgtttaaagacaaaacaaaacctgcctgtatgacagcagcaactcgagccaacatttagtgttacatgttatatttttgaaataccgttttgttatcatattccacatattactttccataaagtcagagaagttcaatgtaattgttggctctgattcttccaccttgggatacacattcacaagaagatttatatattttcttactatgatagaggaacataatctgggaaaacttcccatgtctgtaagatgaaaaggatacctttaccatgttgtttttgataataaagaatatggaaaatggtagaaatctctcctctctatgtgtatttgtatatgtgtgtatacacacacacgttgacatttttacataacatgtgattgccacttcttataaagttatgatatagaaccccatgaaaacaactttatattatagatcaaataatgtgcccagaaacgcaattgcaacagtaaatcttgatctattggtaagagtctatgatacaggtcttcattctatccctaaacataatgttagtaaagaggttccatcagattgtattatagagaccttcctattgctatttatttttaagagatgagaagactgactagcaatgtctccacagtgcaattggtttcacttctgggtctgtctgtctgtttgtgtaggtgagatcagtgttgtcaggctctcagaataatttttaaaagaatccagaagcctgacttcacaccaagtagccatcctagatgggcgggggggatctccatgttcaaccaaaccctcagaacttagagcaataaatacattcagtcatttatttataaatgaatgacagaatattcaatccaaatagaaacaaccttttgtcagtgatgcaacataacatggagtcttatattgagaaagtgaatatgaatattttaaatagatgcctaggaaatctgtgtttgctgtttacatttaatgtactttgccacattagcagtaccacacttcttttactttcatccttctaagaactaatgaaagatagcttgctattagctttgacatgttgcacatgccattatgttgttctctaagaacaactaaattctctccagtgttcatgtgtgattcctttttcatcattattactttaatgtggatgaatactatttctaggaacttgattatcactgaacagattgcatatgtaaatgcagataattcttgagcaatatagtgaaaatgatttcacaaaaaaaatccatatgtactgtatacatcttcctgaatccaaaattctcctgttatccacacagtttgaaatctcatattaaacagtggtaaatttttaaacattaggacattagctggctgcttctataaatgtacctgtattgtctgcctgctccttttgtggagatgtgtttttgtattggatgtttgggccaatgggaggcttcaagctacaacatattttcccactttaaataatatttaacatatgacaaaccccagacaaggcttttaatatgtataaagaactgcagtgttaggtggtttatttgcaaactgttttcagtgttgtccatttttatggcacctttaacaatattcttgtttccaaagtacaaaaaaaataggttaaataatctagccataactgaatgtcaagcaataaaacaaatgacttttgtgcatagacttaaaaaatacaaattttagacatctgcatgtaaatgcaatctcttgtttactgctttcttcaacttgagcaatcgattccttatttactattaacttaagaacttgtaacggcctgtaaacattttctctcttactcttctttcaaatttacctgtccctgcttttgagtcataatatttaatgttgttctgcacatctctatacagttaactttttggctttcattctgtatagataagaaaatgttatattataaacagcctactcagtgcaaatatttatctgtttatcaaatccacaatatgctgtataataccggttttactatataatctattttagacatagctgtttagaactagagtgtgctatttttgtgtttttctgatgtgtggtgctagacaagttacttttgtgaacaacaaaaattatcccttttattcctagacaataccacctttgggtcttgttaatttcactgagtataactatatatttgtatatatatacatatatatatatatctacctatgcccaactggcagctgtatcagagtgctggatttgggacatgcttttctctttaaatacataatatcattatataaattattctagagtgtatttaattaggataaaattacttccttagtatggatatttgacatctatagggtgaatttgtttataaatatggctatatggaaacttattagcatttactttatgtttgctacttggctttacagcatatctcctaagctgaaaaataatttgccaggccttcaagatcctaaagaaacttgtttaatggagtaatatacttttttttcttattaaggaattgtattactggcacctaacacagttgtattcttagctcctattatagataatgggcatttacataaaatatcctagatggcttgatggcagaataaacctttcccctcctacctgagtcatgagaaggatggagacgtcctctgccataacatgggccataaagcaaattcgacatgggatgttctgtttcagtatgacctcaaccagttccatgaactgagtgaaggaccttcattttcaaagttatttaataagtagcttaattaagcctttctacccattctcccaagatctactggcattattgaaaagcaaagtttatcaaatatctaactaaggatgtagttaaccttattaaatattgattagaattgttctgtaatattactgaatttgtaagatctttagcaaagatttttgagcaatttataaatgtagagcaaatgtttctgtttactgcactttttgtaactgaaggtgataaattctcaagccatgattattggcttccatgcactgcaatatttatccacaattctagacattttccatttttgtggaagagttgctgttaccttaattataaatgcaattgtgtggttaatgagagctaatgctagtagttaaccttttaaagtggattggctacagttgagggagaaatctcttttaatataaatcacatcattccttaactgcctctcttggaaagagattgaaaccttttttttaaagcacgatttagcatcctaagcttcctgagggtagagattgtatctttttgcgtctgcacaatggctagcacatgtcagcatttgacaattgttaaatgataacaagtgtgccccaattaaaacgtttttcctgggttgttttgttaaatttacaaagtaagccaagccttacggttaacattctcctctacaaccaagtattaaagccacatttaaaaagaccacatgaaatgctgattctaattgtgtgtaggtcttgaggattaagcacacaaatttcacaaacttctgtttgagtaaacaaactcagccttctgtaaatatacatgcaagtttggaaacagtaatactgtacctataaatatatgctgtctgttttgtgtacagtatgtaaaaactccttttctgccacactaaaaatgcaagccatttatgggaatcctaaaactagtattgaactaaaactttgctaatgatctttattagaggatcgtccaacttttcacttaccttgggttttcttttcaattcactcttacactagtctgcttatttccagctgtttattttattgagtcctgaatttaaaaaaaaaatattttgattcattttgtaaatacaagctgtacaaaaaagagagatttaatgttgtcttttaaatactccaattttcattctaatatgaatgttgttatattgtacttagaaactgtacctttaatattacattacctttattaaaagtgcattgaacacatcaattttagatgtgctttatgtactgttatcctataataaaacttcagcttctaatggaa

SEQ ID NO: 25525 - DNA, 1701 bp, Homo sapiens
  source 1..1701: mol_type = unassigned DNA
tctcggcgggcgggcagctgcggcagctgctgctgtggctcgggcggcggcggcgcggcggcggcagagggggctccggggtcggaccatccgctctccctgcgctctccgcaccgcggcttaaatgatgtattttgtgatcgcagcgatgaaagctcaaattgaaattattccatgcaagatctgtggagacaaatcatcaggaatccattatggtgtcattacatgtgaaggctgcaagggctttttcaggagaagtcagcaaagcaatgccacctactcctgtcctcgtcagaagaactgtttgattgatcgaaccagtagaaaccgctgccaacactgtcgattacagaaatgccttgccgtagggatgtctcgagatgctgtaaaatttggccgaatgtcaaaaaagcagagagacagcttgtatgcagaagtacagaaacaccggatgcagcagcagcagcgcgaccaccagcagcagcctggagaggctgagccgctgacgcccacctacaacatctcggccaacgggctgacggaacttcacgacgacctcagtaactacattgacgggcacacccctgaggggagtaaggcagactccgccgtcagcagcttctacctggacatacagccttccccagaccagtcaggtcttgatatcaatggaatcaaaccagaaccaatatgtgactacacaccagcatcaggcttctttccctactgttcgttcaccaacggcgagacttccccaactgtgtccatggcagaattagaacaccttgcacagaatatatctaaatcgcatctggaaacctgccaatacttgagagaagagctccagcagataacgtggcagacctttttacaggaagaaattgagaactatcaaaacaagcagcgggaggtgatgtggcaattgtgtgccatcaaaattacagaagctatacagtatgtggtggagtttgccaaacgcattgatggatttatggaactgtgtcaaaatgatcaaattgtgcttctaaaagcaggttctctagaggtggtgtttatcagaatgtgccgtgcctttgactctcagaacaacaccgtgtactttgatgggaagtatgccagccccgacgtcttcaaatccttaggttgtgaagactttattagctttgtgtttgaatttggaaagagtttatgttctatgcacctgactgaagatgaaattgcattattttctgcatttgtactgatgtcagcagatcgctcatggctgcaagaaaaggtaaaaattgaaaaactgcaacagaaaattcagctagctcttcaacacgtcctacagaagaatcaccgagaagatggaatactaacaaagttaatatgcaaggtgtctaccttaagagccttatgtggacgacatacagaaaagctaatggcatttaaagcaatatacccagacattgtgcgacttcattttcctccattatacaaggagttgttcacttcagaatttgagccagcaatgcaaattgatgggtaaatgttatcacctaagcacttctagaatgtctgaagtacaaacatgaaaaacaaacaaaaaaattaaccgagacactttatatggccctgcacagacctggagcgccacacactgcacatcttttggtgatcggggtcaggcaaaggaggggaaacaatgaaaacaaataa

SEQ ID NO: 25526 - DNA, 2180 bp, Homo sapiens
  source 1..2180: mol_type = unassigned DNA
gccaggtgctcccgccttccaccctccgccctcctccctcccctgggccctgctccctgccctcctgggcagccagggcagccaggacggcaccaagggagctgccccatggacagggccccacagagacagcaccgagcctcacgggagctgctggctgcaaagaagacccacacctcacaaattgaagtgatcccttgcaaaatctgtggggacaagtcgtctgggatccactacggggttatcacctgtgaggggtgcaagggcttcttccgccggagccagcgctgtaacgcggcctactcctgcacccgtcagcagaactgccccatcgaccgcaccagccgaaaccgatgccagcactgccgcctgcagaaatgcctggcgctgggcatgtcccgagatgctgtcaagttcggccgcatgtccaagaagcagagggacagcctgcatgcagaagtgcagaaacagctgcagcagcggcaacagcagcaacaggaaccagtggtcaagacccctccagcaggggcccaaggagcagataccctcacctacaccttggggctcccagacgggcagctgcccctgggctcctcgcctgacctgcctgaggcttctgcctgtccccctggcctcctgaaagcctcaggctctgggccctcatattccaacaacttggccaaggcagggctcaatggggcctcatgccaccttgaatacagccctgagcggggcaaggctgagggcagagagagcttctatagcacaggcagccagctgacccctgaccgatgtggacttcgttttgaggaacacaggcatcctgggcttggggaactgggacagggcccagacagctacggcagccccagtttccgcagcacaccggaggcaccctatgcctccctgacagagatagagcacctggtgcagagcgtctgcaagtcctacagggagacatgccagctgcggctggaggacctgctgcggcagcgctccaacatcttctcccgggaggaagtgactggctaccagaggaagtccatgtgggagatgtgggaacggtgtgcccaccacctcaccgaggccattcagtacgtggtggagttcgccaagaggctctcaggctttatggagctctgccagaatgaccagattgtgcttctcaaagcaggagcaatggaagtggtgctggttaggatgtgccgggcctacaatgctgacaaccgcacggtcttttttgaaggcaaatacggtggcatggagctgttccgagccttgggctgcagcgagctcatcagctccatctttgacttctcccactccctaagtgccttgcacttttccgaggatgagattgccctctacacagcccttgttctcatcaatgcccatcggccagggctccaagagaaaaggaaagtagaacagctgcagtacaatctggagctggcctttcatcatcatctctgcaagactcatcgccaaagcatcctggcaaagctgccacccaaggggaagcttcggagcctgtgtagccagcatgtggaaaggctgcagatcttccagcacctccaccccatcgtggtccaagccgctttccctccactctacaaggagctcttcagcactgaaaccgagtcacctgtggggctgtccaagtgacctggaagagggactccttgcctctccctatggcctgctggcccacctccctggaccccgttccaccctcacccttttcctttcccatgaaccctggagggtggtccccaccagctctttggaagtgagcagatgctgcggctggctttctgtcagcaggccggcctggcagtgggacaatcgccagagggtggggctggcagaacaccatctccagcctcagctttgacctgtctcatttcccatattccttcacacccagcttctggaaggcatggggtggctgggatttaaggacttctgggggaccaagacatcctcaagaaaacaggggcatccagggctccctggatgaatagaatgcaattcattcagaagctcagaagctaagaataagcctttgaaatacctcattgcatttccctttgggcttcggcttggggagatggatcaagctcagagactggcagtgagagcccagaaggacctgtataaaatgaatctggagctttaca

SEQ ID NO: 25527 - DNA, 3050 bp, Homo sapiens
  source 1..3050: mol_type = unassigned DNA
agaagcactgggggagagagctaggtgcagagcttcaggctgaggcgctgctgagagggcctcgccccgcctctgccgccagctgcaccccactcctggaccaccccctgctgagaaggacagggagccaaggccggcagagccaaggctcagtcatgagaacacaaattgaagtgatcccttgcaaaatctgtggggacaagtcgtctgggatccactacggggttatcacctgtgaggggtgcaagggcttcttccgccggagccagcgctgtaacgcggcctactcctgcacccgtcagcagaactgccccatcgaccgcaccagccgaaaccgatgccagcactgccgcctgcagaaatgcctggcgctgggcatgtcccgagatgctgtcaagttcggccgcatgtccaagaagcagagggacagcctgcatgcagaagtgcagaaacagctgcagcagcggcaacagcagcaacaggaaccagtggtcaagacccctccagcaggggcccaaggagcagataccctcacctacaccttggggctcccagacgggcagctgcccctgggctcctcgcctgacctgcctgaggcttctgcctgtccccctggcctcctgaaagcctcaggctctgggccctcatattccaacaacttggccaaggcagggctcaatggggcctcatgccaccttgaatacagccctgagcggggcaaggctgagggcagagagagcttctatagcacaggcagccagctgacccctgaccgatgtggacttcgttttgaggaacacaggcatcctgggcttggggaactgggacagggcccagacagctacggcagccccagtttccgcagcacaccggaggcaccctatgcctccctgacagagatagagcacctggtgcagagcgtctgcaagtcctacagggagacatgccagctgcggctggaggacctgctgcggcagcgctccaacatcttctcccgggaggaagtgactggctaccagaggaagtccatgtgggagatgtgggaacggtgtgcccaccacctcaccgaggccattcagtacgtggtggagttcgccaagaggctctcaggctttatggagctctgccagaatgaccagattgtgcttctcaaagcaggagcaatggaagtggtgctggttaggatgtgccgggcctacaatgctgacaaccgcacggtcttttttgaaggcaaatacggtggcatggagctgttccgagccttgggctgcagcgagctcatcagctccatctttgacttctcccactccctaagtgccttgcacttttccgaggatgagattgccctctacacagcccttgttctcatcaatgcccatcggccagggctccaagagaaaaggaaagtagaacagctgcagtacaatctggagctggcctttcatcatcatctctgcaagactcatcgccaaagcatcctggcaaagctgccacccaaggggaagcttcggagcctgtgtagccagcatgtggaaaggctgcagatcttccagcacctccaccccatcgtggtccaagccgctttccctccactctacaaggagctcttcagcactgaaaccgagtcacctgtggggctgtccaagtgacctggaagagggactccttgcctctccctatggcctgctggcccacctccctggaccccgttccaccctcacccttttcctttcccatgaaccctggagggtggtccccaccagctctttggaagtgagcagatgctgcggctggctttctgtcagcaggccggcctggcagtgggacaatcgccagagggtggggctggcagaacaccatctccagcctcagctttgacctgtctcatttcccatattccttcacacccagcttctggaaggcatggggtggctgggatttaaggacttctgggggaccaagacatcctcaagaaaacaggggcatccagggctccctggatgaatagaatgcaattcattcagaagctcagaagctaagaataagcctttgaaatacctcattgcatttccctttgggcttcggcttggggagatggatcaagctcagagactggcagtgagagcccagaaggacctgtataaaatgaatctggagctttacattttctgcctctgccttcctcccagctcagcaaggaagtatttgggcaccctaccctttacctggggtctaaccaaaaatggatgggatgaggatgagaggctggagataattgttttatgggatttgggtgtgggactagggtacaatgaaggccaagagcatctcagacatagagttaaaactcaaacctcttatgtgcactttaaagatagactttaggggctggcacaaatctgatcagagacacatatccatacacaggtgaaacacatacagactcaacagcaatcatgcagttccagagacacatgaacctgacacaatctctcttatccttgaggccacagcttggaggagcctagaggcctcaggggaaagtcccaatcctgagggaccctcccaaacatttccatggtgctccagtccactgatcttgggtctggggtgatccaaataccaccccagctccagctgtcttctaccactagaagacccaagagaagcagaagtcgctcgcactggtcagtcggaaggcaagatcagatcctggaggactttcctggcctgcccgccagccctgctcttgttgtggagaaggaagcagatgtgatcacatcaccccgtcattgggcaccgctgactccagcatggaggacaccagggagcagggcctgggcctgtttccccagctgtgatcttgcccagaacctctcttggcttcataaacagctgtgaaccctcccctgagggattaacagcaatgatgggcagtcgtggagttgggggggttgggggtgggattgtgtcctctaaggggacgggttcatctgagtaaacataaaccccaacttgtgccattctttataaaatgattttaaaggcaa

SEQ ID NO: 25528 - DNA, 2326 bp, Homo sapiens
  source 1..2326: mol_type = unassigned DNA
acagagacagcaccgagcctcacgggagaatgtggggcactgggccatcagcagggaaggacagaatgtcaggccgtccttggccccacccatggtccaagtcaggaaccccctcagagcaggatcgcagggccacaggcttggtcagctgtgagcatggaggaggaaagtttgagggccagagccaccaagctccagggccacctggtggaggaagaactggctgcctggagctgctggctgcaaagaagacccacacctcacaaattgaagtgatcccttgcaaaatctgtggggacaagtcgtctgggatccactacggggttatcacctgtgaggggtgcaagggcttcttccgccggagccagcgctgtaacgcggcctactcctgcacccgtcagcagaactgccccatcgaccgcaccagccgaaaccgatgccagcactgccgcctgcagaaatgcctggcgctgggcatgtcccgagatgctgtcaagttcggccgcatgtccaagaagcagagggacagcctgcatgcagaagtgcagaaacagctgcagcagcggcaacagcagcaacaggaaccagtggtcaagacccctccagcaggggcccaaggagcagataccctcacctacaccttggggctcccagacgggcagctgcccctgggctcctcgcctgacctgcctgaggcttctgcctgtccccctggcctcctgaaagcctcaggctctgggccctcatattccaacaacttggccaaggcagggctcaatggggcctcatgccaccttgaatacagccctgagcggggcaaggctgagggcagagagagcttctatagcacaggcagccagctgacccctgaccgatgtggacttcgttttgaggaacacaggcatcctgggcttggggaactgggacagggcccagacagctacggcagccccagtttccgcagcacaccggaggcaccctatgcctccctgacagagatagagcacctggtgcagagcgtctgcaagtcctacagggagacatgccagctgcggctggaggacctgctgcggcagcgctccaacatcttctcccgggaggaagtgactggctaccagaggaagtccatgtgggagatgtgggaacggtgtgcccaccacctcaccgaggccattcagtacgtggtggagttcgccaagaggctctcaggctttatggagctctgccagaatgaccagattgtgcttctcaaagcaggagcaatggaagtggtgctggttaggatgtgccgggcctacaatgctgacaaccgcacggtcttttttgaaggcaaatacggtggcatggagctgttccgagccttgggctgcagcgagctcatcagctccatctttgacttctcccactccctaagtgccttgcacttttccgaggatgagattgccctctacacagcccttgttctcatcaatgcccatcggccagggctccaagagaaaaggaaagtagaacagctgcagtacaatctggagctggcctttcatcatcatctctgcaagactcatcgccaaagcatcctggcaaagctgccacccaaggggaagcttcggagcctgtgtagccagcatgtggaaaggctgcagatcttccagcacctccaccccatcgtggtccaagccgctttccctccactctacaaggagctcttcagcactgaaaccgagtcacctgtggggctgtccaagtgacctggaagagggactccttgcctctccctatggcctgctggcccacctccctggaccccgttccaccctcacccttttcctttcccatgaaccctggagggtggtccccaccagctctttggaagtgagcagatgctgcggctggctttctgtcagcaggccggcctggcagtgggacaatcgccagagggtggggctggcagaacaccatctccagcctcagctttgacctgtctcatttcccatattccttcacacccagcttctggaaggcatggggtggctgggatttaaggacttctgggggaccaagacatcctcaagaaaacaggggcatccagggctccctggatgaatagaatgcaattcattcagaagctcagaagctaagaataagcctttgaaatacctcattgcatttccctttgggcttcggcttggggagatggatcaagctcagagactggcagtgagagcccagaaggacctgtataaaatgaatctggagctttacattttctgcctctgccttcctcccagctcagcaaggaagtatttgggcaccctaccctttacct

SEQ ID NO: 25529 - DNA, 4505 bp, Homo sapiens
  source 1..4505: mol_type = unassigned DNA
ctttcagtggtgttgttgaaagggcttggcagctcccaaatgtttgcagtgtccttagtcctatgagggctgccttcttcttcttcttcttctttttttttttttttttttgctagcttttagctagtatctggaaacatctactggacatgttggactcattttctcaagaatccactttacccttcagggaagccaggaaaagaacaagcttccaaccggtacaagtctggaggaatttcacagcctctcaaactacggagtccccggcgtgcagtggagcctcgctgggggaaatgacagcttggaccatgggcgcccgcggtctggacaagcgaggaagtttctttaagctcattgacacaattgcctcggagatcggagaactgaaacaggagatggtgcggacagatgtcaacctggaaaatggcctggaacccgctgaaacccacagcatggtaagacacaaggatggtggctattccgaggaagaggacgtgaagacctgtgcccgggactcaggctatgacagcctctccaacaggctcagcatcttggaccggctcctccacacccaccccatatggctgcagctgagtctgagtgaggaggaggcagcagaggtcctgcaggcccagcctccggggatcttcctggttcataaatctaccaagatgcagaagaaagtcctctccctccgcctgccctgtgaatttggggccccactcaaggaatttgccataaaggaaagcacatacaccttttccctggaaggctcaggaatcagtttcgcagatttattccggctcattgctttctactgcatcagcagggatgttctaccatttaccttgaagttgccttatgccatttcaacagccaagtcggaggctcagcttgaagaactggcccagatgggactaaatttctggagctccccagctgacagcaaacccccgaaccttccacctccccataggcctctttcctccgacggtgtctgtcctgcctccctgcgtcagctctgccttataaatggagtgcattctatcaaaaccaggacgccttcagagctggagtgcagccagaccaacggggccctgtgctttattaatccccttttcttgaaagtgcacagccaggacctcagtggaggcctgaaacggccgagcacaaggactcccaacgcgaatggcacggagcggactcggtcccccccacccaggcccccgccacccgctattaatagtctccacacaagccctcggctggccaggactgaaacccagacgagcatgccagaaacagtcaaccataacaaacatgggaacgtagctctgcctggaacgaaaccaactcccatccctccaccccggctgaagaagcaggcttcttttctggaagcagagggcggtgcaaagaccttgagcggcggccggccgggcgcaggcccggagctggagctgggcacagctggcagcccaggtggggccccgcctgaggccgccccgggggattgcacaagggccccgccgcccagctctgaatcacggcccccgtgccatggaggccggcagcggctgagcgacatgagcatttctacttcctcctccgactcgctggagttcgaccggagcatgcctctgtttggctacgaggcggacaccaacagcagcctggaggactacgagggggaaagtgaccaagagaccatggcgccccccatcaagtccaaaaagaaaaggagcagctccttcgtgctgcccaagctcgtcaagtcccagctgcagaaggtgagcggggtgttcagctccttcatgaccccggagaagcggatggtccgcaggatcgccgagctttcccgggacaaatgcacctacttcgggtgcttagtgcaggactacgtgagcttcctgcaggagaacaaggagtgccacgtgtccagcaccgacatgctgcagaccatccggcagttcatgacccaggtcaagaactatttgtctcagagctcggagctggacccccccatcgagtcgctgatccctgaagaccaaatagatgtggtgctggaaaaagccatgcacaagtgcatcttgaagcccctcaaggggcacgtggaggccatgctgaaggactttcacatggccgatggctcatggaagcaactcaaggagaacctgcagcttgtgcggcagaggaatccgcaggagctgggggtcttcgccccgacccctgattttgtggatgtggagaaaatcaaagtcaagttcatgaccatgcagaagatgtattcgccggaaaagaaggtcatgctgctgctgcgggtctgcaagctcatttacacggtcatggagaacaactcagggaggatgtatggcgctgatgacttcttgccagtcctgacctatgtcatagcccagtgtgacatgcttgaattggacactgaaatcgagtacatgatggagctcctagacccatcgctgttacatggagaaggaggctattacttgacaagcgcatatggagcactttctctgataaagaatttccaagaagaacaagcagcgcgactgctcagctcagaaaccagagacaccctgaggcagtggcacaaacggagaaccaccaaccggaccatcccctctgtggacgacttccagaattacctccgagttgcatttcaggaggtcaacagtggttgcacaggaaagaccctccttgtgagaccttacatcaccactgaggatgtgtgtcagatctgcgctgagaagttcaaggtgggggaccctgaggagtacagcctctttctcttcgttgacgagacatggcagcagctggcagaggacacttaccctcaaaaaatcaaggcggagctgcacagccgaccacagccccacatcttccactttgtctacaaacgcatcaagaacgatccttatggcatcattttccagaacggggaagaagacctcaccacctcctagaagacaggcgggacttcccagtggtgcatccaaaggggagctggaagccttgccttcccgcttctacatgcttgagcttgaaaagcagtcacctcctcggggacccctcagtgtagtgactaagccatccacaggccaactcggccaagggcaactttagccacgcaaggtagctgaggtttgtgaaacagtaggattctcttttggcaatggagaattgcatctgatggttcaagtgtcctgagattgtttgctacctacccccagtcaggttctaggttggcttacaggtatgtatatgtgcagaagaaacacttaagatacaagttcttttgaattcaacagcagatgcttgcgatgcagtgcgtcaggtgattctcactcctgtggatggcttcatccctgccttccttcctttctttttccttttttttttttttttttttttttttacaaagagccttcatgtttttatatatttcatagaaatttttatagcagttgcaggtaaactgtcaggattggttttaaaatatttttgtaactttaaaatattctataattatgcatgtgattttaacatttaatattcaaaaataaatctcttgctggatttgagagtattgcatttttaaagtctctcttctgtaactggatgttttggcaactttgtggggagagactgctggatttcttaaagcaacgtattcctgacactggccacagaatgcctttggaaatcggatgtactgttctcttgttcacgtttagtggtgttttgctgttttgttttttaaacaaatgatgctgagaataaggagagaaatgaatgtagagagaggtagagagagaaatatgaactctaacaaaggactgaggagtgcagtctgctggttcaggctcttcaaaagatgtagaaaaagagatagaaggaaccacctatgcttaaaatactgtaaatatgcagtgaggtttggcaaaatctattccatgtgtgatttgcttgtagaaacaattttgaaagccccttgaggaaaataaaaatcaagaagaacacttttctcccttttccatacaaattaaaacttaacagcatcaaattattgggaccagaaaccaagtaatgtataatgtggcttttgttgagttaaataagatgctatataatggagaagaatttgaaaatgcacaaaaaaatcaatctacattatcagaacctgcagtgaaattaaacttatgttaaataaaaccagtttgcaggtgcacaaactatgagggtcttgtatccacgtaacacaggtagttacaaaaacatgttattgtactgtgtaaagatgcatagtcatctcatttggttggctttgtaccttgtaccttttttagccttggcttttgttgaactagaaccctcagcacatactgtgttgtacttttgtaaatgattttttaaatggaattttgcacataatacattgtaatactgtatgataatcatgtgtgaaaataatttttgaaatatcc

SEQ ID NO: 25530 - DNA, 1837 bp, Homo sapiens
  source 1..1837: mol_type = unassigned DNA
gagtccccggcgtgcagtggagcctcgctgggggaaatgacagcttggaccatgggcgcccgcggtctggacaagcgaggaagtttctttaagctcattgacacaattgcctcggagatcggagaactgaaacaggagatggtgcggacagatgtcaacctggaaaatggcctggaacccgctgaaacccacagcatggtaagacacaaggatggtggctattccgaggaagaggacgtgaagacctgtgcccgggactcaggctatgacagcctctccaacaggctcagcatcttggaccggctcctccacacccaccccatatggctgcagctgagtctgagtgaggaggaggcagcagaggtcctgcaggcccagcctccggggatcttcctggttcataaatctaccaagatgcagaagaaagtcctctccctccgcctgccctgtgaatttggggccccactcaaggaatttgccataaaggaaagcacatacaatgtggtgctggaaaaagccatgcacaagtgcatcttgaagcccctcaaggggcacgtggaggccatgctgaaggactttcacatggccgatggctcatggaagcaactcaaggagaacctgcagcttgtgcggcagaggaatccgcaggagctgggggtcttcgccccgacccctgattttgtggatgtggagaaaatcaaagtcaagttcatgaccatgcagaagatgtattcgccggaaaagaaggtcatgctgctgctgcgggtctgcaagctcatttacacggtcatggagaacaactcagggaggatgtatggcgctgatgacttcttgccagtcctgacctatgtcatagcccagtgtgacatgcttgaattggacactgaaatcgagtacatgatggagctcctagacccatcgctgttacatggagaaggaggctattacttgacaagcgcatatggagcactttctctgataaagaatttccaagaagaacaagcagcgcgactgctcagctcagaaaccagagacaccctgaggcagtggcacaaacggagaaccaccaaccggaccatcccctctgtggacgacttccagaattacctccgagttgcatttcaggaggtcaacagtggttgcacaggaaagaccctccttgtgagaccttacatcaccactgaggatgtgtgtcagatctgcgctgagaagttcaaggtgggggaccctgaggagtacagcctctttctcttcgttgacgagacatggcagcagctggcagaggacacttaccctcaaaaaatcaaggcggagctgcacagccgaccacagccccacatcttccactttgtctacaaacgcatcaagaacgatccttatggcatcattttccagaacggggaagaagacctcaccacctcctagaagacaggcgggacttcccagtggtgcatccaaaggggagctggaagccttgccttcccgcttctacatgcttgagcttgaaaagcagtcacctcctcggggacccctcagtgtagtgactaagccatccacaggccaactcggccaagggcaactttagccacgcaaggtagctgaggtttgtgaaacagtaggattctcttttggcaatggagaattgcatctgatggttcaagtgtcctgagattgtttgctacctacccccagtcaggttctaggttggcttacaggtatgtatatgtgcagaagaaacacttaagatacaagttcttttgaattcaacagcagatgcttgcgatgcagtgcgtcaggtgattctcactcctgtggatggcttcatccctgccttcct

SEQ ID NO: 25531 - DNA, 1030 bp, Homo sapiens
  source 1..1030: mol_type = unassigned DNA
gctgcataaggactgcccggggctgcgcgacgggaccggcagcatgagcagcggctacagcagcctggaggaggacgccgaggacttcttcttcaccgccaggacctccttcttcaggagagcgccccagggcaagccccgctccggccaacaagatgttgagaaagagaaggaaacccacagttacctcagcaaagaggagatcaaagagaaagttcataaatacaacttagcagtcacagacaagttgaagatgaccttgaattcaaatgggatttacactggcttcattaaagtacagatggaactctgcaaacctccacagacttctccaaattctggaaaactctctcccagtagcaatggctgtatgaatacacttcatatcagcagcacaaacactgtcggggaagtgatcgaggccctgctcaaaaagtttctcgtgactgagagccctgccaagtttgcactttataagcgttgtcacagggaagaccaagtctacgcctgcaagctctcagaccgggaacatccactctacctgcgtttggtagcagggcccagaacagacacacttagttttgttcttcgtgaacatgaaattggagagtgggaagccttcagccttccagaactacagaatttcttgcgcatcttggacaaggaagaagatgaacagctgcagaacctgaagaggcgctacacagcctacaggcagaagctggaagaagccctccgtgaggtgtggaagcctgattaaagcggggctccctgcccgtgaggcccggtgcaggaccgatgtacaaaacagcagcaagtgcctctcttctcagagggctgctgtcttgccccactatgctagggtcttcgcctttctatctgtagattttgttccccaaacctggtcacacagcatcctgcaccttagcgtcccatgtaagggactctgcaagcttgttgttcagcaccgcagtgttacctcttggcaagctgtgaacctgtcgcctcatcaggagcattcgagggtgct

SEQ ID NO: 25532 - DNA, 965 bp, Homo sapiens
  source 1..965: mol_type = unassigned DNA
gctgcataaggactgcccggggctgcgcgccgggaacctcgcggggctggcgggcgccgcacccccctcccgagtagctaggactacaggatgttgagaaagagaaggaaacccacagttacctcagcaaagaggagatcaaagagaaagttcataaatacaacttagcagtcacagacaagttgaagatgaccttgaattcaaatgggatttacactggcttcattaaagtacagatggaactctgcaaacctccacagacttctccaaattctggaaaactctctcccagtagcaatggctgtatgaatacacttcatatcagcagcacaaacactgtcggggaagtgatcgaggccctgctcaaaaagtttctcgtgactgagagccctgccaagtttgcactttataagcgttgtcacagggaagaccaagtctacgcctgcaagctctcagaccgggaacatccactctacctgcgtttggtagcagggcccagaacagacacacttagttttgttcttcgtgaacatgaaattggagagtgggaagccttcagccttccagaactacagaatttcttgcgcatcttggacaaggaagaagatgaacagctgcagaacctgaagaggcgctacacagcctacaggcagaagctggaagaagccctccgtgaggtgtggaagcctgattaaagcggggctccctgcccgtgaggcccggtgcaggaccgatgtacaaaacagcagcaagtgcctctcttctcagagggctgctgtcttgccccactatgctagggtcttcgcctttctatctgtagattttgttccccaaacctggtcacacagcatcctgcaccttagcgtcccatgtaagggactctgcaagcttgttgttcagcaccgcagtgttacctcttggcaagctgtgaacctgtcgcctcatcaggagcattcgagggtgct

SEQ ID NO: 25533 - DNA, 3492 bp, Homo sapiens
  source 1..3492: mol_type = unassigned DNA
gctgcataaggactgcccggggctgcgcgccgggaacctcgcggggctggcgggcgccgcaccccctccctggccgcctgcgccccggggaggccgcccgcgcgcgacgggaccggcagcatgagcagcggctacagcagcctggaggaggacgccgaggacttcttcttcaccgccaggacctccttcttcaggagagcgccccagggcaagccccgctccggccaacaagatgttgagaaagagaaggaaacccacagttacctcagcaaagaggagatcaaagagaaagttcataaatacaacttagcagtcacagacaagttgaagatgaccttgaattcaaatgggatttacactggcttcattaaagtacagatggaactctgcaaacctccacagacttctccaaattctggaaaactctctcccagtagcaatggctgtatgaatacacttcatatcagcagcacaaacactgtcggggaagtgatcgaggccctgctcaaaaagtttctcgtgactgagagccctgccaagtttgcactttataagcgttgtcacagggaagaccaagtctacgcctgcaagctctcagaccgggaacatccactctacctgcgtttggtagcagggcccagaacagacacacttagttttgttcttcgtgaacatgaaattggagagtgggaagccttcagccttccagaactacagaatttcttgcgcatcttggacaaggaagaagatgaacagctgcagaacctgaagaggcgctacacagcctacaggcagaagctggaagaagccctccgtgaggtgtggaagcctgattaaagcggggctccctgcccgtgaggcccggtgcaggaccgatgtacaaaacagcagcaagtgcctctcttctcagagggctgctgtcttgccccactatgctagggtcttcgcctttctatctgtagattttgttccccaaacctggtcacacagcatcctgcaccttagcgtcccatgtaagggactctgcaagcttgttgttcagcaccgcagtgttacctcttggcaagctgtgaacctgtcgcctcatcaggagcattcgagggtgcttggaagcatgaactctgggggtgtttttttttttggttattttaattatgtgatgatgctgttaagcttacagatatgcagttgattttttaaaaagcttaactaggaatctttctgaatacttgtcctattttgaaactacctgtctggttttttgtttggttttgttttctttttttaatgtcagaggaatctatccatgtgaatcgaaaggcacaggaatctaggaactctgaggaatttattgtgaaggattttgttagggggttgacagagaaagcaaagtgtaagtttggaagaaggcatgtgcggtggtggcgagtgctgcgggctatggaaggtgacttggcttttcagttaggggtagtggagaaaggggtagttgcttgtaaacgagttaaaagcattcagtgtggaggtgttaaacccattttaggatcgcttggtttcctggtgggtagaatatgggaacagagccagaggcaggagctaaaccaaaaggagggacccatgaactctgcagctgaccaatcagagaatcaggcaggtgtagcctactgacctgggcagaggtgggcctcacgcagctggatccgaccctttaattctgcccttttggagtggaaggtctgattggtgtagctgctctgcataggcaggacagtgacagttcactaactcttgttaagttacatagtgtatagctttccccccacaggtggttttcaaagttgagacggaatttgggtaggggcagctgtttttcccttgattgttagctaggatatttgtcaagtaaactttggtgacaatcactctcttcccttttattcctcctttccttttcctttcttcccttttttctttccttccctgctgtctcccaccctaccttgttcttttcctccctccctccctccctccctccctccctccctccttccctccctctctctccctctccctttcttttctacattgaaatctgttcttacataatagagaacagggctattgaataaagacccaatcctaccagatctttagttctaaagggcaacttgactgtgagtaggagggcccccaagaaagggaggaaagtccacacccagctaaccacacaacagggcttcattatggaaatattttaacaaaagtacatgttattaccaaccaaagagatgcatgtgcaatagaagccttccttaaaaacaggctaaataacctcattttatgcagcagtttaatctgagaacagagggaaaggtgtgcagtggttccagaggggccttatattctatttttagtctagatattttttgtttataaattcccaaggaattgttaacactttggtgacacctaatggattctttttgaaattccaaggtgcttcagttctttgcccaagtgaactgtgccttttattgcatttctgttcgtctcttggtggctcttctgactttttggagaatacccatcttgttggaggcagacttaagttgttatgctgtgccacacaatttactgagacaatcatatcttcctaagcatttaaggaaagttgaaaaaaatagaattagctataaaatatgtatggcacatcttgtttaattttgcatgtaacttctcttttgtacattgatgaggttttagtgacattgtcatccaacactttacctttattgttcagggaatgccttcgtgattttttgtactggttttattattcagactatggcctggatttgagtatattgttattaccacctggttttttaattattcatcccagtaaacttatattttgtgaagcatttgtttctcagattaagacactgttagaacctaaagtagtagctgatgggtatctgtgaattttttttttttttttttttttacttgaagtagattgtctgaataggcatcctcatctatatttacccaaaacctcgcttactgtcatgtgcactacaaattgcaatttggaaacctactgtattgaaattctgtcagtttatggttcttgaagactgatgtcctttcccaaacactggttactgcagcagcatttttaatgtgtaagtgaagaaaaaaggccactaaggccaaagattttttaagaatcattgtacaaatcattatgttaaactatctaagctttgctgtaatactgttttctcttcaatatgtgatggtacaggaaggatgttaaatgaaggggtggtattgcaggagagcattttaaatggcagaagtaaaaagttataatatttataattttgatgggtttaagtttatttttgtagggaagatttttctcccctaaaatagtttctagaatggcaaaattgtttccattattaaaaattgaagttattagtt

SEQ ID NO: 25534 - DNA, 5994 bp, Homo sapiens
  source 1..5994: mol_type = unassigned DNA
ccaggatcgctgatcgcgtcgggggcactgcaagcgcccagctgagccatgctctgggaggagacaggcgccgcccctgcgcccgcgcgggcctcggacctcccctacaggtgagtgactcgcggagtcccagcccggcagagacagggcactggtttccctctaccagagttcctgacccagccgagaacaaaccgcgaagcaagttcagccgaacaacgatggtgaaaagggtcctcctgctcacagtgtgaataacaggatatcctcagaccatctcaaaaaggaggaaaagatgactatgatggctcaccagtacccctcttggatcttcattaatgagaagacattcataaccagggaacaacttaattctttattgaagacctataacattttttatgagaaccagaaaaatctgcatattttatatggagagactgaagatggcaaactaattgttgaaggaatgctggacattttctggggagtaaaacgacctatacagctaaaaatacaagatgagaagccattctcttcttttactagtatgaagtcatcagacgtcttctccagcaaaggaatgacacgctggggggaatttgacgatctctatcgtattagtgagctggacaggacccagattcctatgtctgaaaaaaggaattcccaggaagactatttatcttatcacagcaacaccctgaagccacatgcaaaggatgaaccagactccccagtgctctatagaaccatgagtgaagcagctctggtgagaaaaaggatgaagcctctgatgatggacagaaaagaaagacagaaaaatagagcctctattaatggacacttctataaccatgaaacatcaattttcattccagcctttgaatcagaaactaaggtcagagtaaacagtaacatgagaactgaagaagtaataaagcaacttctccaaaaatttaagattgaaaatagtccccaggattttgctcttcacattatttttgcaacaggagaacaaagacgactaaagaagacagacattccgctactgcagaggctcctacagggaccttctgaaaagaatgctcgcattttcctcatggataaagatgcagaagaaattagcagtgatgtggctcagtacattaactttcacttttctctcttggaatccattcttcaaagattaaatgaagaagagaaaagagagattcaaagaatagtaacaaaattcaataaagaaaaggcgattatactgaaatgtcttcaaaataaactagtaataaaaacagagacaacagtttagcagtacaagcttctattgctaaaacatttcaaaaaactcagagatattactctttgatgaatgcataagttctgtacttgcatttatacgaacatatatgagacttgaatcgtagaaaattgaatgtcaaaaaaagctcatttctttttgaagtgatgaggttaattagggttcacagttggacaaaatgagtttgagtttagtttcagtaactgaaataagcttgaatactgcatatgccaaatagcttttatagtaaaccatgtaatgaactcaaatttaaatggtgtcttcagataagcagtttaaacttcatttagcttggactctcaagagaactgaaacataatcaatggattcagaaatgactcagaaaaaagaagctgccagttcttggaatgaaaaagaaatacagtcttacaccatcaaggaatctacctgatagtgacagtagcttcttgaaaactctggcattttcataaaatctaggactatcttaaatggcctgttgacttctgactatctgtaacatcagagctgtctggcctttggaaaggaaaaattatggactctgttaagaaatcctaattgaaattttctgaacctccccccagcccttttattctctctcttctgctgatgaaagacctttcatcagttcaaagcttttcttaagctcttttttaagttaattgaactttttctttatttatttttcaaaaaaatgtttatatcacatagacatattacatcggctaaagtaagacttggcccacaaatacctatttgttgctgaatgaatacaatggataaagcaaggctgttgtagctgaagttacatagggaatcccaaactctgccctcttagcatcttattctacatgacaactctcaaggtactcacagatctgtttaacccacttgaaaaaaaaacactaaaaatgaagaaatgctataagtataaactatgattttatttataaattctgtattaaaatggaattatatgcaacattctttcattctgtaaactaattccatttgcattcctcataagcattgtagtaaattgatcatattacatgtactaaggaatgagattatatgcagtaaacccaactggaagattaacaatattaaaatatgaaacatttttaagacaaaggcattacttctcagtattaccaaacctaaactggttgaaggtgaaagtgtgctatggccttttcaagcctaagaagtctctcttactgagtaaaccagaggcttgcatcgctattctttcacctgtcaatattaataagaaaatagtctcatctcacttaaatgaggcaaatgtaatagttaaaattcaacatacttataaaaaactagtgtcatgtacctgccatgaacatgacaaaaggttagtcttcaatagactgaaatgtataagagaagaaccaagtcttacatagaaaaaaaaggtagatatgaaaagaaaaatcacagaagagagaatgcaaatggccactaagtatatgaaaaaagtcgtatcttaacagtgaacaactgtgttagtctgtatcaatcagaagacagaaacaaggtagtaatttaaacagggaaagtttaatataaataataattaagctatgataggagaataataataaagatgaaaagagaaggtaccctaaggctgagggaaagaatcctaacaaggaaaggcaggaatgagggtttcagaattcactggagaaggtgtggttgcagcccactggagagaagtttgctggcttgcccaggccagagcaggaccacagatactggacaagctggtacagccaaccccctaggtgtggaccagctgaggcaggtgggcagatatgcagagggacttggggctttgccaaagggtaagcacaaagaaggagtcacgggttctgttcgaggcactgttgggattaggagccggagggacctactttgcaggaacctagcataactttgtgtgacgagactgcacaagacaaagctcaggcaagtggctcagtagttggccagcccagcagggtcctctgtatgagtgtgcacccagctgaagagaagaaatggagagcagcaattggagcttcaggaccggcttgcactgtggctccaggttataccaccactgcccaaagcaaaagctagagaagcaagtggagaaatgctggagaaagctgcaccctacaggcaaccagcactgcagaaaccactccaggcaaagtagtgaaggaaaaaagcctgctctccagtagcctggcctgtcagcctggaggaatcaggaaagaccccttcctcttgcagtgtgtctccagcgccctctactgacaaagtatgccatcatgcaagctgcaaaggaaacatttcaagagtctatatctattttcacggagcgggcaaccaacagtgaatgtggagctgagagacagtaaaataataactgacatgccaccgaagtacaaagtaaaataaataaataaatacacattttggcctattagcaaagattaagaaatgataacattaaatactcaataaatcaccatgagatggggactcaaacttctggtaaaaatacaaatagatataatttttcttgaaggcaatttagtagtctgtttatcctataattctacttgtaagatcctatcatatgaaaataaccagagatacaaagacattctgcaaagatatgttttatattgttatttattgtgacaaaaggaaataaaaagcctaaatgttcagaaaattattttaaaagatgaaagagggaaataggccatggacggtggctcacgcctgtaatcccagcactttaggaggccaaggtaggtggatcacttgaggttgggatttcgagaccagcctggccaacatggtgaaaccctgcctctactaaaaatacaaaaaatgagccgggtgcaatggcaggcacctataatgccagctactcgggaggctgaggcaggagaatcgcttgaacccgggaggcggaggttgcatgagccgagatggcgccactgctctccagcctggacgacagagcaagactccgtctctaaaaaaaaaaaaagagggaaataaacatttatttgtatattgttatgtagccattaaaattctgtttccaagtaattttaattacaggggtaaattcttatatatctaaataagaatatacacatacacatgttccaaaatatttattatgtacttaaggcatatatattatatatgtatgtgtgtgtatatatatatgtatttgtgtgtgtgaacactaatatttgcatatatatacacacaagaaataaaaacatgttaaaaatggctatatctgcattgtagaattatgagtgattcatgtttttctaacttccctatctgtattaagtgttctatagtttatatttgttactttttacatcaggaaatagtaaagttattatttaaaacttatgaacaaaaaagtaacaagcacatgcaagcacagagttctaccaaatgcaaaaaatttcaaatcaattattcaaatgagacattaacatcacttctgtggtagttttatatccataaagtctgattcttctcctttgaagagatgaagcttaatcttcctcatcctgaaaatgggctggacttagtgacttacgtctttttattttatttttaattgacaaataataattgtatgtatttatggggtacaatattatattattatatatgtatacattatggaattattaaatcaagctaattaacatatccataacctcttataatttctttgtggtgagaacatttaaaaatgtactcttttagcaattagggacttacttttaatacaggaaaatggaagagactgtgagactttgaagtaggtcataaaagtcactgtggcttcctccttgctctctcttggaccacttgctctgggggaagtcaactgccatgtcctgagcagccctggaaagacctacatgatgaagaactgagaccttctatcaaatgccagcagggaattgaggcctcctgtcaacagccattttagaagtagatcttccagcctcagtcaagccttcagatgactgcagccctgtctaatagcttgaccgtaatttcatgagagaccttcagccagaaaacccaaggaaaccattctggattcctcatcctcagaaactgtatgagataagaagtgtttgttgtagtacgccgctaaatttggggcaatttgttacatagcaatgtatagctcatacaatttctgggaaaaaaatagtttattttcgaatcatttttgcataatgcaagaatataaacttgtcacagaataatttatccttgttttaggtggtccaaatatttcattgtcagttatatattagctcaaattaaattttagataatatatattattattaatggtaaagaatgtgtcacatttatctttatagcttttctgtacctaatattgtgtcttgtgcgtaggatgtgctcaataaaaattgattgaataaataagtgaatgaaagaataaatgaatgagtgaaggaattatctgaaatatttttataaaattccccatatgtatgtattacttattacaagtctggtcccatagctgaaaaaatattaaacattatatatatata

SEQ ID NO: 25535 - DNA, 1360 bp, Homo sapiens
  source 1..1360: mol_type = unassigned DNA
atgctctgggaggagacaggcgccgcccctgcgcccgcgcgggcctcggacctcccctacagaattcacttcctgtcctctggcctcattctggtcacaaggcaactgactgaagatggcaaactaattgttgaaggaatgctggacattttctggggagtaaaacgacctatacagctaaaaatacaagatgagaagccattctcttcttttactagtatgaagtcatcagacgtcttctccagcaaaggaatgacacgctggggggaatttgacgatctctatcgtattagtgagctggacaggacccagattcctatgtctgaaaaaaggaattcccaggaagactatttatcttatcacagcaacaccctgaagccacatgcaaaggatgaaccagactccccagtgctctatagaaccatgagtgaagcagctctggtgagaaaaaggatgaagcctctgatgatggacagaaaagaaagacagaaaaatagagcctctattaatggacacttctataaccatgaaacatcaattttcattccagcctttgaatcagaaactaaggtcagagtaaacagtaacatgagaactgaagaagtaataaagcaacttctccaaaaatttaagattgaaaatagtccccaggattttgctcttcacattatttttgcaacaggagaacaaagacgactaaagaagacagacattccgctactgcagaggctcctacagggaccttctgaaaagaatgctcgcattttcctcatggataaagatgcagaagaaattagcagtgatgtggctcagtacattaactttcacttttctctcttggaatccattcttcaaagattaaatgaagaagagaaaagagagattcaaagaatagtaacaaaattcaataaagaaaaggcgattatactgaaatgtcttcaaaataaactagtaataaaaacagagacaacagtttagcagtacaagcttctattgctaaaacatttcaaaaaactcagagatattactctttgatgaatgcataagttctgtacttgcatttatacgaacatatatgagacttgaatcgtagaaaattgaatgtcaaaaaaagctcatttctttttgaagtgatgaggttaattagggttcacagttggacaaaatgagtttgagtttagtttcagtaactgaaataagcttgaatactgcatatgccaaatagcttttatagtaaaccatgtaatgaactcaaatttaaatggtgtcttcagataagcagtttaaacttcatttagcttggactctcaagagaactgaaacataatcaatggattcagaaatgactcagaaaaaagaa

SEQ ID NO: 25536 - DNA, 4331 bp, Homo sapiens
  source 1..4331: mol_type = unassigned DNA
actgaggcacagggagtggctcaggtttcttgacacttccctgctgtggcgaaaaggagaaataattaacagctcctggggctccaggatcgctgatcgcgtcgggggcactgcaagcgcccagctgagccatgctctgggaggagacaggcgccgcccctgcgcccgcgcgggcctcggacctcccctacaggatatcctcagaccatctcaaaaaggaggaaaagatgactatgatggctcaccagtacccctcttggatcttcattaatgagaagacattcataaccagggaacaacttaattctttattgaagacctataacattttttatgagaaccagaaaaatctgcatattttatatggagagactgaagatggcaaactaattgttgaaggaatgctggacattttctggggagtaaaacgacctatacagctaaaaatacaagatgagaagccattctcttcttttactagtatgaagtcatcagacgtcttctccagcaaaggaatgacacgctggggggaatttgacgatctctatcgtattagtgagctggacaggacccagattcctatgtctgaaaaaaggaattcccaggaagactatttatcttatcacagcaacaccctgaagccacatgcaaaggatgaaccagactccccagtgctctatagaaccatgagtgaagcagctctggtgagaaaaaggatgaagcctctgatgatggacagaaaagaaagacagaaaaatagagcctctattaatggacacttctataaccatgaaacatcaattttcattccagcctttgaatcagaaactaaggtcagagtaaacagtaacatgagaactgaagaagtaataaagcaacttctccaaaaatttaagattgaaaatagtccccaggattttgctcttcacattatttttgcaacaggagaacaaagacgactaaagaagacagacattccgctactgcagaggctcctacagggaccttctgaaaagaatgctcgcattttcctcatggataaagatgcagaagaaattagcagtgatgtggctcagtacattaactttcacttttctctcttggaatccattcttcaaagattaaatgaagaagagaaaagagagattcaaagaatagtaacaaaattcaataaagaaaaggcgattatactgaaatgtcttcaaaataaactagtaataaaaacagagacaacagtttagcagtacaagcttctattgctaaaacatttcaaaaaactcagagatattactctttgatgaatgcataagttctgtacttgcatttatacgaacatatatgagacttgaatcgtagaaaattgaatgtcaaaaaaagctcatttctttttgaagtgatgaggttaattagggttcacagttggacaaaatgagtttgagtttagtttcagtaactgaaataagcttgaatactgcatatgccaaatagcttttatagtaaaccatgtaatgaactcaaatttaaatggtgtcttcagataagcagtttaaacttcatttagcttggactctcaagagaactgaaacataatcaatggattcagaaatgactcagaaaaaagaagctgccagttcttggaatgaaaaagaaatacagtcttacaccatcaaggaatctacctgatagtgacagtagcttcttgaaaactctggcattttcataaaatctaggactatcttaaatggcctgttgacttctgactatctgtaacatcagagctgtctggcctttggaaaggaaaaattatggactctgttaagaaatcctaattgaaattttctgaacctccccccagcccttttattctctctcttctgctgatgaaagacctttcatcagttcaaagcttttcttaagctcttttttaagttaattgaactttttctttatttatttttcaaaaaaatgtttatatcacatagacatattacatcggctaaagtaagacttggcccacaaatacctatttgttgctgaatgaatacaatggataaagcaaggctgttgtagctgaagttacatagggaatcccaaactctgccctcttagcatcttattctacatgacaactctcaaggtactcacagatctgtttaacccacttgaaaaaaaaacactaaaaatgaagaaatgctataagtataaactatgattttatttataaattctgtattaaaatggaattatatgcaacattctttcattctgtaaactaattccatttgcattcctcataagcattgtagtaaattgatcatattacatgtactaaggaatgagattatatgcagtaaacccaactggaagattaacaatattaaaatatgaaacatttttaagacaaaggcattacttctcagtattaccaaacctaaactggttgaaggtgaaagtgtgctatggccttttcaagcctaagaagtctctcttactgagtaaaccagaggcttgcatcgctattctttcacctgtcaatattaataagaaaatagtctcatctcacttaaatgaggcaaatgtaatagttaaaattcaacatacttataaaaaactagtgtcatgtacctgccatgaacatgacaaaaggttagtcttcaatagactgaaatgtataagagaagaaccaagtcttacatagaaaaaaaaggtagatatgaaaagaaaaatcacagaagagagaatgcaaatggccactaagtatatgaaaaaagtcgtatcttaacagtgaacaactgtgttagtctgtatcaatcagaagacagaaacaaggtagtaatttaaacagggaaagtttaatataaataataattaagctatgataggagaataataataaagatgaaaagagaaggtaccctaaggctgagggaaagaatcctaacaaggaaaggcaggaatgagggtttcagaattcactggagaaggtgtggttgcagcccactggagagaagtttgctggcttgcccaggccagagcaggaccacagatactggacaagctggtacagccaaccccctaggtgtggaccagctgaggcaggtgggcagatatgcagagggacttggggctttgccaaagggtaagcacaaagaaggagtcacgggttctgttcgaggcactgttgggattaggagccggagggacctactttgcaggaacctagcataactttgtgtgacgagactgcacaagacaaagctcaggcaagtggctcagtagttggccagcccagcagggtcctctgtatgagtgtgcacccagctgaagagaagaaatggagagcagcaattggagcttcaggaccggcttgcactgtggctccaggttataccaccactgcccaaagcaaaagctagagaagcaagtggagaaatgctggagaaagctgcaccctacaggcaaccagcactgcagaaaccactccaggcaaagtagtgaaggaaaaaagcctgctctccagtagcctggcctgtcagcctggaggaatcaggaaagaccccttcctcttgcagtgtgtctccagcgccctctactgacaaagtatgccatcatgcaagctgcaaaggaaacatttcaagagtctatatctattttcacggagcgggcaaccaacagtgaatgtggagctgagagacagtaaaataataactgacatgccaccgaagtacaaagtaaaataaataaataaatacacattttggcctattagcaaagattaagaaatgataacattaaatactcaataaatcaccatgagatggggactcaaacttctggtaaaaatacaaatagatataatttttcttgaaggcaatttagtagtctgtttatcctataattctacttgtaagatcctatcatatgaaaataaccagagatacaaagacattctgcaaagatatgttttatattgttatttattgtgacaaaaggaaataaaaagcctaaatgttcagaaaattattttaaaagatgaaagagggaaataggccatggacggtggctcacgcctgtaatcccagcactttaggaggccaaggtaggtggatcacttgaggttgggatttcgagaccagcctggccaacatggtgaaaccctgcctctactaaaaatacaaaaaatgagccgggtgcaatggcaggcacctataatgccagctactcgggaggctgaggcaggagaatcgcttgaacccgggaggcggaggttgcatgagccgagatggcgccactgctctccagcctggacgacagagcaagactccgtctct

SEQ ID NO: 25537 - DNA, 2735 bp, Homo sapiens
  source 1..2735: mol_type = unassigned DNA
ggcagagacagggcactggtttccctctaccagagttcctgacccagccgagaacaaaccgcgaagcaagttcagccgaacaacgatggtgaaaagggtcctcctgctcacagtgtgaataacaggatatcctcagaccatctcaaaaaggaggaaaagatgactatgatggctcaccagtacccctcttggatcttcattaatgagaagacattcataaccagggaacaacttaattctttattgaagacctataacattttttatgagaaccagaaaaatctgcatattttatatggagagactgaagatggcaaactaattgttgaaggaatgctggacattttctggggagtaaaacgacctatacagctaaaaatacaagatgagaagccattctcttcttttactagtatgaagtcatcagacgtcttctccagcaaaggaatgacacgctggggggaatttgacgatctctatcgtattagtgagctggacaggacccagattcctatgtctgaaaaaaggaattcccaggaagactatttatcttatcacagcaacaccctgaagccacatgcaaaggatgaaccagactccccagtgctctatagaaccatgagtgaagcagctctggtgagaaaaaggatgaagcctctgatgatggacagaaaagaaagacagaaaaatagagcctctattaatggacacttctataaccatgaaattgaaaatagtccccaggattttgctcttcacattatttttgcaacaggagaacaaagacgactaaagaagacagacattccgctactgcagaggctcctacagggaccttctgaaaagaatgctcgcattttcctcatggataaagatgcagaagaaattagcagtgatgtggctcagtacattaactttcacttttctctcttggaatccattcttcaaagattaaatgaagaagagaaaagagagattcaaagaatagtaacaaaattcaataaagaaaaggcgattatactgaaatgtcttcaaaataaactagtaataaaaacagagacaacagtttagcagtacaagcttctattgctaaaacatttcaaaaaactcagagatattactctttgatgaatgcataagttctgtacttgcatttatacgaacatatatgagacttgaatcgtagaaaattgaatgtcaaaaaaagctcatttctttttgaagtgatgaggttaattagggttcacagttggacaaaatgagtttgagtttagtttcagtaactgaaataagcttgaatactgcatatgccaaatagcttttatagtaaaccatgtaatgaactcaaatttaaatggtgtcttcagataagcagtttaaacttcatttagcttggactctcaagagaactgaaacataatcaatggattcagaaatgactcagaaaaaagaagctgccagttcttggaatgaaaaagaaatacagtcttacaccatcaaggaatctacctgatagtgacagtagcttcttgaaaactctggcattttcataaaatctaggactatcttaaatggcctgttgacttctgactatctgtaacatcagagctgtctggcctttggaaaggaaaaattatggactctgttaagaaatcctaattgaaattttctgaacctccccccagcccttttattctctctcttctgctgatgaaagacctttcatcagttcaaagcttttcttaagctcttttttaagttaattgaactttttctttatttatttttcaaaaaaatgtttatatcacatagacatattacatcggctaaagtaagacttggcccacaaatacctatttgttgctgaatgaatacaatggataaagcaaggctgttgtagctgaagttacatagggaatcccaaactctgccctcttagcatcttattctacatgacaactctcaaggtactcacagatctgtttaacccacttgaaaaaaaaacactaaaaatgaagaaatgctataagtataaactatgattttatttataaattctgtattaaaatggaattatatgcaacattctttcattctgtaaactaattccatttgcattcctcataagcattgtagtaaattgatcatattacatgtactaaggaatgagattatatgcagtaaacccaactggaagattaacaatattaaaatatgaaacatttttaagacaaaggcattacttctcagtattaccaaacctaaactggttgaaggtgaaagtgtgctatggccttttcaagcctaagaagtctctcttactgagtaaaccagaggcttgcatcgctattctttcacctgtcaatattaataagaaaatagtctcatctcacttaaatgaggcaaatgtaatagttaaaattcaacatacttataaaaaactagtgtcatgtacctgccatgaacatgacaaaaggttagtcttcaatagactgaaatgtataagagaagaaccaagtcttacatagaaaaaaaaggtagatatgaaaagaaaaatcacagaagagagaatgcaaatggccactaagtatatgaaaaaagtcgtatcttaacagtgaacaactgtgttagtctgtatcaatcagaagacagaaacaaggtagtaatttaaacagggaaagtttaatataaataataattaagctatgataggagaataataataaagatgaaaa

SEQ ID NO: 25538 - DNA, 3661 bp, Homo sapiens
  source 1..3661: mol_type = unassigned DNA
gcgccgccggcaggaggcgccgcggcacgcgcgggtctgggcgccggccccagccaacggcgggtgggagcagcgcgggaacgtggcggcgcggcgggttgtgccggaggtcacggcctccccacatcctttggctgaagcccacagtcctcatccatgaagcctcacccaccatgttttatgggacgcacttcatcatgtccccgcccaccaagagcaaactgaagcggcagagccagctgttgtccagcatgctgtcccggacgctgagctacaagtaccgggacctggactccaccttctccagcctgggcgccagcgatgaccccgccgagctctccacccagctgtcggcccctggtgtcctgaaggtgtttggggacagtgtctgcacaggaacccactacaagagcgtcctggccaccggcacctccagcgcccgtgagctggtgaaggaggcgctggagcggtacgccctggaccccaggcaggccggccagtacgtgctgtgtgacgtggtgggccaagccggcgatgctgggcagcggtggcaggcccggtgctttcgggtgtttggggacagtgagaagcccctcttgatccaggaattatggaaaccccgagaaggtttatcccggaggtttgagctgaggaagaggtcggacgtggaggagctggcagccaaggaggtggacaccatcacggcagggataaacgcccaggcccggaggctgcagcggagtcgcgcgaagggaaccccgaccccggccctgggggatgcccggagctctcctccaccccggttgcgccgcacagtcagtgagaccagcctgagcccagtgaacgccctgcccgctgccgcccagggccccgaggagcccggccccgacgccatgcggtactcgctgtaccagtccccgcatctgctccttctgcagggctacagccagcagcaccctggtgtatgtgctcaaccgggaccggcacacggtgggccagcggaccccagcaagcccagcatcagcctctcagcccccgacatcctgcctctacactgcaccatccgccggcaaccgctcccggacagcggccaggccgcggggaggctggtcctggagcccatccccggggcgcacatctccgtcaacttctccgaggtggggcacaggaccgtggtgctgcaccacggggacctgctctccctggggctctactacctgctgctattcaaggaccccgcgcaggcccagcccctgcccgcccgggccttggcgcgcctccgggctgtgccgcagagctgccggctgtgcggggccgcgctcggggcccggggagccgcctcccctactcaggccgccctgccccggcgccagcagctgctcctggagtttgagccccacctggaggacacgctgctgcagaggatcatgacgttgatcgagccggggggcgacgaccacaagctgacccccgccttcctcctgtgcctctgcatccagcactcggccacccacttccagccgggcacattcgggcagctcctgctcaagatagccaggctgatccgcgagactgtctgggagaaaaccaaagaactagcagagaagcaggcgcaactccaggagcccatctcgctggccagctgcgccatggctgatctggttccagacttgcagcccattcttttctggatgtctaactccatcgagctcctgtactttatccagcagaaatgcccactctacatgcagagcatggaggagcagctggacatcacaggctcgaaggaatcgctgttctcctgcacgctgacggccagcgaggaggccatggcggtgctggaggaggtggtgctgtacgccttccagcagtgcgtctactatgtctccaagtccctgtacatctgcctcccggcactcctggagtgcccgccattccagacggagcgccgtgagagctggtcctcggcccccgaactgcccgaggagctgcgccgcgtggtgtctgtgtaccaggcagccctggacctcctgcggcagctgcaggtgcaccccgaggtggcctcgcagatgctcgcctacctcttcttcttctccgggacactgcttctcaaccagctcctcgacaggggcccctccctgagctgcttccactggcccagaggtgtccaggcctgcgcccgcctgcagcagctcctggagtggatgcggagcgccggcttcggggcggctggagagcacttcttccagaagctctcctgcaccctcaacctgctggccacacccagggcccagctcatccagatgagctggacagccctgcgggctgcgttccccgcactgagcccagcacagctgcaccggctgctgactcactaccagctggcctcggccatgggccccatgagcacctgggagccaggggcccaggacagccccgaggccttcaggtcagaggatgttctggagtcctacgaaaaccccccacccatcgtcctgcccagcgacggcttccaggtggacttggaagccaactgcctggacgacagcatctaccagcacctgctctacgtccgccactttctgtggggtctgcggagcagagccagccccggcagccctggcaggcctggcagtggggcctcccagccagtgtgccccgagggtatgcaccacgtggtccttgacgggcacctggaggccccgagctgccccctggctcccagggaccctggcccagcagcccgggaagtggccccggagcgtactcttcccttgaggggggctccctgggcacaggccccccctggaaggcaacccagccgtgggggctcccaggctggccccccgcacacggactcgtcctgcttgctcacgcctcccagcactccacttggccctgagcctggggaccccgactggccagagtccggcggcccctgtggaaaagcgctcccagagaggcagaggaacggactcagcggcctccggggtgcagctccggaaggagactctgcagcccttgcggaggagtcccctccagccccgtccagccgcagctccagcaccgaggacttctgctacgtcttcacggtggagctggaacgaggcccctccgggctggggatgggcctgatcgacgggatgcacacgcacctgggcgcccccgggctctacatccagaccctgctcccgggcagccccgcagcggccgacgggcgcctgtcgctgggggaccgtatcctggaggtgaatggcagcagcctcctgggccttggctacctgagagctgtggacctgatccgtcatggcgggaagaagatgcggttcctggtcgcgaagtccgacgtggaaacagccaagaagatccatttccgcacgccccctctctaggggggctgcgaggacacccccacaggcccggcacccggtcccacctggtgacactgggcttcctcccgccttcgtccctgttttgtaactgaccaagttgggtcccgggtggggagcctcaccctggggacatgcctgttgataacatgcatctcagtgtaggttctatttatatggcagatgacgtgaaattgtgatgtttgttacagagcttttatgtttaaagacttcaatggagaagtacggttcaataaactatttttcccgtt

SEQ ID NO: 25539 - DNA, 3689 bp, Homo sapiens
  source 1..3689: mol_type = unassigned DNA
cccgccccgcccgttgcgccgccggcaggaggcgccgcggcacgcgcgggtctgggcgccggccccagccaacggcgggtgggagcagcgcgggaacgtggcggcgcggcgggttgtgccggaggtcacggcctccccacatcctttggctgaagcccacagtcctcatccatgaagcctcacccaccatgttttatgggacgcacttcatcatgtccccgcccaccaagagcaaactgaagcggcagagccagctgttgtccagcatgctgtcccggacgctgagctacaagtaccgggacctggactccaccttctccagcctgggcgccagcgatgaccccgccgagctctccacccagctgtcggcccctggtgtcctgaaggtgtttggggacagtgtctgcacaggaacccactacaagagcgtcctggccaccggcacctccagcgcccgtgagctggtgaaggaggcgctggagcggtacgccctggaccccaggcaggccggccagtacgtgctgtgtgacgtggtgggccaagccggcgatgctgggcagcggtggcaggcccggtgctttcgggtgtttggggacagtgagaagcccctcttgatccaggaattatggaaaccccgagaaggtttatcccggaggtttgagctgaggaagaggtcggacgtggaggagctggcagccaaggaggtggacaccatcacggcagggataaacgcccaggcccggaggctgcagcggagtcgcgcgaagggaaccccgaccccggccctgggggatgcccggagctctcctccaccccggttgcgccgcacagtcagtgagaccagcctgagcccagtgaacgccctgcccgctgccgcccagggccccgaggagcccggccccgacgccatgcggtactcgctgtaccagtccccgcatctgctccttctgcagggctacagccagcagcacgacagcctggtgtatgtgctcaaccgggaccggcacacggtgggccagcggaccccctccagcaagcccagcatcagcctctcagcccccgacatcctgcctctacactgcaccatccgccggcaaccgctcccggacagcggccaggccgcggggaggctggtcctggagcccatccccggggcgcacatctccgtcaacttctccgaggtggggcacaggaccgtggtgctgcaccacggggacctgctctccctggggctctactacctgctgctattcaaggaccccgcgcaggcccagcccctgcccgcccgggccttggcgcgcctccgggctgtgccgcagagctgccggctgtgcggggccgcgctcggggcccggggagccgcctcccctactcaggccgccctgccccggcgccagcagctgctcctggagtttgagccccacctggaggacacgctgctgcagaggatcatgacgttgatcgagccggggggcgacgaccacaagctgacccccgccttcctcctgtgcctctgcatccagcactcggccacccacttccagccgggcacattcgggcagctcctgctcaagatagccaggctgatccgcgagactgtctgggagaaaaccaaagaactagcagagaagcaggcgcaactccaggagcccatctcgctggccagctgcgccatggctgatctggttccagacttgcagcccattcttttctggatgtctaactccatcgagctcctgtactttatccagcagaaatgcccactctacatgcagagcatggaggagcagctggacatcacaggctcgaaggaatcgctgttctcctgcacgctgacggccagcgaggaggccatggcggtgctggaggaggtggtgctgtacgccttccagcagtgcgtctactatgtctccaagtccctgtacatctgcctcccggcactcctggagtgcccgccattccagacggagcgccgtgagagctggtcctcggcccccgaactgcccgaggagctgcgccgcgtggtgtctgtgtaccaggcagccctggacctcctgcggcagctgcaggtgcaccccgaggtggcctcgcagatgctcgcctacctcttcttcttctccgggacactgcttctcaaccagctcctcgacaggggcccctccctgagctgcttccactggcccagaggtgtccaggcctgcgcccgcctgcagcagctcctggagtggatgcggagcgccggcttcggggcggctggagagcacttcttccagaagctctcctgcaccctcaacctgctggccacacccagggcccagctcatccagatgagctggacagccctgcgggctgcgttccccgcactgagcccagcacagctgcaccggctgctgactcactaccagctggcctcggccatgggccccatgagcacctgggagccaggggcccaggacagccccgaggccttcaggtcagaggatgttctggagtcctacgaaaaccccccacccatcgtcctgcccagcgacggcttccaggtggacttggaagccaactgcctggacgacagcatctaccagcacctgctctacgtccgccactttctgtggggtctgcggagcagagccagccccggcagccctggcaggcctggcagtggggcctcccagccagtgtgccccgagggtatgcaccacgtggtccttgacgggcacctggaggccccgagctgccccctggctcccagggaccctggcccagcagcccgggaagtggccccggagcgtactcttcccttgaggggggctccctgggcacaggccccccctggaaggcaacccagccgtgggggctcccaggctggccccccgcacacggactcgtcctgcttgctcacgcctcccagcactccacttggccctgagcctggggaccccgactggccagagtccggcggcccctgtggaaaagcgctcccagagaggcagaggaacggactcagcggcctccggggtgcagctccggaaggagactctgcagcccttgcggaggagtcccctccagccccgtccagccgcagctccagcaccgaggacttctgctacgtcttcacggtggagctggaacgaggcccctccgggctggggatgggcctgatcgacgggatgcacacgcacctgggcgcccccgggctctacatccagaccctgctcccgggcagccccgcagcggccgacgggcgcctgtcgctgggggaccgtatcctggaggtgaatggcagcagcctcctgggccttggctacctgagagctgtggacctgatccgtcatggcgggaagaagatgcggttcctggtcgcgaagtccgacgtggaaacagccaagaagatccatttccgcacgccccctctctaggggggctgcgaggacacccccacaggcccggcacccggtcccacctggtgacactgggcttcctcccgccttcgtccctgttttgtaactgaccaagttgggtcccgggtggggagcctcaccctggggacatgcctgttgataacatgcatctcagtgtaggttctatttatatggcagatgacgtgaaattgtgatgtttgttacagagcttttatgtttaaagacttcaatggagaagtacggttcaataaactatttttcccgttctta

SEQ ID NO: 25540 - DNA, 567 bp, Homo sapiens
  source 1..567: mol_type = unassigned DNA
ggaagcgggcagcgtgtgaacaagtgggcaccctctggtctggccaagggaggatgaccaaacggagagaaatgctttctgaaaatcccaaaacagataaggtcacggcctccccacatcctttggctgaagcccacagtcctcatccatgaagcctcacccaccatgttttatgggacgcacttcatcatgtccccgcccaccaagagcaaactgaagcggcagagccagctgttgtccagcatgctgtcccggacgctgagctacaagtaccgggacctggactccaccttctccagcctgggcgccagcgatgaccccgccgagctctccacccagctgtcggcccctggtgtcctgaaggtgtttggggacagtgtctgcacaggaacccactacaagagcgtcctggccaccggcacctccagcgcccgtgagctggtgaaggaggcgctggagcggtacgccctggaccccaggcaggccggccagtacgtgctgtgtgacgtggtgggccaagccggcgatgctgggcagcggtggcaggcccggtgctttcgggtgttt

SEQ ID NO: 25541 - DNA, 3469 bp, Homo sapiens
  source 1..3469: mol_type = unassigned DNA
gcgccggccccagccaacggcgggtgggagcagcgcgggaacgtggcggcgcggcgggttgtgccggaggtcacggcctccccacatcctttggctgaagcccacagtcctcatccatgaagcctcacccaccatgttttatgggacgcacttcatcatgtccccgcccaccaagagcaaactgaagcggcagagccagctgttgtccagcatgctgtcccggacgctgagctacaagtaccgggacctggactccaccttctccagcctgggcgccagcgatgaccccgccgagctctccacccagctgtcggcccctggtgtcctgaaggtgtttggggacagtgtctgcacaggaacccactacaagagcgtcctggccaccggcacctccagcgcccgtgagctggtgaaggaggcgctggagcggtacgccctggaccccaggcaggccggccagtacgtgctgtgtgacgtggtgggccaagccggcgatgctgggcagcggtggcaggcccggtgctttcgggtgtttggggacagtgagaagcccctcttgatccaggaattatggaaaccccgagaaggtttatcccggaggtttgagctgaggaagaggtcggacgtggaggagctggcagccaaggaggtggacaccatcacggcagggataaacgcccaggcccggaggctgcagcggagtcgcgcgaagggaaccccgaccccggccctgggggatgcccggagctctcctccaccccggttgcgccgcacagtcagtgagaccagcctgagcccagtgaacgccctgcccgctgccgcccagggccccgaggagcccggccccgacgccatgcggtactcgctgtaccagtccccgcatctgctccttctgcagggctacagccagcagcacgacagcctggtgtatgtgctcaaccgggaccggcacacggtgggccagcggaccccctccagcaagcccagcatcagcctctcagcccccgacatcctgcctctacactgcaccatccgccggcaaccgctcccggacagcggccaggccgcggggaggctggtcctggagcccatccccggggcgcacatctccgtcaacttctccgaggtggggcacaggaccgtggtgctgcaccacggggacctgctctccctggggctctactacctgctgctattcaaggaccccgcgcaggcccagcccctgcccgcccgggccttggcgcgcctccgggctgtgccgcagagctgccggctgtgcggggccgcgctcggggcccggggagccgcctcccctactcaggccgccctgccccggcgccagcagctgctcctggagtttgagccccacctggaggacacgctgctgcagaggatcatgacgttgatcgagccggggggcgacgaccacaagctgacccccgccttcctcctgtgcctctgcatccagcactcggccacccacttccagccgggcacattcgggcagctcctgctcaagatagccaggctgatccgcgagactgtctgggagaaaaccaaagaactagcagagaagcaggcgcaactgctcgaaggaatcgctgttctcctgcacgctgacggccagcgaggaggccatggcggtgctggaggaggtggtgctgtacgccttccagcagtgcgtctactatgtctccaagtccctgtacatctgcctcccggcactcctggagtgcccgccattccagacggagcgccgtgagagctggtcctcggcccccgaactgcccgaggagctgcgccgcgtggtgtctgtgtaccaggcagccctggacctcctgcggcagctgcaggtgcaccccgaggtggcctcgcagatgctcgcctacctcttcttcttctccgggacactgcttctcaaccagctcctcgacaggggcccctccctgagctgcttccactggcccagaggtgtccaggcctgcgcccgcctgcagcagctcctggagtggatgcggagcgccggcttcggggcggctggagagcacttcttccagaagctctcctgcaccctcaacctgctggccacacccagggcccagctcatccagatgagctggacagccctgcgggctgcgttccccgcactgagcccagcacagctgcaccggctgctgactcactaccagctggcctcggccatgggccccatgagcacctgggagccaggggcccaggacagccccgaggccttcaggtcagaggatgttctggagtcctacgaaaaccccccacccatcgtcctgcccagcgacggcttccaggtggacttggaagccaactgcctggacgacagcatctaccagcacctgctctacgtccgccactttctgtggggtctgcggagcagagccagccccggcagccctggcaggcctggcagtggggcctcccagccagtgtgccccgagggtatgcaccacgtggtccttgacgggcacctggaggccccgagctgccccctggctcccagggaccctggcccagcagcccgggaagtggccccggagcgtactcttcccttgaggggggctccctgggcacaggccccccctggaaggcaacccagccgtgggggctcccaggctggccccccgcacacggactcgtcctgcttgctcacgcctcccagcactccacttggccctgagcctggggaccccgactggccagagtccggcggcccctgtggaaaagcgctcccagagaggcagaggaacggactcagcggcctccggggtgcagctccggaaggagactctgcagcccttgcggaggagtcccctccagccccgtccagccgcagctccagcaccgaggacttctgctacgtcttcacggtggagctggaacgaggcccctccgggctggggatgggcctgatcgacgggatgcacacgcacctgggcgcccccgggctctacatccagaccctgctcccgggcagccccgcagcggccgacgggcgcctgtcgctgggggaccgtatcctggaggtgaatggcagcagcctcctgggccttggctacctgagagctgtggacctgatccgtcatggcgggaagaagatgcggttcctggtcgcgaagtccgacgtggaaacagccaagaagatccatttccgcacgccccctctctaggggggctgcgaggacacccccacaggcccggcacccggtcccacctggtgacactgggcttcctcccgccttcgtccctgttttgtaactgaccaagttgggtcccgggtggggagcctcaccctggggacatgcctgttgataacatgcatctcagtgtaggttctatttatatggcagatgacgtgaaattgtgatgtttgttacagagcttttatgtttaaagacttcaatggagaagtacggttcaataaactatttttcccgtt

SEQ ID NO: 25542 - DNA, 3083 bp, Homo sapiens
  source 1..3083: mol_type = unassigned DNA
agatgcacaggctgccggctgccttgggaaggacggcggggctgctggcgctggtaagggtcttcctcagccagctgacgcctccctccatccggcttttgtttggttttattgggaatggttggaggaaaggccgccacagatggggatggatcttaacctgaaaggctgcgtacagggaactcagcagagggctcagaaaagacagcgccgggtcagctggggactgggataaacgcccaggcccggaggctgcagcggagtcgcgcgaagggaaccccgaccccggccctgggggatgcccggagctctcctccaccccggttgcgccgcacagtcagtgagaccagcctgagcccagtgaacgccctgcccgctgccgcccagggccccgaggagcccggccccgacgccatgcggtactcgctgtaccagtccccgcatctgctccttctgcagggctacagccagcagcacgacagcctggtgtatgtgctcaaccgggaccggcacacggtgggccagcggaccccctccagcaagcccagcatcagcctctcagcccccgacatcctgcctctacactgcaccatccgccggcaaccgctcccggacagcggccaggccgcggggaggctggtcctggagcccatccccggggcgcacatctccgtcaacttctccgaggtggggcacaggaccgtggtgctgcaccacggggacctgctctccctggggctctactacctgctgctattcaaggaccccgcgcaggcccagcccctgcccgcccgggccttggcgcgcctccgggctgtgccgcagagctgccggctgtgcggggccgcgctcggggcccggggagccgcctcccctactcaggccgccctgccccggcgccagcagctgctcctggagtttgagccccacctggaggacacgctgctgcagaggatcatgacgttgatcgagccggggggcgacgaccacaagctgacccccgccttcctcctgtgcctctgcatccagcactcggccacccacttccagccgggcacattcgggcagctcctgctcaagatagccaggctgatccgcgagactgtctgggagaaaaccaaagaactagcagagaagcaggcgcaactccaggagcccatctcgctggccagctgcgccatggctgatctggttccagacttgcagcccattcttttctggatgtctaactccatcgagctcctgtactttatccagcagaaatgcccactctacatgcagagcatggaggagcagctggacatcacaggctcgaaggaatcgctgttctcctgcacgctgacggccagcgaggaggccatggcggtgctggaggaggtggtgctgtacgccttccagcagtgcgtctactatgtctccaagtccctgtacatctgcctcccggcactcctggagtgcccgccattccagacggagcgccgtgagagctggtcctcggcccccgaactgcccgaggagctgcgccgcgtggtgtctgtgtaccaggcagccctggacctcctgcggcagctgcaggtgcaccccgaggtggcctcgcagatgctcgcctacctcttcttcttctccgggacactgcttctcaaccagctcctcgacaggggcccctccctgagctgcttccactggcccagaggtgtccaggcctgcgcccgcctgcagcagctcctggagtggatgcggagcgccggcttcggggcggctggagagcacttcttccagaagctctcctgcaccctcaacctgctggccacacccagggcccagctcatccagatgagctggacagccctgcgggctgcgttccccgcactgagcccagcacagctgcaccggctgctgactcactaccagctggcctcggccatgggccccatgagcacctgggagccaggggcccaggacagccccgaggccttcaggtcagaggatgttctggagtcctacgaaaaccccccacccatcgtcctgcccagcgacggcttccaggtggacttggaagccaactgcctggacgacagcatctaccagcacctgctctacgtccgccactttctgtggggtctgcggagcagagccagccccggcagccctggcaggcctggcagtggggcctcccagccagtgtgccccgagggtatgcaccacgtggtccttgacgggcacctggaggccccgagctgccccctggctcccagggaccctggcccagcagcccgggaagtggccccggagcgtactcttcccttgaggggggctccctgggcacaggccccccctggaaggcaacccagccgtgggggctcccaggctggccccccgcacacggactcgtcctgcttgctcacgcctcccagcactccacttggccctgagcctggggaccccgactggccagagtccggcggcccctgtggaaaagcgctcccagagaggcagaggaacggactcagcggcctccggggtgcagctccggaaggagactctgcagcccttgcggaggagtcccctccagccccgtccagccgcagctccagcaccgaggacttctgctacgtcttcacggtggagctggaacgaggcccctccgggctggggatgggcctgatcgacgggatgcacacgcacctgggcgcccccgggctctacatccagaccctgctcccgggcagccccgcagcggccgacgggcgcctgtcgctgggggaccgtatcctggaggtgaatggcagcagcctcctgggccttggctacctgagagctgtggacctgatccgtcatggcgggaagaagatgcggttcctggtcgcgaagtccgacgtggaaacagccaagaagatccatttccgcacgccccctctctaggggggctgcgaggacacccccacaggcccggcacccggtcccacctggtgacactgggcttcctcccgccttcgtccctgttttgtaactgaccaagttgggtcccgggtggggagcctcaccctggggacatgcctgttgataacatgcatctcagtgta

SEQ ID NO: 25543 - DNA, 2354 bp, Homo sapiens
  source 1..2354: mol_type = unassigned DNA
atgtgctcaaccgggaccggcacacggtgggccagcggaccccctccagcaagcccagcatcagcctctcagcccccgacatcctgcctctacactgcaccatccgccggcaaccgctcccggacagcggccaggccgcggggaggctggctggagcccatccccggggcgcacatctccgtcaacttctccgaggtggggcacaggaccgtggtgctgcaccacggggacctgctctccctggggctctactacctgctgctattcaaggaccccgcgcaggcccagcccctgcccgcccgggccttggcgcgcctccgggctgtgccgcagagctgccggctgtgcggggccgcgctcggggcccggggagccgcctcccctactcaggccgccctgccccggcgccagcagctgctcctggagtttgagccccacctggaggacacgctgctgcagaggatcatgacgttgatcgagccggggggcgacgaccacaagctgacccccgccttcctcctgtgcctctgcatccagcactcggccacccacttccagccgggcacattcgggcagctcctgctcaagatagccaggctgatccgcgagactgtctgggagaaaaccaaagaactagcagagaagcaggcgcaactccaggagcccatctcgctggccagctgcgccatggctgatctggttccagacttgcagcccattcttttctggatgtctaactccatcgagctcctgtactttatccagcagaaatgcccactctacatgcagagcatggaggagcagctggacatcacaggctcgaaggaatcgctgttctcctgcacgctgacggccagcgaggaggccatggcggtgctggaggaggtggtgctgtacgccttccagcagtgcgtctactatgtctccaagtccctgtacatctgcctcccggcactcctggagtgcccgccattccagacggagcgccgtgagagctggtcctcggcccccgaactgcccgaggagctgcgccgcgtggtgtctgtgtaccaggcagccctggacctcctgcggcagctgcaggtgcaccccgaggtggcctcgcagatgctcgcctacctcttcttcttctccgggacactgcttctcaaccagctcctcgacaggggcccctccctgagctgcttccactggcccagaggtgtccaggcctgcgcccgcctgcagcagctcctggagtggatgcggagcgccggcttcggggcggctggagagcacttcttccagaagctctcctgcaccctcaacctgctggccacacccagggcccagctcatccagatgagctggacagccctgcgggctgcgttccccgcactgagcccagcacagctgcaccggctgctgactcactaccagctggcctcggccatgggccccatgagcacctgggagccaggggcccaggacagccccgaggccttcaggtcagaggatgttctggagtcctacgaaaaccccccacccatcgtcctgcccagcgacggcttccaggtggacttggaagccaactgcctggacgacagcatctaccagcacctgctctacgtccgccactttctgtggggtctgcggagcagagccagccccggcagccctggcaggcctggcagtggggcctcccagccagtgtgccccgagggtatgcaccacgtggtccttgacgggcacctggaggccccgagctgccccctggctcccagggaccctggcccagcagcccgggaagtggccccggagcgtactcttcccttgaggggggctccctgggcacaggccccccctggaaggcaaccccccgggctctacatccagaccctgctcccgggcagccccgcagcggccgacgggcgcctgtcgctgggggaccgtatcctggaggtgaatggcagcagcctcctgggccttggctacctgagagctgtggacctgatccgtcatggcgggaagaagatgcggttcctggtcgcgaagtccgacgtggaaacagccaagaagatccatttccgcacgccccctctctaggggggctgcgaggacacccccacaggcccggcacccggtcccacctggtgacactgggcttcctcccgccttcgtccctgttttgtaactgaccaagttgggtcccgggtggggagcctcaccctggggacatgcctgttgataacatgcatctcagtgtaggttctatttatatggcagatgacgtgaaattgtgatgtttgttacagagcttttatgtttaaagacttcaatggagaagtacggttcaataaactatttttcccgtt

SEQ ID NO: 25544 - DNA, 1404 bp, Homo sapiens
  source 1..1404: mol_type = unassigned DNA
agagcaagcggcctgtgcccagatcctgggagaaccccagccgagcccagcctagcccgagcccagcccgagcggagccggagccccaagcccgagccgcgcccagcccgagcagagccctccagccgctcaccccgcgtgccaccccagcgaccctcagccgctctctgcccttctctcggccccgcgcccgccctcgcggcccctctgcccaatgaaactggccgcgatgatcaagaagatgtgcccgagcgactcggagctgagtatcccggccaagaactgctatcgcatggtcatcctcggctcgtccaaggtgggcaagacggccatcgtgtcgcgcttcctcaccggccgcttcgaggacgcctacacgcctaccatcgaggacttccaccgcaagttctactccatccgcggcgaggtctaccagctcgacatcctcgacacgtccggcaaccacccgttccccgccatgcggcgcctctccatcctcacagatcctcgacaccaagtcttgcctcaagaacaaaaccaaggagaacgtggacgtgcccctggtcatctgcggcaacaagggtgaccgcgacttctaccgcgaggtggaccagcgcgagatcgagcagctggtgggcgacgacccccagcgctgcgcctacttcgagatctcggccaagaagaacagcagcctggaccagatgttccgcgcgctcttcgccatggccaagctgcccagcgagatgagcccagacctgcaccgcaaggtctcggtgcagtactgcgacgtgctgcacaagaaggcgctgcggaacaagaagctgctgcgggccggcagcggcggcggcggcggcgacccgggcgacgcctttggcatcgtggcacccttcgcgcgccggcccagcgtacacagcgacctcatgtacatccgcgagaaggccagcgccggcagccaggccaaggacaaggagcgctgcgtcatcagctaggagccccgccgcgctggcgacacaacctaaggaggacctttttgttaagtcaaatccaacggcccggtgcgccccaggccgggagcgcgcgcggactggcgtctcccctcccggcgatccgcccccagcactggggaggcgccactgaaccgagaagggacggtcatctgctccggaaggaaagagaacgggccaagactgggactattccccacccccggtcccccattgaggcccgccacccccataactttgggagcgagggcccagccgagggtggatttatcttctcaaagacctaagagtgagcgcggggtgggggagggatgtgaagttatccagcctctgctaggcttcaagaaaccgtcatgcccgcttgagggtcaggacccacggggcattatcttgtctgtgattc

SEQ ID NO: 25545 - DNA, 5023 bp, Homo sapiens
  source 1..5023: mol_type = unassigned DNA
acaaagtttgtgcctgcggtgcacctcggtcgggctcgccgggctcgagggctggcgggcgccggggctacgaggcccgggggggagagagccggcaggcggcggcggtggtggcgggggcgatgcgccgcgcccggccgcgctaggtgagccggcaccgggagcgcgggccgcggccatgggcaccctgggcaaggcgagagaggctccgcggaaaccttcccatggctgcagagctgcctctaaagcaagactagaggcaaagccagccaacagccccttcccctcccatcccagcttggcccacatcacccagttccgaatgatggtgtctctgggacatttagccaaaggagccagcctggacgatctcattgacagctgcattcaatcttttgatgcagatggaaacctgtgtcgaagtaaccaactgttgcaagtcatgctgaccatgcaccgaattgtcatctcctctgcagaactgctccaaaaagttatcaccctctataaggatgctttggcaaagaattcaccaggactttgcctgaagatctgttattttgtaaggtattggataacagaattctgggtcatgtttaaaatggacgccagcttgacagacactatggaggagtttcaggaactggtgaaagctaagggtgaggagttacattgccgcctgattgacacaactcaaatcaatgcccgtgactggtccaggaaacttactcaaaggataaaatcaaataccagcaagaaacggaaagtctccctgctctttgaccatctggaaccagaagagctatccgagcacctcacctaccttgagttcaagtctttccggaggatatcgttctctgattatcagaattaccttgtaaatagctgtgtgaaggaaaaccccaccatggagcgatctattgctctgtgcaacggcatctcccagtgggtacaactgatggttctcagccgccccacgccgcagctccgagcagaagtcttcatcaagttcatccaggtggctcagaagctccaccaactacagaacttcaatacactgatggctgtgataggtgggctgtgtcacagctcaatctcgaggctcaaggagacaagttcgcatgtcccacatgaaatcaataaggttctcggtgagatgactgagctgctgtcctcctccagaaactacgacaattaccggcgagcctatggagagtgcaccgacttcaagatccccattctgggtgtgcatctcaaggacctcatctccctgtatgaagccatgcctgactatctggaggacgggaaagtgaacgtccataagctactggccctatacaatcatatcagtgaattggtccagctgcaagaggtggccccacccttggaggctaacaaggacttggtacacttgctgacgttatccctggatctttactacactgaggatgaaatctatgagctttcctatgcccgggaaccaaggaaccacagagctccaccactaacaccttcaaagccaccagtagtagtggactgggcttctggagtgtctcccaaacctgatccaaaaaccattagcaaacacgtccagaggatggtggattctgtcttcaagaactatgatcacgaccaggatggatacatttctcaggaagaatttgaaaagattgctgcgagttttccattttccttctgtgtgatggacaaagacagggaaggcctcatcagcagggatgagatcacagcctacttcatgagagccagctcaatctattccaagctgggcctgggctttcctcacaacttccaagagaccacctacctgaagcccactttttgtgacaactgtgctggatttctctggggagtgatcaaacaaggatatcgatgtaaagactgcgggatgaactgtcacaaacaatgcaaagatctggttgtgtttgagtgtaagaagcgagccaagaacccagtagctcccacagagaacaacacttctgtggggccagtgtccaacctttgctcattgggagccaaagatctgctccatgcacctgaggaaggaccttttacattccctaatggggaggctgtggaacatggtgaggagagtaaggatcggaccatcatgctgatgggagtgtcctcacagaagatttctcttcggctgaagagggctgttgcccacaaggccacccagactgaatcacagccttggattggcagtgagggcccttcaggtccctttgtgctgtcttccccaaggaagacagcccaggatactctatatgtgcttcccagtcccacctctccatgtcctagcccagtcttggtcagaaagcgggcttttgtcaagtgggagaataaagactccctcataaaatcaaaggaggagctccgtcacctcagactgcctacctaccaagaactggaacaggaaataaatactctgaaagcagataatgatgccctaaagatccaactgaaatatgcacagaagaaaatagaatccctccagcttgaaaaaagcaatcatgtcttagctcaaatggagcagggtgactgttcttagcccagaaactaagtagcacaatctgtagatgagtatagtgatctcatttcctaaactgtaatgcacagacctgaggaactttacactgaccagctttaaaacagtactttaaaaggaaaagcctgttactgtttatttacctaaaagattcctaatgtgcagcactgttttctctttcagttagttgactcaaagggggaaaactaaagaatgcaaaacttttgctattcataccactgatgttcatcaaaagtatgcgatctaaaacatgactatcatttcctgacaatggggcatctcggtggcctgcctggctgattcttccttaaaactaaaatctctggaaaatggatttgcttcttaccctgtgttttctgcaaactgacttactttgttccagccaaagcttgctaataatagaaaactacccatattccaaaagtagatttcctctgtatcccagcatactttgtgaacctggctccttcttcactacctcagatctaatcaattagtccatgtaccctccttcctcactacagtcataacacatgagcatatctacctagaagccaatttctactgatgtagccacaactttttagaggcctattaaacatgacgttatccaattgcaggtcaacttatagttgtagccttacaacttacaggcatcagaaaataagtaatcaaattaggtacctggaaacatagctattaccatctcatattactgtctaattaaaataaacataacgcaaacatgtttgtccttatatattctacagtggatagaattaggaattgatggcttaaaaaaaaaagtctatgaagagtctgtttaactcttcatgttccatctttctcttctgaagtaaactattttgaaagttctctttttgaaatgaatttgtgcttaactgtcttcactattaatactatttagaaataagctaattggatcagtggcttaaataatagctgactgtgtgtacatatgtatataatatgtatatacaatatcaggcatgcatgtggcttggaattttgtttcctccataaaatgtggaagtgaattaaacaagttttagtcatttatacaaagtcacaaatataaagttcagtttgtcacaagattaaattgctcacaaggtaaaattgtattgtttggcaaaatcacaagtaacaatcctgtgagttttctattatgaaggttaataataaatgggctcatttagttgcctgggcacctattcacaaattcatttgtcagcctctttttagttctcttaaaaaaaaaaaaatcatatgatcattttcctttttgggggtacttagcttccatgcctataaagtctggtaccagactgacttgaaattcataaacaagttgtccaattgccaagaatatgttaacaattaaaagttccaaactaaagccaatagcaccaagtcttcataagaatacaaagtatacatacagtattgcttacctggaggattcagatcatttaggaattctctttgatgaaagatcagttcccatttgagttcctccttgcactgagttttagtgatatagaactagcttgtagttagtgtttcattacattataaagaatagttttacacacgtatttaccgttttccaaatttaaactcagaaatacccaaagcaggcctgcttaagcccactacctggcatataaacttatagtaacactttgttactttctttttaataggacaagcatgagttaggacaaactctaaaaattcatattcttcactattcttgttttcctttgattgatatagaccaaagatggtgtactctaattttttaaaacagtaatggaacacaatttttttcattcttcctcctctccattcgaagtaaagatccccagttagtttttatataaataatctatagggattcaaaaggtgtcacagtccacttaattagtcaaattagcaatggctaaacagtatcaagtactgcagaatttatcactgaaatggataagaggaaatagtttagtcacaggtttttacagtccagcaagggccaaagaggtatagtatacaagttaatagtatttgtgttgagcaacatggggctagtgggatcacagaaatctggaaaaaaaaaaaaaaggctttggcttatcaagcctagtgtaaatttctgcatctcacacgactttagtttggccaggtatttatctgccaaaacaaggacaaatcttgttgtattaacagcagggtcacttctcattttctttgctgacttacctttttactgaccgttgtgaatttctgtctcaaaatgtataatatagaaatgcaagaaaaaaacaaatgtacagattgtaaagttttttgatacctaatgtaagttttctttgtgtaatatttatatgataaaagacattaggatccctacaa

SEQ ID NO: 25546 - DNA, 4528 bp, Homo sapiens
  source 1..4528: mol_type = unassigned DNA
acaaagtttgtgcctgcggtgcacctcggtcgggctcgccgggctcgagggctggcgggcgccggggctacgaggcccgggggggagagagccggcaggcggcggcggtggtggcgggggcgatgcgccgcgcccggccgcgctaggtgagccggcaccgggagcgcgggccgcggccatgggcaccctgggcaaggcgagagaggctccgcggaaaccttcccatggctgcagagctgcctctaaagcaagactagaggcaaagccagccaacagccccttcccctcccatcccagcttggcccacatcacccagttccgaatgatggtgtctctgggacatttagccaaaggagccagcctggacgatctcattgacagctgcattcaatcttttgatgcagatggaaacctgtgtcgaagtaaccaactgttgcaagtcatgctgaccatgcaccgaattgtcatctcctctgcagaactgctccaaaaagttatcaccctatatcctgatgctttggcaaagaattcaccaggactttgcctgaagatctgttattttgtaaggtattggataacagaattctgggtcatgtttaaaatggacgccagcttgacagacactatggaggagtttcaggaactggtgaaagctaagggtgaggagttacattgccgcctgattgacacaactcaaatcaatgcccgtgactggtccaggaaacttactcaaaggataaaatcaaataccagcaagaaacggaaagtctccctgctctttgaccatctggaaccagaagagctatccgagcacctcacctaccttgagttcaagtctttccggaggatatcgttctctgattatcagaattaccttgtaaatagctgtgtgaaggaaaaccccaccatggagcgatctattgctctgtgcaacggcatctcccagtgggtacaactgatggttctcagccgccccacgccgcagctccgagcagaagtcttcatcaagttcatccaggtggctcagaagctccaccaactacagaacttcaatacactgatggctgtgataggtgggctgtgtcacagctcaatctcgaggctcaaggagacaagttcgcatgtcccacatgaaatcaataaggttctcggtgagatgactgagctgctgtcctcctccagaaactacgacaattaccggcgagcctatggagagtgcaccgacttcaagatccccattctgggtgtgcatctcaaggacctcatctccctgtatgaagccatgcctgactatctggaggacgggaaagtgaacgtccataagctactggccctatacaatcatatcagtgaattggtccagctgcaagaggtggccccacccttggaggctaacaaggacttggtacacttgctgacgttatccctggatctttactacactgaggatgaaatctatgagctttcctatgcccgggaaccaaggaaccacagagctccatctgtcttcaagaactatgatcacgaccaggatggatacatttctcaggaagaatttgaaaagattgctgcgagttttccattttccttctgtgtgatggacaaagacagggaaggcctcatcagcagggatgagatcacagcctacttcatgagagccagctcaatctattccaagctgggcctgggctttcctcacaacttccaagagaccacctacctgaagcccactttttgtgacaactgtgctggatttctctggggagtgatcaaacaaggatatcgatgtaaagactgcgggatgaactgtcacaaacaatgcaaagatctggttgtgtttgagtgtaagaagcgagccaagaacccagtagctcccacagagaacaacacttctgtggggccagtgtccaacctttgctcattgggagccaaagatctgctccatggaaataaatactctgaaagcagataatgatgccctaaagatccaactgaaatatgcacagaagaaaatagaatccctccagcttgaaaaaagcaatcatgtcttagctcaaatggagcagggtgactgttcttagcccagaaactaagtagcacaatctgtagatgagtatagtgatctcatttcctaaactgtaatgcacagacctgaggaactttacactgaccagctttaaaacagtactttaaaaggaaaagcctgttactgtttatttacctaaaagattcctaatgtgcagcactgttttctctttcagttagttgactcaaagggggaaaactaaagaatgcaaaacttttgctattcataccactgatgttcatcaaaagtatgcgatctaaaacatgactatcatttcctgacaatggggcatctcggtggcctgcctggctgattcttccttaaaactaaaatctctggaaaatggatttgcttcttaccctgtgttttctgcaaactgacttactttgttccagccaaagcttgctaataatagaaaactacccatattccaaaagtagatttcctctgtatcccagcatactttgtgaacctggctccttcttcactacctcagatctaatcaattagtccatgtaccctccttcctcactacagtcataacacatgagcatatctacctagaagccaatttctactgatgtagccacaactttttagaggcctattaaacatgacgttatccaattgcaggtcaacttatagttgtagccttacaacttacaggcatcagaaaataagtaatcaaattaggtacctggaaacatagctattaccatctcatattactgtctaattaaaataaacataacgcaaacatgtttgtccttatatattctacagtggatagaattaggaattgatggcttaaaaaaaaaagtctatgaagagtctgtttaactcttcatgttccatctttctcttctgaagtaaactattttgaaagttctctttttgaaatgaatttgtgcttaactgtcttcactattaatactatttagaaataagctaattggatcagtggcttaaataatagctgactgtgtgtacatatgtatataatatgtatatacaatatcaggcatgcatgtggcttggaattttgtttcctccataaaatgtggaagtgaattaaacaagttttagtcatttatacaaagtcacaaatataaagttcagtttgtcacaagattaaattgctcacaaggtaaaattgtattgtttggcaaaatcacaagtaacaatcctgtgagttttctattatgaaggttaataataaatgggctcatttagttgcctgggcacctattcacaaattcatttgtcagcctctttttagttctcttaaaaaaaaaaaaatcatatgatcattttcctttttgggggtacttagcttccatgcctataaagtctggtaccagactgacttgaaattcataaacaagttgtccaattgccaagaatatgttaacaattaaaagttccaaactaaagccaatagcaccaagtcttcataagaatacaaagtatacatacagtattgcttacctggaggattcagatcatttaggaattctctttgatgaaagatcagttcccatttgagttcctccttgcactgagttttagtgatatagaactagcttgtagttagtgtttcattacattataaagaatagttttacacacgtatttaccgttttccaaatttaaactcagaaatacccaaagcaggcctgcttaagcccactacctggcatataaacttatagtaacactttgttactttctttttaataggacaagcatgagttaggacaaactctaaaaattcatattcttcactattcttgttttcctttgattgatatagaccaaagatggtgtactctaattttttaaaacagtaatggaacacaatttttttcattcttcctcctctccattcgaagtaaagatccccagttagtttttatataaataatctatagggattcaaaaggtgtcacagtccacttaattagtcaaattagcaatggctaaacagtatcaagtactgcagaatttatcactgaaatggataagaggaaatagtttagtcacaggtttttacagtccagcaagggccaaagaggtatagtatacaagttaatagtatttgtgttgagcaacatggggctagtgggatcacagaaatctggaaaaaaaaaaaaaaggctttggcttatcaagcctagtgtaaatttctgcatctcacacgactttagtttggccaggtatttatctgccaaaacaaggacaaatcttgttgtattaacagcagggtcacttctcattttctttgctgacttacctttttactgaccgttgtgaatttctgtctcaaaatgtataatatagaaatgcaagaaaaaaacaaatgtacagattgtaaagttttttgatacctaatgtaagttttctttgtgtaatatttatatgataaaagacattaggatccct

SEQ ID NO: 25547 - DNA, 4375 bp, Homo sapiens
  source 1..4375: mol_type = unassigned DNA
acaaagtttgtgcctgcggtgcacctcggtcgggctcgccgggctcgagggctggcgggcgccggggctacgaggcccgggggggagagagccggcaggcggcggcggtggtggcgggggcgatgcgccgcgcccggccgcgctaggtgagccggcaccgggagcgcgggccgcggccatgggcaccctgggcaaggcgagagaggctccgcggaaaccttcccatggctgcagagctgcctctaaagcaagactagaggcaaagccagccaacagccccttcccctcccatcccagcttggcccacatcacccagttccgaatgatggtgtctctgggacatttagccaaaggagccagcctggacgatctcattgacagctgcattcaatcttttgatgcagatggaaacctgtgtcgaagtaaccaactgttgcaagtcatgctgaccatgcaccgaattgtcatctcctctgcagaactgctccaaaaagttatcaccctatatcctgatgctttggcaaagaattcaccaggactttgcctgaagatctgttattttgtaaggtattggataacagaattctgggtcatgtttaaaatggacgccagcttgacagacactatggaggagtttcaggaactggtgaaagctaagggtgaggagttacattgccgcctgattgacacaactcaaatcaatgcccgtgactggtccaggaaacttactcaaaggataaaatcaaataccagcaagaaacggaaagtctccctgctctttgaccatctggaaccagaagagctatccgagcacctcacctaccttgagttcaagtctttccggaggatatcgttctctgattatcagaattaccttgtaaatagctgtgtgaaggaaaaccccaccatggagcgatctattgctctgtgcaacggcatctcccagtgggtacaactgatggttctcagccgccccacgccgcagctccgagcagaagtcttcatcaagttcatccaggtggctcagaagctccaccaactacagaacttcaatacactgatggctgtgataggtgggctgtgtcacagctcaatctcgaggctcaaggagacaagttcgcatgtcccacatgaaatcaataaggttctcggtgagatgactgagctgctgtcctcctccagaaactacgacaattaccggcgagcctatggagagtgcaccgacttcaagatccccattctgggtgtgcatctcaaggacctcatctccctgtatgaagccatgcctgactatctggaggacgggaaagtgaacgtccataagctactggccctatacaatcatatcagtgaattggtccagctgcaagaggtggccccacccttggaggctaacaaggacttggtacacttgctgacgttatccctggatctttactacactgaggatgaaatctatgagctttcctatgcccgggaaccaaggaaccacagagctccatctgtcttcaagaactatgatcacgaccaggatggatacatttctcaggaagaatttgaaaagattgctgcgagttttccattttccttctgtgtgatggacaaagacagggaaggcctcatcagcagggatgagatcacagcctacttcatgagagccagctcaatctattccaagctgggcctgggctttcctcacaacttccaagagaccacctacctgaagcccactttttgtgacaactgtgctggatttctctggggagtgatcaaacaaggatatcgatgtaaaggaaataaatactctgaaagcagataatgatgccctaaagatccaactgaaatatgcacagaagaaaatagaatccctccagcttgaaaaaagcaatcatgtcttagctcaaatggagcagggtgactgttcttagcccagaaactaagtagcacaatctgtagatgagtatagtgatctcatttcctaaactgtaatgcacagacctgaggaactttacactgaccagctttaaaacagtactttaaaaggaaaagcctgttactgtttatttacctaaaagattcctaatgtgcagcactgttttctctttcagttagttgactcaaagggggaaaactaaagaatgcaaaacttttgctattcataccactgatgttcatcaaaagtatgcgatctaaaacatgactatcatttcctgacaatggggcatctcggtggcctgcctggctgattcttccttaaaactaaaatctctggaaaatggatttgcttcttaccctgtgttttctgcaaactgacttactttgttccagccaaagcttgctaataatagaaaactacccatattccaaaagtagatttcctctgtatcccagcatactttgtgaacctggctccttcttcactacctcagatctaatcaattagtccatgtaccctccttcctcactacagtcataacacatgagcatatctacctagaagccaatttctactgatgtagccacaactttttagaggcctattaaacatgacgttatccaattgcaggtcaacttatagttgtagccttacaacttacaggcatcagaaaataagtaatcaaattaggtacctggaaacatagctattaccatctcatattactgtctaattaaaataaacataacgcaaacatgtttgtccttatatattctacagtggatagaattaggaattgatggcttaaaaaaaaaagtctatgaagagtctgtttaactcttcatgttccatctttctcttctgaagtaaactattttgaaagttctctttttgaaatgaatttgtgcttaactgtcttcactattaatactatttagaaataagctaattggatcagtggcttaaataatagctgactgtgtgtacatatgtatataatatgtatatacaatatcaggcatgcatgtggcttggaattttgtttcctccataaaatgtggaagtgaattaaacaagttttagtcatttatacaaagtcacaaatataaagttcagtttgtcacaagattaaattgctcacaaggtaaaattgtattgtttggcaaaatcacaagtaacaatcctgtgagttttctattatgaaggttaataataaatgggctcatttagttgcctgggcacctattcacaaattcatttgtcagcctctttttagttctcttaaaaaaaaaaaaatcatatgatcattttcctttttgggggtacttagcttccatgcctataaagtctggtaccagactgacttgaaattcataaacaagttgtccaattgccaagaatatgttaacaattaaaagttccaaactaaagccaatagcaccaagtcttcataagaatacaaagtatacatacagtattgcttacctggaggattcagatcatttaggaattctctttgatgaaagatcagttcccatttgagttcctccttgcactgagttttagtgatatagaactagcttgtagttagtgtttcattacattataaagaatagttttacacacgtatttaccgttttccaaatttaaactcagaaatacccaaagcaggcctgcttaagcccactacctggcatataaacttatagtaacactttgttactttctttttaataggacaagcatgagttaggacaaactctaaaaattcatattcttcactattcttgttttcctttgattgatatagaccaaagatggtgtactctaattttttaaaacagtaatggaacacaatttttttcattcttcctcctctccattcgaagtaaagatccccagttagtttttatataaataatctatagggattcaaaaggtgtcacagtccacttaattagtcaaattagcaatggctaaacagtatcaagtactgcagaatttatcactgaaatggataagaggaaatagtttagtcacaggtttttacagtccagcaagggccaaagaggtatagtatacaagttaatagtatttgtgttgagcaacatggggctagtgggatcacagaaatctggaaaaaaaaaaaaaaggctttggcttatcaagcctagtgtaaatttctgcatctcacacgactttagtttggccaggtatttatctgccaaaacaaggacaaatcttgttgtattaacagcagggtcacttctcattttctttgctgacttacctttttactgaccgttgtgaatttctgtctcaaaatgtataatatagaaatgcaagaaaaaaacaaatgtacagattgtaaagttttttgatacctaatgtaagttttctttgtgtaatatttatatgataaaagacattaggatccct

SEQ ID NO: 25548 - DNA, 2296 bp, Homo sapiens
  source 1..2296: mol_type = unassigned DNA
cgcggccatgggcaccctgggcaaggcgagagaggctccgcggaaaccttcccatggctgcagagctgcctctaaagcaagactagaggcaaagccagccaacagccccttcccctcccatcccagcttggcccacatcacccagttccgaatgatggtgtctctgggacatttagccaaaggagccagcctggacgatctcattgacagctgcattcaatcttttgatgcagatggaaacctgtgtcgaagtaaccaactgttgcaagtcatgctgaccatgcaccgaattgtcatctcctctgcagaactgctccaaaaagttatcaccctctataaggatgctttggcaaagaattcaccaggactttgcctgaagatctgttattttgtaaggtattggataacagaattctgggtcatgtttaaaatggacgccagcttgacagacactatggaggagtttcaggaactggtgaaagctaagggtgaggagttacattgccgcctgattgacacaactcaaatcaatgcccgtgactggtccaggaaacttactcaaaggataaaatcaaataccagcaagaaacggaaagtctccctgctctttgaccatctggaaccagaagagctatccgagcacctcacctaccttgagttcaagtctttccggaggatatcgttctctgattatcagaattaccttgtaaatagctgtgtgaaggaaaaccccaccatggagcgatctattgctctgtgcaacggcatctcccagtgggtacaactgatggttctcagccgccccacgccgcagctccgagcagaagtcttcatcaagttcatccaggtggctcagaagctccaccaactacagaacttcaatacactgatggctgtgataggtgggctgtgtcacagctcaatctcgaggctcaaggagacaagttcgcatgtcccacatgaaatcaataaggttctcggtgagatgactgagctgctgtcctcctccagaaactacgacaattaccggcgagcctatggagagtgcaccgacttcaagatccccattctgggtgtgcatctcaaggacctcatctccctgtatgaagccatgcctgactatctggaggacgggaaagtgaacgtccataagctactggccctatacaatcatatcagtgaattggtccagctgcaagaggtggccccacccttggaggctaacaaggacttggtacacttgctgacgttatccctggatctttactacactgaggatgaaatctatgagctttcctatgcccgggaaccaaggaaccacagagctccatctgtcttcaagaactatgatcacgaccaggatggatacatttctcaggaagaatttgaaaagattgctgcgagttttccattttccttctgtgtgatggacaaagacagggaaggcctcatcagcagggatgagatcacagcctacttcatgagagccagctcaatctattccaagctgggcctgggctttcctcacaacttccaagagaccacctacctgaagcccactttttgtgacaactgtgctggatttctctggggagtgatcaaacaaggatatcgatgtaaagactgcgggatgaactgtcacaaacaatgcaaagatctggttgtgtttgagtgtaagaagcgagccaagaacccagtagctcccacagagaacaacacttctgtggggccagtgtccaacctttgctcattgggagccaaagatctgctccatgcacctgaggaaggaccttttacattccctaatggggaggctgtggaacatggtgaggagagtaaggatcggaccatcatgctgatgggagtgtcctcacagaagatttctcttcggctgaagagggctgttgcccacaaggccacccagactgaatcacagccttggattggcagtgagggcccttcaggtccctttgtgctgtcttccccaaggaagacagcccaggatactctatatgtgcttcccagtcccacctctccatgtcctagcccagtcttggtcagaaagcgggcttttgtcaagtgggagaataaagactccctcataaaatcaaaggaggagctccgtcacctcagactgcctacctaccaagaactggaacaggaaataaatactctgaaagcagataatgatgccctaaagatccaactgaaatatgcacagaagaaaatagaatccctccagcttgaaaaaagcaatcatgtcttagctcaaatggagcagggtgactgttcttag

SEQ ID NO: 25549 - DNA, 2574 bp, Homo sapiens
  source 1..2574: mol_type = unassigned DNA
gcgtctgggccagatatggatcacgcctgtggagcgcacctccacacaggcagccctcgtccaaggtgcagggcgcagggcacagggcacatgtctacggcccagtcctgcagacggctacctagagaccccagggcacaggaaaccttcccatggctgcagagctgcctctaaagcaagactagaggcaaagccagccaacagccccttcccctcccatcccagcttggcccacatcacccagttccgaatgatggtgtctctgggacatttagccaaaggagccagcctggacgatctcattgacagctgcattcaatcttttgatgcagatggaaacctgtgtcgaagtaaccaactgttgcaagtcatgctgaccatgcaccgaattgtcatctcctctgcagaactgctccaaaaagttatcaccctctataaggatgctttggcaaagaattcaccaggactttgcctgaagatctgttattttgtaaggtattggataacagaattctgggtcatgtttaaaatggacgccagcttgacagacactatggaggagtttcaggaactggtgaaagctaagggtgaggagttacattgccgcctgattgacacaactcaaatcaatgcccgtgactggtccaggaaacttactcaaaggataaaatcaaataccagcaagaaacggaaagtctccctgctctttgaccatctggaaccagaagagctatccgagcacctcacctaccttgagttcaagtctttccggaggatatcgttctctgattatcagaattaccttgtaaatagctgtgtgaaggaaaaccccaccatggagcgatctattgctctgtgcaacggcatctcccagtgggtacaactgatggttctcagccgccccacgccgcagctccgagcagaagtcttcatcaagttcatccaggtggctcagaagctccaccaactacagaacttcaatacactgatggctgtgataggtgggctgtgtcacagctcaatctcgaggctcaaggagacaagttcgcatgtcccacatgaaatcaataaggttctcggtgagatgactgagctgctgtcctcctccagaaactacgacaattaccggcgagcctatggagagtgcaccgacttcaagatccccattctgggtgtgcatctcaaggacctcatctccctgtatgaagccatgcctgactatctggaggacgggaaagtgaacgtccataagctactggccctatacaatcatatcagtgaattggtccagctgcaagaggtggccccacccttggaggctaacaaggacttggtacacttgctgacgttatccctggatctttactacactgaggatgaaatctatgagctttcctatgcccgggaaccaaggaaccacagagctccaccactaacaccttcaaagccaccagtagtagtggactgggcttctggagtgtctcccaaacctgatccaaaaaccattagcaaacacgtccagaggatggtggattctgtcttcaagaactatgatcacgaccaggatggatacatttctcaggaagaatttgaaaagattgctgcgagttttccattttccttctgtgtgatggacaaagacagggaaggcctcatcagcagggatgagatcacagcctacttcatgagagccagctcaatctattccaagctgggcctgggctttcctcacaacttccaagagaccacctacctgaagcccactttttgtgacaactgtgctggatttctctggggagtgatcaaacaaggatatcgatgtaaagactgcgggatgaactgtcacaaacaatgcaaagatctggttgtgtttgagtgtaagaagcgagccaagaacccagtagctcccacagagaacaacacttctgtggggccagtgtccaacctttgctcattgggagccaaagatctgctccatgcacctgaggaaggaccttttacattccctaatggggaggctgtggaacatggtgaggagagtaaggatcggaccatcatgctgatgggagtgtcctcacagaagatttctcttcggctgaagagggctgttgcccacaaggccacccagactgaatcacagccttggattggcagtgagggcccttcaggtccctttgtgctgtcttccccaaggaagacagcccaggatactctatatgtgcttcccagtcccacctctccatgtcctagcccagtcttggtcagaaagcgggcttttgtcaagtgggagaataaagactccctcataaaatcaaaggaggagctccgtcacctcagactgcctacctaccaagaactggaacaggaaataaatactctgaaagcagataatgatgccctaaagatccaactgaaatatgcacagaagaaaatagaatccctccagcttgaaaaaagcaatcatgtcttagctcaaatggagcagggtgactgttcttagcccagaaactaagtagcacaatctgtagatgagtatagtgatctcatttcctaaactgtaatgcacagacctga

SEQ ID NO: 25550 - DNA, 1621 bp, Homo sapiens
  source 1..1621: mol_type = unassigned DNA
acaaagtttgtgcctgcggtgcacctcggtcgggctcgccgggctcgagggctggcgggcgccggggctacgaggcccgggggggagagagccggcaggcggcggcggtggtggcgggggcgatgcgccgcgcccggccgcgctaggtgagccggcaccgggagcgcgggccgcggccatgggcaccctgggcaaggcgagagaggctccgcggaaaccttcccatggctgcagagctgcctctaaagcaagactagaggcaaagccagccaacagccccttcccctcccatcccagcttggcccacatcacccagttccgaatgatggtgtctctgggacatttagccaaaggagccagcctggacgatctcattgacagctgcattcaatcttttgatgcagatggaaacctgtgtcgaagtaaccaactgttgcaagtcatgctgaccatgcaccgaattgtcatctcctctgcagaactgctccaaaaagttatcaccctatatcctgatgctttggcaaagaattcaccaggactttgcctgaagatctgttattttgtaaggtattggataacagaattctgggtcatgtttaaaatggacgccagcttgacagacactatggaggagtttcaggaactggtgaaagctaagggtgaggagttacattgccgcctgattgacacaactcaaatcaatgcccgtgactggtccaggaaacttactcaaaggataaaatcaaataccagcaagaaacggaaagtctccctgctctttgaccatctggaaccagaagagctatccgagcacctcacctaccttgagttcaagtctttccggaggatatcgttctctgattatcagaattaccttgtaaatagctgtgtgaaggaaaaccccaccatggagcgatctattgctctgtgcaacggcatctcccagtgggtacaactgatggttctcagccgccccacgccgcagctccgagcagaagtcttcatcaagttcatccaggtggctcagaagctccaccaactacagaacttcaatacactgatggctgtgataggtgggctgtgtcacagctcaatctcgaggctcaaggagacaagttcgcatgtcccacatgaaatcaataaggttctcggtgagatgactgagctgctgtcctcctccagaaactacgacaattaccggcgagcctatggagagtgcaccgacttcaagatccccattctgggtgtgcatctcaaggacctcatctccctgtatgaagccatgcctgactatctggaggacgggaaagtgaacgtccataagctactggccctatacaatcatatcagtgaattggtccagctgcaagaggtggccccacccttggaggctaacaaggacttggtacacttgctgacgttatccctggatctttactacactgaggatgaaatctatgagctttcctatgcccgggaaccaaggaaccacagagctccatctgtcttcaagaactatgatcacgaccaggatggatacatttctcaggaagaatttgaaaagattgctgcgagttttccattttccttctgtgtgatggacaaagacagaagtggggcc

SEQ ID NO: 25551 - DNA, 1757 bp, Homo sapiens
  source 1..1757: mol_type = unassigned DNA
cgcggccatgggcaccctgggcaaggcgagagaggctccgcggaaaccttcccatggctgcagagctgcctctaaagcaagactagaggcaaagccagccaacagccccttcccctcccatcccagcttggcccacatcacccagttccgaatgatggtgtctctgggacatttagccaaaggagccagcctggacgatctcattgacagctgcattcaatcttttgatgcagatggaaacctgtgtcgaagtaaccaactgttgcaagtcatgctgaccatgcaccgaattgtcatctcctctgcagaactgctccaaaaagttatcaccctctataaggatgctttggcaaagaattcaccaggactttgcctgaagatctgttattttgtaaggtattggataacagaattctgggtcatgtttaaaatggacgccagcttgacagacactatggaggagtttcaggaactggtgaaagctaagggtgaggagttacattgccgcctgattgacacaactcaaatcaatgcccgtgactggtccaggaaacttactcaaaggataaaatcaaataccagcaagaaacggaaagtctccctgctctttgaccatctggaaccagaagagctatccgagcacctcacctaccttgagttcaagtctttccggaggatatcgttctctgattatcagaattaccttgtaaatagctgtgtgaaggaaaaccccaccatggagcgatctattgctctgtgcaacggcatctcccagtgggtacaactgatggttctcagccgccccacgccgcagctccgagcagaagtcttcatcaagttcatccaggtggctcagaagctccaccaactacagaacttcaatacactgatggctgtgataggtgggctgtgtcacagctcaatctcgaggctcaaggagacaagttcgcatgtcccacatgaaatcaataaggttctcggtgagatgactgagctgctgtcctcctccagaaactacgacaattaccggcgagcctatggagagtgcaccgacttcaagatccccattctgggtgtgcatctcaaggacctcatctccctgtatgaagccatgcctgactatctggaggacgggaaagtgaacgtccataagctactggccctatacaatcatatcagtgaattggtccagctgcaagaggtggccccacccttggaggctaacaaggacttggtacacttgctgacgttatccctggatctttactacactgaggatgaaatctatgagctttcctatgcccgggaaccaaggaaccacagagctccatctgtcttcaagaactatgatcacgaccaggatggatacatttctcaggaagaatttgaaaagattgctgcgagttttccattttccttctgtgtgatggacaaagacagggaaggcctcatcagcagggatgagatcacagcctacttcatgagagccagctcaatctattccaagctgggcctgggctttcctcacaacttccaagagaccacctacctgaagcccactttttgtgacaactgtgctggatttctctggggagtgatcaaacaaggatatcgatgtaaaggaaataaatactctgaaagcagataatgatgccctaaagatccaactgaaatatgcacagaagaaaatagaatccctccagcttgaaaaaagcaatcatgtcttagctcaaatggagcagggtgactgttcttag

SEQ ID NO: 25552 - DNA, 1910 bp, Homo sapiens
  source 1..1910: mol_type = unassigned DNA
cgcggccatgggcaccctgggcaaggcgagagaggctccgcggaaaccttcccatggctgcagagctgcctctaaagcaagactagaggcaaagccagccaacagccccttcccctcccatcccagcttggcccacatcacccagttccgaatgatggtgtctctgggacatttagccaaaggagccagcctggacgatctcattgacagctgcattcaatcttttgatgcagatggaaacctgtgtcgaagtaaccaactgttgcaagtcatgctgaccatgcaccgaattgtcatctcctctgcagaactgctccaaaaagttatcaccctctataaggatgctttggcaaagaattcaccaggactttgcctgaagatctgttattttgtaaggtattggataacagaattctgggtcatgtttaaaatggacgccagcttgacagacactatggaggagtttcaggaactggtgaaagctaagggtgaggagttacattgccgcctgattgacacaactcaaatcaatgcccgtgactggtccaggaaacttactcaaaggataaaatcaaataccagcaagaaacggaaagtctccctgctctttgaccatctggaaccagaagagctatccgagcacctcacctaccttgagttcaagtctttccggaggatatcgttctctgattatcagaattaccttgtaaatagctgtgtgaaggaaaaccccaccatggagcgatctattgctctgtgcaacggcatctcccagtgggtacaactgatggttctcagccgccccacgccgcagctccgagcagaagtcttcatcaagttcatccaggtggctcagaagctccaccaactacagaacttcaatacactgatggctgtgataggtgggctgtgtcacagctcaatctcgaggctcaaggagacaagttcgcatgtcccacatgaaatcaataaggttctcggtgagatgactgagctgctgtcctcctccagaaactacgacaattaccggcgagcctatggagagtgcaccgacttcaagatccccattctgggtgtgcatctcaaggacctcatctccctgtatgaagccatgcctgactatctggaggacgggaaagtgaacgtccataagctactggccctatacaatcatatcagtgaattggtccagctgcaagaggtggccccacccttggaggctaacaaggacttggtacacttgctgacgttatccctggatctttactacactgaggatgaaatctatgagctttcctatgcccgggaaccaaggaaccacagagctccatctgtcttcaagaactatgatcacgaccaggatggatacatttctcaggaagaatttgaaaagattgctgcgagttttccattttccttctgtgtgatggacaaagacagggaaggcctcatcagcagggatgagatcacagcctacttcatgagagccagctcaatctattccaagctgggcctgggctttcctcacaacttccaagagaccacctacctgaagcccactttttgtgacaactgtgctggatttctctggggagtgatcaaacaaggatatcgatgtaaagactgcgggatgaactgtcacaaacaatgcaaagatctggttgtgtttgagtgtaagaagcgagccaagaacccagtagctcccacagagaacaacacttctgtggggccagtgtccaacctttgctcattgggagccaaagatctgctccatggaaataaatactctgaaagcagataatgatgccctaaagatccaactgaaatatgcacagaagaaaatagaatccctccagcttgaaaaaagcaatcatgtcttagctcaaatggagcagggtgactgttcttag

SEQ ID NO: 25553 - DNA, 2310 bp, Homo sapiens
  source 1..2310: mol_type = unassigned DNA
cgatttcattcctcgctccccacaggtccctctccccaaaatattcccatcttgtcctagcccatcccccagactatctcaaggaccagctgtccccacgcccccgacctccactaggcctgtgccacccgctgcctgcaggaagacgcccggtcccgggccgggttagccccatgggaacggggttcggtccgagcccggtgggaggctcccggagcgcagcctgggcccagcccaccccgcgccggcggccatggcaggcaccctggacctggacaagggctgcacggtggaggagctgctccgcgggtgcatcgaagccttcgatgactccgggaaggtgcgggacccgcagctggtgcgcatgttcctcatgatgcacccctggtacatcccctcctctcagctggcggccaagctgctccacatctaccaacaatcccggaaggacaactccaattccctgcaggtgaaaacgtgccacctggtcaggtactggatctccgccttcccagcggagtttgacttgaacccggagttggctgagcagatcaaggagctgaaggctctgctagaccaagaagggaaccgacggcacagcagcctaatcgacatagacagcgtccctacctacaagtggaagcggcaggtgactcagcggaaccctgtgggacagaaaaagcgcaagatgtccctgttgtttgaccacctggagcccatggagctggcggagcatctcacctacttggagtatcgctccttctgcaagatcctgtttcaggactatcacagtttcgtgactcatggctgcactgtggacaaccccgtcctggagcggttcatctccctcttcaacagcgtctcacagtgggtgcagctcatgatcctcagcaaacccacagccccgcagcgggccctggtcatcacacactttgtccacgtggcggagaagctgctacagctgcagaacttcaacacgctgatggcagtggtcgggggcctgagccacagctccatctcccgcctcaaggagacccacagccacgttagccctgagaccatcaagctctgggagggtctcacggaactagtgacggcgacaggcaactatggcaactaccggcgtcggctggcagcctgtgtgggcttccgcttcccgatcctgggtgtgcacctcaaggacctggtggccctgcagctggcactgcctgactggctggacccagcccggacccggctcaacggggccaagatgaagcagctctttagcatcctggaggagctggccatggtgaccagcctgcggccaccagtacaggccaaccccgacctgctgagcctgctcacggtgtctctggatcagtatcagacggaggatgagctgtaccagctgtccctgcagcgggagccgcgctccaagtcctcgccaaccagccccacgagttgcaccccaccaccccggcccccggtactggaggagtggacctcggctgccaaacccaagctggatcaggccctcgtggtggagcacatcgagaagatggtggagtctgtgttccggaactttgacgtcgatggggatggccacatctcacaggaagaattccagatcatccgtgggaacttcccttacctcagcgcctttggggacctcgaccagaaccaggatggctgcatcagcagggaggagatggtttcctatttcctgcgctccagctctgtgttgggggggcgcatgggcttcgtacacaacttccaggagagcaactccttgcgccccgtcgcctgccgccactgcaaagccctgatcctgggcatctacaagcagggcctcaaatgccgagcctgtggagtgaactgccacaagcagtgcaaggatcgcctgtcagttgagtgtcggcgcagggcccagagtgtgagcctggaggggtctgcaccctcaccctcacccatgcacagccaccatcaccgcgccttcagcttctctctgccccgccctggcaggcgaggctccaggcctccagagatccgtgaggaggaggtacagacggtggaggatggggtgtttgacatccacttgtaatagatgctgtggttggatcaaggactcattcctgccttggagaaaatacttcaaccagagcagggagcctgggggtgtcggggcaggaggctggggatgggggtgggatatgagggtggcatgcagctgagggcagggccagggctggtgtccctaaggttgtacagactcttgtgaatatttgtattttccagatggaataaaaaggcccgtgtaattaaccttca

SEQ ID NO: 25554 - DNA, 2983 bp, Homo sapiens
  source 1..2983: mol_type = unassigned DNA
gttgctaatggtgtcatgcacccaccggccacccttggcgcgagcgcccccctctggacaccctgctccgtgcgcgctcacagttcgcctgtgcggggccggggccagggtcaggagccggggatagggaggaagagggcctgtggacaagctgagccgggacccctgggacctttgcggaggtggcctgggagcgctcagttcccaggctcaggcttcccgctgacgcctcctggccgcagcgggctccccccgccccaggaatgttcctctcccatccagtccgcctcccctagggcaggccccctgggggctgccgcagccccgcctcgccttcctgggctcccgggagggggcgaggcgggcaggacgcctgggttctctccccccacctcccataccagggagaaattcctccgaggtcccctcaggctctgggttcccaaaataaccctgcgggggaagggaggctgtggagggagggaagcgggaggggcgcagagccgagctgcggggtgctgcaggtgcctctggggagagggcgcgaggagaaggcgccctgcggggggctgggcgccagccagtcctgggatcttggttcgtccccatcctcgtgaagcccctcggccttcccgcgactccgagggtgggccggaagcctctctgcgggtccgtttcccaactggcgggttgcaccatcccgggccagaccgtttaaccccgggagtggccgcgggggacaactccgcccctgtccagcagggggcgtgcccgccccgccccgtttctgcccgcggggccgctcccccgcccgcgactccgcagactcccgctctgcctctcccgggacaggggttcggtccgagcccggtgggaggctcccggagcgcagcctgggcccagcccaccccgcgccggcggccatggcaggcaccctggacctggacaagggctgcacggtggaggagctgctccgcgggtgcatcgaagccttcgatgactccgggaaggtgcgggacccgcagctggtgcgcatgttcctcatgatgcacccctggtacatcccctcctctcagctggcggccaagctgctccacatctaccaacaatcccggaaggacaactccaattccctgcaggtgaaaacgtgccacctggtcaggtactggatctccgccttcccagcggagtttgacttgaacccggagttggctgagcagatcaaggagctgaaggctctgctagaccaagaagggaaccgacggcacagcagcctaatcgacatagacagcgtccctacctacaagtggaagcggcaggtgactcagcggaaccctgtgggacagaaaaagcgcaagatgtccctgttgtttgaccacctggagcccatggagctggcggagcatctcacctacttggagtatcgctccttctgcaagatcctgtttcaggactatcacagtttcgtgactcatggctgcactgtggacaaccccgtcctggagcggttcatctccctcttcaacagcgtctcacagtgggtgcagctcatgatcctcagcaaacccacagccccgcagcgggccctggtcatcacacactttgtccacgtggcggagaagctgctacagctgcagaacttcaacacgctgatggcagtggtcgggggcctgagccacagctccatctcccgcctcaaggagacccacagccacgttagccctgagaccatcaagctctgggagggtctcacggaactagtgacggcgacaggcaactatggcaactaccggcgtcggctggcagcctgtgtgggcttccgcttcccgatcctgggtgtgcacctcaaggacctggtggccctgcagctggcactgcctgactggctggacccagcccggacccggctcaacggggccaagatgaagcagctctttagcatcctggaggagctggccatggtgaccagcctgcggccaccagtacaggccaaccccgacctgctgagcctgctcacggtgtctctggatcagtatcagacggaggatgagctgtaccagctgtccctgcagcgggagccgcgctccaagtcctcgccaaccagccccacgagttgcaccccaccaccccggcccccggtactggaggagtggacctcggctgccaaacccaagctggatcaggccctcgtggtggagcacatcgagaagatggtggagtctgtgttccggaactttgacgtcgatggggatggccacatctcacaggaagaattccagatcatccgtgggaacttcccttacctcagcgcctttggggacctcgaccagaaccaggatggctgcatcagcagggaggagatggtttcctatttcctgcgctccagctctgtgttgggggggcgcatgggcttcgtacacaacttccaggagagcaactccttgcgccccgtcgcctgccgccactgcaaagccctgatcctgggcatctacaagcagggcctcaaatgccgagcctgtggagtgaactgccacaagcagtgcaaggatcgcctgtcagttgagtgtcggcgcagggcccagagtgtgagcctggaggggtctgcaccctcaccctcacccatgcacagccaccatcaccgcgccttcagcttctctctgccccgccctggcaggcgaggctccaggcctccagcagagatccgtgaggaggaggtacagacggtggaggatggggtgtttgacatccacttgtaatagatgctgtggttggatcaaggactcattcctgccttggagaaaatacttcaaccagagcagggagcctgggggtgtcggggcaggaggctggggatgggggtgggatatgagggtggcatgcagctgagggcagggccagggctggtgtccctaaggttgtacagactcttgtgaatatttgtattttccagatggaataaaaaggcccgtgtaattaaccttca

SEQ ID NO: 25555 - DNA, 2221 bp, Homo sapiens
  source 1..2221: mol_type = unassigned DNA
cgggagccgcagccgcagcgaggccggcgggcgggagcgcacggaggtggggtcggccaggccggtgcgggctccttgcggcaggtcccaagagggttcggtccgagcccggtgggaggctcccggagcgcagcctgggcccagcccaccccgcgccggcggccatggcaggcaccctggacctggacaagggctgcacggtggaggagctgctccgcgggtgcatcgaagccttcgatgactccgggaaggtgcgggacccgcagctggtgcgcatgttcctcatgatgcacccctggtacatcccctcctctcagctggcggccaagctgctccacatctaccaacaatcccggaaggacaactccaattccctgcaggtgaaaacgtgccacctggtcaggtactggatctccgccttcccagcggagtttgacttgaacccggagttggctgagcagatcaaggagctgaaggctctgctagaccaagaagggaaccgacggcacagcagcctaatcgacatagacagcgtccctacctacaagtggaagcggcaggtgactcagcggaaccctgtgggacagaaaaagcgcaagatgtccctgttgtttgaccacctggagcccatggagctggcggagcatctcacctacttggagtatcgctccttctgcaagatcctgtttcaggactatcacagtttcgtgactcatggctgcactgtggacaaccccgtcctggagcggttcatctccctcttcaacagcgtctcacagtgggtgcagctcatgatcctcagcaaacccacagccccgcagcgggccctggtcatcacacactttgtccacgtggcggagaagctgctacagctgcagaacttcaacacgctgatggcagtggtcgggggcctgagccacagctccatctcccgcctcaaggagacccacagccacgttagccctgagaccatcaagctctgggagggtctcacggaactagtgacggcgacaggcaactatggcaactaccggcgtcggctggcagcctgtgtgggcttccgcttcccgatcctgggtgtgcacctcaaggacctggtggccctgcagctggcactgcctgactggctggacccagcccggacccggctcaacggggccaagatgaagcagctctttagcatcctggaggagctggccatggtgaccagcctgcggccaccagtacaggccaaccccgacctgctgagcctgctcacggtgtctctggatcagtatcagacggaggatgagctgtaccagctgtccctgcagcgggagccgcgctccaagtcctcgccaaccagccccacgagttgcaccccaccaccccggcccccggtactggaggagtggacctcggctgccaaacccaagctggatcaggccctcgtggtggagcacatcgagaagatggtggagtctgtgttccggaactttgacgtcgatggggatggccacatctcacaggaagaattccagatcatccgtgggaacttcccttacctcagcgcctttggggacctcgaccagaaccaggatggctgcatcagcagggaggagatggtttcctatttcctgcgctccagctctgtgttgggggggcgcatgggcttcgtacacaacttccaggagagcaactccttgcgccccgtcgcctgccgccactgcaaagccctgatcctgggcatctacaagcagggcctcaaatgccgagcctgtggagtgaactgccacaagcagtgcaaggatcgcctgtcagttgagtgtcggcgcagggcccagagtgtgagcctggaggggtctgcaccctcaccctcacccatgcacagccaccatcaccgcgccttcagcttctctctgccccgccctggcaggcgaggctccaggcctccagagatccgtgaggaggaggtacagacggtggaggatggggtgtttgacatccacttgtaatagatgctgtggttggatcaaggactcattcctgccttggagaaaatacttcaaccagagcagggagcctgggggtgtcggggcaggaggctggggatgggggtgggatatgagggtggcatgcagctgagggcagggccagggctggtgtccctaaggttgtacagactcttgtgaatatttgtattttccagatggaataaaaaggcccgtgtaattaaccttca

SEQ ID NO: 25556 - DNA, 2304 bp, Homo sapiens
  source 1..2304: mol_type = unassigned DNA
gtgcatgtgtgtgggagtgtacatgcgtggagaggcactgccttgcgtgtgtgcacacgtgtgaggatgtcagcgcctgtgtggccgcgggactcaaggctggcctggctcaagtgaacagcacgtccaggaggcgacctcgtccgcgggtttgcattctggggtggacgagctgggggttcggtccgagcccggtgggaggctcccggagcgcagcctgggcccagcccaccccgcgccggcggccatggcaggcaccctggacctggacaagggctgcacggtggaggagctgctccgcgggtgcatcgaagccttcgatgactccgggaaggtgcgggacccgcagctggtgcgcatgttcctcatgatgcacccctggtacatcccctcctctcagctggcggccaagctgctccacatctaccaacaatcccggaaggacaactccaattccctgcaggtgaaaacgtgccacctggtcaggtactggatctccgccttcccagcggagtttgacttgaacccggagttggctgagcagatcaaggagctgaaggctctgctagaccaagaagggaaccgacggcacagcagcctaatcgacatagacagcgtccctacctacaagtggaagcggcaggtgactcagcggaaccctgtgggacagaaaaagcgcaagatgtccctgttgtttgaccacctggagcccatggagctggcggagcatctcacctacttggagtatcgctccttctgcaagatcctgtttcaggactatcacagtttcgtgactcatggctgcactgtggacaaccccgtcctggagcggttcatctccctcttcaacagcgtctcacagtgggtgcagctcatgatcctcagcaaacccacagccccgcagcgggccctggtcatcacacactttgtccacgtggcggagaagctgctacagctgcagaacttcaacacgctgatggcagtggtcgggggcctgagccacagctccatctcccgcctcaaggagacccacagccacgttagccctgagaccatcaagctctgggagggtctcacggaactagtgacggcgacaggcaactatggcaactaccggcgtcggctggcagcctgtgtgggcttccgcttcccgatcctgggtgtgcacctcaaggacctggtggccctgcagctggcactgcctgactggctggacccagcccggacccggctcaacggggccaagatgaagcagctctttagcatcctggaggagctggccatggtgaccagcctgcggccaccagtacaggccaaccccgacctgctgagcctgctcacggtgtctctggatcagtatcagacggaggatgagctgtaccagctgtccctgcagcgggagccgcgctccaagtcctcgccaaccagccccacgagttgcaccccaccaccccggcccccggtactggaggagtggacctcggctgccaaacccaagctggatcaggccctcgtggtggagcacatcgagaagatggtggagtctgtgttccggaactttgacgtcgatggggatggccacatctcacaggaagaattccagatcatccgtgggaacttcccttacctcagcgcctttggggacctcgaccagaaccaggatggctgcatcagcagggaggagatggtttcctatttcctgcgctccagctctgtgttgggggggcgcatgggcttcgtacacaacttccaggagagcaactccttgcgccccgtcgcctgccgccactgcaaagccctgatcctgggcatctacaagcagggcctcaaatgccgagcctgtggagtgaactgccacaagcagtgcaaggatcgcctgtcagttgagtgtcggcgcagggcccagagtgtgagcctggaggggtctgcaccctcaccctcacccatgcacagccaccatcaccgcgccttcagcttctctctgccccgccctggcaggcgaggctccaggcctccagagatccgtgaggaggaggtacagacggtggaggatggggtgtttgacatccacttgtaatagatgctgtggttggatcaaggactcattcctgccttggagaaaatacttcaaccagagcagggagcctgggggtgtcggggcaggaggctggggatgggggtgggatatgagggtggcatgcagctgagggcagggccagggctggtgtccctaaggttgtacagactcttgtgaatatttgtattttccagatggaataaaaaggcccgtgtaattaaccttca

SEQ ID NO: 25557 - DNA, 659 bp, Homo sapiens
  source 1..659: mol_type = unassigned DNA
acatgcgtggagaggcactgccttgcgtgtgtgcacacgtgtgaggatgtcagcgcctgtgtggccgcgggactcaaggctggcctggctcaagtgaacagcacgtccaggaggcgacctcgtccgcgggtttgcattctggggtggacgagctgggggttcggtccgagcccggtgggaggctcccggagcgcagcctgggcccagcccaccccgcgccggcggccatggcaggcaccctggacctggacaagggctgcacggtggaggagctgctccgcgggtgcatcgaagccttcgatgactccgggaaggtgcgggacccgcagctggtgcgcatgttcctcatgatgcacccctggtacatcccctcctctcagctggcggccaagctgctccacatctaccaacaatcccggaaggacaactccaattccctgcaggtgaaaacgtgccacctggtcaggtactggatctccgccttcccagcggagtttgacttgaacccggagttggctgagcagatcaaggagctgaaggctctgctagaccaagaagggaaccgacggcacagcagcctaatcgacatagacagcgtgtgcgtgggggagcacagagggctgggggggcactcagtatcctataccatctgtgcttaa

SEQ ID NO: 25558 - DNA, 2927 bp, Homo sapiens
  source 1..2927: mol_type = unassigned DNA
atccccgtgtgggggaggggggccttcggtctctccccagcctcttccttccccctggcctgagggtgggtggggaggggcagttcctctttccttcccaagcaccgaggaggccccagctccctaggggctgagaagctggagtcctgggcaaggggaggagctgagccctactcttgcaagacccccggcctcctcaccccacgcgggaagcatgaacagaaaagacagtaagaggaagtcccaccaggaatgcaccggaaaaataggagggcgaggccggccccgccaagtgcgccgccacaagacatgccccagccctcgggaaatcagcaaggtcatggcttccatgaacctgggcctgctgagtgagggcggctgcagcgaagatgagctgctggagaaatgcatccagtccttcgattcagctggcagcctgtgccacgaggaccacatgctcaacatggtgctggccatgcacagctgggtgctgccgtccgccgacctggctgcccgcctgctgacctcataccagaaggccacaggggacacccaggagctgagacggctgcagatctgtcacctggtcaggtactggctgatgcgacaccctgaggtgatgcaccaggatccccagctagaagaagtcataggtcgtttctgggccaccgtggcccgggagggcaactcagcccagagaagactgggagactcttctgacctcctgagccctggtggccctggccccccactcccaatgagcagcccaggcctgggcaaaaagcgcaaagtgtccttgcttttcgaccacttggagacgggggagctggctcagcacctcacctacctggagttccggtccttccaggctatcacggccctcctggagctcactgagctccttgcctcccacaacaactacgcccgctaccgccgcacctgggctggctgcgcgggtttccggctgcctgtactgggcgtgcacctcaaggacctggtgtccctgcatgaggcacagcccgacaggttgcctgacggccgcctgcacctacccaagctgaacaacctctacctgcggctgcaggagctggtggccctccaagggcagcatccaccctgcagcgccaatgaggatctgctgcacctgctcacgctctccctggacctcttctacacggaagacgagatctatgagctttcttatgcccgggagccgcgttgtcccaagagcctgccaccctcccccttcaatgcacctctggtggtggagtgggcccctggtgtgacacccaagccggacagggtcacactgggtcggcatgtggagcagctggtggagtctgtgttcaagaattatgaccctgaaggccgaggaacaatctctcaggaggactttgagcgactctcgggcaattttcccttcgcctgccatgggcttcacccacccccacgccaggggagaggatccttcagcagagaggagctgacagggtacctgctccgggccagcgccatctgctccaagttgggcctggccttcctgcacaccttccatgaggtcaccttccgaaagcctaccttctgcgacagctgcagtggcttcctctggggtgtcaccaagcaaggctaccgctgtcgggagtgcgggctgtgttgccacaaacactgcagagaccaggtgaaggtagaatgtaagaagaggccaggggccaagggcgatgcaggaccccccggagctcctgtcccatccacaccagctccccatgccagctgtggctccgaggaaaatcactcctacacgctatccctggagcctgagactgggtgccagcttcgccatgcctggacccagactgaatccccacacccttcctgggaaacagatacggtcccctgcccggtgatggacccaccatcaactgcatcctccaagctggattcctagacatctcttggtctcctctcttcctcactcccttcccccagtcagtcctgagtcctgccgtcagactctggcagggctcccagaggtaggcctccagaggcatccgccttcccatccacactgcctttagtggtacgtccgtcatctttttccctggaagtgactttcctcttttgcatcctggtggatgctaatcctgctccctttccctgcacttagtatctgtgcggctgtgtgttggatacatttagactcaggcctcattctaccaactccctacatctccatttctttttttttttgagacagagtcttgctctgtcacccaggctggagtgcaatgatgcaatctcagctcactgcaacttccgcctcctgggttcaagtgattcttctgcctcagcctcccaagtagctgggattacaggcacgcgccaccatgcccggctaatttttgtatttttagtagagacggggtttccccatgttggccaagatggtctcaaactcctgacctcatgatccaccagcctcagcctcccaaagtgctgggaatacaggcgtgagccaccacgcccagctcctgtttttctgcatagaatgtgctccctctgacagcctatactttttccctctttatctcgttgaacgtctgtctttcctcaacaggagcatcaactccaggagaacagggatttctatcaatgtcattcactgctgcatccccagtgcctagaacagggctggcaggtggtaggcgcctgacagatgcttgtctgatgcctgaatgtctccttacccatgcccacggcacaggatagatgtgctatagggcaaagaactttgagggtcgagcagcaggggcccattcagtcccagggagcagagacccccccaaccccttcacaaaccccaacacccctgacttggcccccacagagagaggtcctacagctgtcataaattaaatttattctctgga

SEQ ID NO: 25559 - DNA, 3313 bp, Homo sapiens
  source 1..3313: mol_type = unassigned DNA
atccccgtgtgggggaggggggccttcggtctctccccagcctcttccttccccctggcctgagggtgggtggggaggggcagttcctctttccttcccaagcaccgaggaggccccagctccctaggggctgagaagctggagtcctgggcaaggggaggagctgagccctactcttgcaagacccccggcctcctcaccccacgcgggaagcatgaacagaaaagacagtaagaggaagtcccaccaggaatgcaccggaaaaataggagggcgaggccggccccgccaagtgcgccgccacaagacatgccccagccctcgggaaatcagcaaggtcatggcttccatgaacctgggcctgctgagtgagggcggctgcagcgaagatgagctgctggagaaatgcatccagtccttcgattcagctggcagcctgtgccacgaggaccacatgctcaacatggtgctggccatgcacagctgggtgctgccgtccgccgacctggctgcccgcctgctgacctcataccagaaggccacaggggacacccaggagctgagacggctgcagatctgtcacctggtcaggtactggctgatgcgacaccctgaggtgatgcaccaggatccccagctagaagaagtcataggtcgtttctgggccaccgtggcccgggagggcaactcagcccagagaagactgggagactcttctgacctcctgagccctggtggccctggccccccactcccaatgagcagcccaggcctgggcaaaaagcgcaaagtgtccttgcttttcgaccacttggagacgggggagctggctcagcacctcacctacctggagttccggtccttccaggctatcacgccccaggacctgcggagctacgttttgcagggctcagtacgaggctgcccggccctggagggctccgtaggtctcagcaacagcgtgtcccgctgggtgcaggtgatggtgctgagccgtcccgggcccctacagcgtgcacaggtgctggacaagttcattcacgtggcacagaggctccaccagctgcagaatttcaacacgctgatggcagtcacagggggcctgtgtcacagtgccatctccagactcaaggactcccatgcccacctgagccctgacagcaccaaggccctcctggagctcactgagctccttgcctcccacaacaactacgcccgctaccgccgcacctgggctggctgcgcgggtttccggctgcctgtactgggcgtgcacctcaaggacctggtgtccctgcatgaggcacagcccgacaggttgcctgacggccgcctgcacctacccaagctgaacaacctctacctgcggctgcaggagctggtggccctccaagggcagcatccaccctgcagcgccaatgaggatctgctgcacctgctcacgctctccctggacctcttctacacggaagacgagatctatgagctttcttatgcccgggagccgcgttgtcccaagagcctgccaccctcccccttcaatgcacctctggtggtggagtgggcccctggtgtgacacccaagccggacagggtcacactgggtcggcatgtggagcagctggtggagtctgtgttcaagaattatgaccctgaaggccgaggaacaatctctcaggaggactttgagcgactctcgggcaattttcccttcgcctgccatgggcttcacccacccccacgccaggggagaggatccttcagcagagaggagctgacagggtacctgctccgggccagcgccatctgctccaagttgggcctggccttcctgcacaccttccatgaggtcaccttccgaaagcctaccttctgcgacagctgcagtggcttcctctggggtgtcaccaagcaaggctaccgctgtcggggtgagtggggtgtcagtgagtgggagggaagccttggcccgcaggctggaagaatggatgacacagatcggacccctgccgctgccttcccccagagtgcgggctgtgttgccacaaacactgcagagaccaggtgaaggtagaatgtaagaagaggccaggggccaagggcgatgcaggaccccccggagctcctgtcccatccacaccagctccccatgccagctgtggctccgaggaaaatcactcctacacgctatccctggagcctgagactgggtgccagcttcgccatgcctggacccagactgaatccccacacccttcctgggaaacagatacggtcccctgcccggtgatggacccaccatcaactgcatcctccaagctggattcctagacatctcttggtctcctctcttcctcactcccttcccccagtcagtcctgagtcctgccgtcagactctggcagggctcccagaggtaggcctccagaggcatccgccttcccatccacactgcctttagtggtacgtccgtcatctttttccctggaagtgactttcctcttttgcatcctggtggatgctaatcctgctccctttccctgcacttagtatctgtgcggctgtgtgttggatacatttagactcaggcctcattctaccaactccctacatctccatttctttttttttttgagacagagtcttgctctgtcacccaggctggagtgcaatgatgcaatctcagctcactgcaacttccgcctcctgggttcaagtgattcttctgcctcagcctcccaagtagctgggattacaggcacgcgccaccatgcccggctaatttttgtatttttagtagagacggggtttccccatgttggccaagatggtctcaaactcctgacctcatgatccaccagcctcagcctcccaaagtgctgggaatacaggcgtgagccaccacgcccagctcctgtttttctgcatagaatgtgctccctctgacagcctatactttttccctctttatctcgttgaacgtctgtctttcctcaacaggagcatcaactccaggagaacagggatttctatcaatgtcattcactgctgcatccccagtgcctagaacagggctggcaggtggtaggcgcctgacagatgcttgtctgatgcctgaatgtctccttacccatgcccacggcacaggatagatgtgctatagggcaaagaactttgagggtcgagcagcaggggcccattcagtcccagggagcagagacccccccaaccccttcacaaaccccaacacccctgacttggcccccacagagagaggtcctacagctgtcataaattaaatttattctctgga

SEQ ID NO: 25560 - DNA, 2651 bp, Homo sapiens
  source 1..2651: mol_type = unassigned DNA
atccccgtgtgggggaggggggccttcggtctctccccagcctcttccttccccctggcctgagggtgggtggggaggggcagttcctctttccttcccaagcaccgaggaggccccagctccctaggggctgagaagctggagtcctgggcaaggggaggagctgagccctactcttgcaagacccccggcctcctcaccccacgcgggaagcatgaacagaaaagacagtaagaggaagtcccaccaggaatgcaccggaaaaataggagggcgaggccggccccgccaagtgcgccgccacaagacatgccccagccctcgggaaatcagcaaggtcatggcttccatgaacctgggcctgctgagtgagggcggctgcagcgaagatgagctgctggagaaatgcatccagtccttcgattcagctggcagcctgtgccacgaggaccacatgctcaacatggtgctggccatgcacagctgggtgctgccgtccgccgacctggctgcccgcctgctgacctcataccagaaggccacaggggacacccaggagctgagacggctgcagatctgtcacctggtcaggtactggctgatgcgacaccctgaggtgatgcaccaggatccccagctagaagaagtcataggtcgtttctgggccaccgtggcccgggagggcaactcagcccagagaagactgggagactcttctgacctcctgagccctggtggccctggccccccactcccaatgagcagcccaggcctgggcaaaaagcgcaaagtgtccttgcttttcgaccacttggagacgggggagctggctcagcacctcacctacctggagttccggtccttccaggctatcacgctctccctggacctcttctacacggaagacgagatctatgagctttcttatgcccgggagccgcgttgtcccaagagcctgccaccctcccccttcaatgcacctctggtggtggagtgggcccctggtgtgacacccaagccggacagggtcacactgggtcggcatgtggagcagctggtggagtctgtgttcaagaattatgaccctgaaggccgaggaacaatctctcaggaggactttgagcgactctcgggcaattttcccttcgcctgccatgggcttcacccacccccacgccaggggagaggatccttcagcagagaggagctgacagggtacctgctccgggccagcgccatctgctccaagttgggcctggccttcctgcacaccttccatgaggtcaccttccgaaagcctaccttctgcgacagctgcagtggcttcctctggggtgtcaccaagcaaggctaccgctgtcgggagtgcgggctgtgttgccacaaacactgcagagaccaggtgaaggtagaatgtaagaagaggccaggggccaagggcgatgcaggaccccccggagctcctgtcccatccacaccagctccccatgccagctgtggctccgaggaaaatcactcctacacgctatccctggagcctgagactgggtgccagcttcgccatgcctggacccagactgaatccccacacccttcctgggaaacagatacggtcccctgcccggtgatggacccaccatcaactgcatcctccaagctggattcctagacatctcttggtctcctctcttcctcactcccttcccccagtcagtcctgagtcctgccgtcagactctggcagggctcccagaggtaggcctccagaggcatccgccttcccatccacactgcctttagtggtacgtccgtcatctttttccctggaagtgactttcctcttttgcatcctggtggatgctaatcctgctccctttccctgcacttagtatctgtgcggctgtgtgttggatacatttagactcaggcctcattctaccaactccctacatctccatttctttttttttttgagacagagtcttgctctgtcacccaggctggagtgcaatgatgcaatctcagctcactgcaacttccgcctcctgggttcaagtgattcttctgcctcagcctcccaagtagctgggattacaggcacgcgccaccatgcccggctaatttttgtatttttagtagagacggggtttccccatgttggccaagatggtctcaaactcctgacctcatgatccaccagcctcagcctcccaaagtgctgggaatacaggcgtgagccaccacgcccagctcctgtttttctgcatagaatgtgctccctctgacagcctatactttttccctctttatctcgttgaacgtctgtctttcctcaacaggagcatcaactccaggagaacagggatttctatcaatgtcattcactgctgcatccccagtgcctagaacagggctggcaggtggtaggcgcctgacagatgcttgtctgatgcctgaatgtctccttacccatgcccacggcacaggatagatgtgctatagggcaaagaactttgagggtcgagcagcaggggcccattcagtcccagggagcagagacccccccaaccccttcacaaaccccaacacccctgacttggcccccacagagagaggtcctacagctgtcataaattaaatttattctctgga

SEQ ID NO: 25561 - DNA, 2942 bp, Homo sapiens
  source 1..2942: mol_type = unassigned DNA
atccccgtgtgggggaggggggccttcggtctctccccagcctcttccttccccctggcctgagggtgggtggggaggggcagttcctctttccttcccaagcaccgaggaggccccagctccctaggggctgagaagctggagtcctgggcaaggggaggagctgagccctactcttgcaagacccccggcctcctcaccccacgcgggaagcatgaacagaaaagacagtaagaggaagtcccaccaggaatgcaccggaaaaataggagggcgaggccggccccgccaagtgcgccgccacaagacatgccccagccctcgggaaatcagcaaggtcatggcttccatgaacctgggcctgctgagtgagggcggctgcagcgaagatgagctgctggagaaatgcatccagtccttcgattcagctggcagcctgtgccacgaggaccacatgctcaacatggtgctggccatgcacagctgggtgctgccgtccgccgacctggctgcccgcctgctgacctcataccagaaggccacaggggacacccaggagctgagacggctgcagatctgtcacctggtcaggtactggctgatgcgacaccctgaggtgatgcaccaggatccccagctagaagaagtcataggtcgtttctgggccaccgtggcccgggagggcaactcagcccagagaagactgggagactcttctgacctcctgagccctggtggccctggccccccactcccaatgagcagcccaggcctgggcaaaaagcgcaaagtgtccttgcttttcgaccacttggagacgggggagctggctcagcacctcacctacctggagttccggtccttccaggctatcacgccccaggacctgcggagctacgttttgcagggctcagtacgaggctgcccggccctggagggctccgtaggtctcagcaacagcgtgtcccgctgggtgcaggtgatggtgctgagccgtcccgggcccctacagcgtgcacaggtgctggacaagttcattcacgtggcacagaggctccaccagctgcagaatttcaacacgctgatggcagtcacagggggcctgtgtcacagtgccatctccagactcaaggactcccatgcccacctgagccctgacagcaccaagctctccctggacctcttctacacggaagacgagatctatgagctttcttatgcccgggagccgcgttgtcccaagagcctgccaccctcccccttcaatgcacctctggtggtggagtgggcccctggtgtgacacccaagccggacagggtcacactgggtcggcatgtggagcagctggtggagtctgtgttcaagaattatgaccctgaaggccgaggaacaatctctcaggaggactttgagcgactctcgggcaattttcccttcgcctgccatgggcttcacccacccccacgccaggggagaggatccttcagcagagaggagctgacagggtacctgctccgggccagcgccatctgctccaagttgggcctggccttcctgcacaccttccatgaggtcaccttccgaaagcctaccttctgcgacagctgcagtggcttcctctggggtgtcaccaagcaaggctaccgctgtcgggagtgcgggctgtgttgccacaaacactgcagagaccaggtgaaggtagaatgtaagaagaggccaggggccaagggcgatgcaggaccccccggagctcctgtcccatccacaccagctccccatgccagctgtggctccgaggaaaatcactcctacacgctatccctggagcctgagactgggtgccagcttcgccatgcctggacccagactgaatccccacacccttcctgggaaacagatacggtcccctgcccggtgatggacccaccatcaactgcatcctccaagctggattcctagacatctcttggtctcctctcttcctcactcccttcccccagtcagtcctgagtcctgccgtcagactctggcagggctcccagaggtaggcctccagaggcatccgccttcccatccacactgcctttagtggtacgtccgtcatctttttccctggaagtgactttcctcttttgcatcctggtggatgctaatcctgctccctttccctgcacttagtatctgtgcggctgtgtgttggatacatttagactcaggcctcattctaccaactccctacatctccatttctttttttttttgagacagagtcttgctctgtcacccaggctggagtgcaatgatgcaatctcagctcactgcaacttccgcctcctgggttcaagtgattcttctgcctcagcctcccaagtagctgggattacaggcacgcgccaccatgcccggctaatttttgtatttttagtagagacggggtttccccatgttggccaagatggtctcaaactcctgacctcatgatccaccagcctcagcctcccaaagtgctgggaatacaggcgtgagccaccacgcccagctcctgtttttctgcatagaatgtgctccctctgacagcctatactttttccctctttatctcgttgaacgtctgtctttcctcaacaggagcatcaactccaggagaacagggatttctatcaatgtcattcactgctgcatccccagtgcctagaacagggctggcaggtggtaggcgcctgacagatgcttgtctgatgcctgaatgtctccttacccatgcccacggcacaggatagatgtgctatagggcaaagaactttgagggtcgagcagcaggggcccattcagtcccagggagcagagacccccccaaccccttcacaaaccccaacacccctgacttggcccccacagagagaggtcctacagctgtcataaattaaatttattctctgga

SEQ ID NO: 25562 - DNA, 3217 bp, Homo sapiens
  source 1..3217: mol_type = unassigned DNA
atccccgtgtgggggaggggggccttcggtctctccccagcctcttccttccccctggcctgagggtgggtggggaggggcagttcctctttccttcccaagcaccgaggaggccccagctccctaggggctgagaagctggagtcctgggcaaggggaggagctgagccctactcttgcaagacccccggcctcctcaccccacgcgggaagcatgaacagaaaagacagtaagaggaagtcccaccaggaatgcaccggaaaaataggagggcgaggccggccccgccaagtgcgccgccacaagacatgccccagccctcgggaaatcagcaaggtcatggcttccatgaacctgggcctgctgagtgagggcggctgcagcgaagatgagctgctggagaaatgcatccagtccttcgattcagctggcagcctgtgccacgaggaccacatgctcaacatggtgctggccatgcacagctgggtgctgccgtccgccgacctggctgcccgcctgctgacctcataccagaaggccacaggggacacccaggagctgagacggctgcagatctgtcacctggtcaggtactggctgatgcgacaccctgaggtgatgcaccaggatccccagctagaagaagtcataggtcgtttctgggccaccgtggcccgggagggcaactcagcccagagaagactgggagactcttctgacctcctgagccctggtggccctggccccccactcccaatgagcagcccaggcctgggcaaaaagcgcaaagtgtccttgcttttcgaccacttggagacgggggagctggctcagcacctcacctacctggagttccggtccttccaggctatcacgccccaggacctgcggagctacgttttgcagggctcagtacgaggctgcccggccctggagggctccgtaggtctcagcaacagcgtgtcccgctgggtgcaggtgatggtgctgagccgtcccgggcccctacagcgtgcacaggtgctggacaagttcattcacgtggcacagaggctccaccagctgcagaatttcaacacgctgatggcagtcacagggggcctgtgtcacagtgccatctccagactcaaggactcccatgcccacctgagccctgacagcaccaaggccctcctggagctcactgagctccttgcctcccacaacaactacgcccgctaccgccgcacctgggctggctgcgcgggtttccggctgcctgtactgggcgtgcacctcaaggacctggtgtccctgcatgaggcacagcccgacaggttgcctgacggccgcctgcacctacccaagctgaacaacctctacctgcggctgcaggagctggtggccctccaagggcagcatccaccctgcagcgccaatgaggatctgctgcacctgctcacgctctccctggacctcttctacacggaagacgagatctatgagctttcttatgcccgggagccgcgttgtcccaagagcctgccaccctcccccttcaatgcacctctggtggtggagtgggcccctggtgtgacacccaagccggacagggtcacactgggtcggcatgtggagcagctggtggagtctgtgttcaagaattatgaccctgaaggccgaggaacaatctctcaggaggactttgagcgactctcgggcaattttcccttcgcctgccatgggcttcacccacccccacgccaggggagaggatccttcagcagagaggagctgacagggtacctgctccgggccagcgccatctgctccaagttgggcctggccttcctgcacaccttccatgaggtcaccttccgaaagcctaccttctgcgacagctgcagtggcttcctctggggtgtcaccaagcaaggctaccgctgtcgggagtgcgggctgtgttgccacaaacactgcagagaccaggtgaaggtagaatgtaagaagaggccaggggccaagggcgatgcaggaccccccggagctcctgtcccatccacaccagctccccatgccagctgtggctccgaggaaaatcactcctacacgctatccctggagcctgagactgggtgccagcttcgccatgcctggacccagactgaatccccacacccttcctgggaaacagatacggtcccctgcccggtgatggacccaccatcaactgcatcctccaagctggattcctagacatctcttggtctcctctcttcctcactcccttcccccagtcagtcctgagtcctgccgtcagactctggcagggctcccagaggtaggcctccagaggcatccgccttcccatccacactgcctttagtggtacgtccgtcatctttttccctggaagtgactttcctcttttgcatcctggtggatgctaatcctgctccctttccctgcacttagtatctgtgcggctgtgtgttggatacatttagactcaggcctcattctaccaactccctacatctccatttctttttttttttgagacagagtcttgctctgtcacccaggctggagtgcaatgatgcaatctcagctcactgcaacttccgcctcctgggttcaagtgattcttctgcctcagcctcccaagtagctgggattacaggcacgcgccaccatgcccggctaatttttgtatttttagtagagacggggtttccccatgttggccaagatggtctcaaactcctgacctcatgatccaccagcctcagcctcccaaagtgctgggaatacaggcgtgagccaccacgcccagctcctgtttttctgcatagaatgtgctccctctgacagcctatactttttccctctttatctcgttgaacgtctgtctttcctcaacaggagcatcaactccaggagaacagggatttctatcaatgtcattcactgctgcatccccagtgcctagaacagggctggcaggtggtaggcgcctgacagatgcttgtctgatgcctgaatgtctccttacccatgcccacggcacaggatagatgtgctatagggcaaagaactttgagggtcgagcagcaggggcccattcagtcccagggagcagagacccccccaaccccttcacaaaccccaacacccctgacttggcccccacagagagaggtcctacagctgtcataaattaaatttattctctgg

SEQ ID NO: 25563 - DNA, 3061 bp, Homo sapiens
  source 1..3061: mol_type = unassigned DNA
gctccctaggggctgagaagctggagtcctgggcaaggggaggagctgagccctactcttgcaagacccccggcctcctcaccccacgcgggaagcatgaacagaaaagacagtaagaggaagtcccaccaggaatgcaccggaaaaataggagggcgaggccggccccgccaagtgcgccgccacaagacatgccccagccctcgggaaatcagcaaggtcatggcttccatgaacctgggcctgctgagtgagggcggctgcagcgaagatgagctgctggagaaatgcatccagtccttcgattcagctggcagcctgtgccacgaggaccacatgctcaacatggtgctggccatgcacagctgggtgctgccgtccgccgacctggctgcccgcctgctgacctcataccagaaggccacaggggacacccaggagctgagacggctgcagatctgtcacctggtcaggtactggctgatgcgacaccctgaggtgatgcaccaggatccccagctagaagaagtcataggtcgtttctgggccaccgtggcccgggagggcaactcagcccagagaagactgggagactcttctgacctcccaggcctgggcaaaaagcgcaaagtgtccttgcttttcgaccacttggagacgggggagctggctcagcacctcacctacctggagttccggtccttccaggctatcacgccccaggacctgcggagctacgttttgcagggctcagtacgaggctgcccggccctggagggctccgtaggtctcagcaacagcgtgtcccgctgggtgcaggtgatggtgctgagccgtcccgggcccctacagcgtgcacaggtgctggacaagttcattcacgtggcacagaggctccaccagctgcagaatttcaacacgctgatggcagtcacagggggcctgtgtcacagtgccatctccagactcaaggactcccatgcccacctgagccctgacagcaccaaggccctcctggagctcactgagctccttgcctcccacaacaactacgcccgctaccgccgcacctgggctggctgcgcgggtttccggctgcctgtactgggcgtgcacctcaaggacctggtgtccctgcatgaggcacagcccgacaggttgcctgacggccgcctgcacctacccaagctgaacaacctctacctgcggctgcaggagctggtggccctccaagggcagcatccaccctgcagcgccaatgaggatctgctgcacctgctcacgctctccctggacctcttctacacggaagacgagatctatgagctttcttatgcccgggagccgcgttgtcccaagagcctgccaccctcccccttcaatgcacctctggtggtggagtgggcccctggtgtgacacccaagccggacagggtcacactgggtcggcatgtggagcagctggtggagtctgtgttcaagaattatgaccctgaaggccgaggaacaatctctcaggaggactttgagcgactctcgggcaattttcccttcgcctgccatgggcttcacccacccccacgccaggggagaggatccttcagcagagaggagctgacagggtacctgctccgggccagcgccatctgctccaagttgggcctggccttcctgcacaccttccatgaggtcaccttccgaaagcctaccttctgcgacagctgcagtggcttcctctggggtgtcaccaagcaaggctaccgctgtcgggagtgcgggctgtgttgccacaaacactgcagagaccaggtgaaggtagaatgtaagaagaggccaggggccaagggcgatgcaggaccccccggagctcctgtcccatccacaccagctccccatgccagctgtggctccgaggaaaatcactcctacacgctatccctggagcctgagactgggtgccagcttcgccatgcctggacccagactgaatccccacacccttcctgggaaacagatacggtcccctgcccggtgatggacccaccatcaactgcatcctccaagctggattcctagacatctcttggtctcctctcttcctcactcccttcccccagtcagtcctgagtcctgccgtcagactctggcagggctcccagaggtaggcctccagaggcatccgccttcccatccacactgcctttagtggtacgtccgtcatctttttccctggaagtgactttcctcttttgcatcctggtggatgctaatcctgctccctttccctgcacttagtatctgtgcggctgtgtgttggatacatttagactcaggcctcattctaccaactccctacatctccatttctttttttttttgagacagagtcttgctctgtcacccaggctggagtgcaatgatgcaatctcagctcactgcaacttccgcctcctgggttcaagtgattcttctgcctcagcctcccaagtagctgggattacaggcacgcgccaccatgcccggctaatttttgtatttttagtagagacggggtttccccatgttggccaagatggtctcaaactcctgacctcatgatccaccagcctcagcctcccaaagtgctgggaatacaggcgtgagccaccacgcccagctcctgtttttctgcatagaatgtgctccctctgacagcctatactttttccctctttatctcgttgaacgtctgtctttcctcaacaggagcatcaactccaggagaacagggatttctatcaatgtcattcactgctgcatccccagtgcctagaacagggctggcaggtggtaggcgcctgacagatgcttgtctgatgcctgaatgtctccttacccatgcccacggcacaggatagatgtgctatagggcaaagaactttgagggtcgagcagcaggggcccattcagtcccagggagcagagacccccccaaccccttcacaaaccccaacacccctgacttggcccccacagagagaggtcctacagctgtcataaattaaatttattctctggagaa

SEQ ID NO: 25564 - DNA, 3011 bp, Homo sapiens
  source 1..3011: mol_type = unassigned DNA
atccccgtgtgggggaggggggccttcggtctctccccagcctcttccttccccctggcctgagggtgggtggggaggggcagttcctctttccttcccaagcaccgaggaggccccagctccctaggggctgagaagctggagtcctgggcaaggggaggagctgagccctactcttgcaagacccccggcctcctcaccccacgcgggaagcatgaacagaaaagacagtaagaggaagtcccaccaggaatgcaccggaaaaataggagggcgaggccggccccgccaagtgcgccgccacaagacatgccccagccctcgggaaatcagcaaggtcatggcttccatgaacctgggcctgctgagtgagggcggctgcagcgaagatgagctgctggagaaatgcatccagtccttcgattcagctggcagcctgtgccacgaggaccacatgctcaacatggtgctggccatgcacagctgggtgctgccgtccgccgacctggctgcccgcctgctgacctcataccagaaggccacaggggacacccaggagctgagacggctgcagatctgtcacctggtcaggtactggctgatgcgacaccctgaggtgatgcaccaggatccccagctagaagaagtcataggtcgtttctgggccaccgtggcccgggagggcaactcagcccagagaagactgggagactcttctgacctcctgagccctggtggccctggccccccactcccaatgagcagcccaggcctgggcaaaaagcgcaaagtgtccttgcttttcgaccacttggagacgggggagctggctcagcacctcacctacctggagttccggtccttccaggctatcacgccccaggacctgcggagctacgttttgcagggctcagtacgaggctgcccggccctggagggctccgtaggtctcagcaacagcgtgtcccgctgggtgcaggtgatggtgctgagccgtcccgggcccctacagcgtgcacaggtgctggacaagttcattcacgtggcacagaggctccaccagctgcagaatttcaacacgctgatggcagtcacagggggcctgtgtcacagtgccatctccagactcaaggactcccatgcccacctgagccctgacagcaccaaggagctggtggccctccaagggcagcatccaccctgcagcgccaatgaggatctgctgcacctgctcacgctctccctggacctcttctacacggaagacgagatctatgagctttcttatgcccgggagccgcgttgtcccaagagcctgccaccctcccccttcaatgcacctctggtggtggagtgggcccctggtgtgacacccaagccggacagggtcacactgggtcggcatgtggagcagctggtggagtctgtgttcaagaattatgaccctgaaggccgaggaacaatctctcaggaggactttgagcgactctcgggcaattttcccttcgcctgccatgggcttcacccacccccacgccaggggagaggatccttcagcagagaggagctgacagggtacctgctccgggccagcgccatctgctccaagttgggcctggccttcctgcacaccttccatgaggtcaccttccgaaagcctaccttctgcgacagctgcagtggcttcctctggggtgtcaccaagcaaggctaccgctgtcgggagtgcgggctgtgttgccacaaacactgcagagaccaggtgaaggtagaatgtaagaagaggccaggggccaagggcgatgcaggaccccccggagctcctgtcccatccacaccagctccccatgccagctgtggctccgaggaaaatcactcctacacgctatccctggagcctgagactgggtgccagcttcgccatgcctggacccagactgaatccccacacccttcctgggaaacagatacggtcccctgcccggtgatggacccaccatcaactgcatcctccaagctggattcctagacatctcttggtctcctctcttcctcactcccttcccccagtcagtcctgagtcctgccgtcagactctggcagggctcccagaggtaggcctccagaggcatccgccttcccatccacactgcctttagtggtacgtccgtcatctttttccctggaagtgactttcctcttttgcatcctggtggatgctaatcctgctccctttccctgcacttagtatctgtgcggctgtgtgttggatacatttagactcaggcctcattctaccaactccctacatctccatttctttttttttttgagacagagtcttgctctgtcacccaggctggagtgcaatgatgcaatctcagctcactgcaacttccgcctcctgggttcaagtgattcttctgcctcagcctcccaagtagctgggattacaggcacgcgccaccatgcccggctaatttttgtatttttagtagagacggggtttccccatgttggccaagatggtctcaaactcctgacctcatgatccaccagcctcagcctcccaaagtgctgggaatacaggcgtgagccaccacgcccagctcctgtttttctgcatagaatgtgctccctctgacagcctatactttttccctctttatctcgttgaacgtctgtctttcctcaacaggagcatcaactccaggagaacagggatttctatcaatgtcattcactgctgcatccccagtgcctagaacagggctggcaggtggtaggcgcctgacagatgcttgtctgatgcctgaatgtctccttacccatgcccacggcacaggatagatgtgctatagggcaaagaactttgagggtcgagcagcaggggcccattcagtcccagggagcagagacccccccaaccccttcacaaaccccaacacccctgacttggcccccacagagagaggtcctacagctgtcataaattaaatttattctctgga

SEQ ID NO: 25565 - DNA, 3090 bp, Homo sapiens
  source 1..3090: mol_type = unassigned DNA
gccgccgccgccgccgccgccgccgccgccgccgccgccgccgccgccacagcccgctgggccggaggaggcggagctggcgctgtcccggctctcttgcggggaagcaactgagggggcggcgcggcgggccccggcggccgaagaggctggcaggtggcgccgtggggtgggtgctcctggtgagaggagtccactccgtgcgtgcgggcggaggccggcccccgagagccgccgacatgaagaaagacgtgcggatcctgctggtgggagaacctagagttgggaagacatcactgattatgtctctggtcagtgaagaatttccagaagaggttcctccccgggcagaagaaatcaccattccagctgatgtcaccccagagagagttccaacacacattgtagattactcagaagcagaacagagtgatgaacaacttcatcaagaaatatctcaggctaatgtcatctgtatagtgtatgccgttaacaacaagcattctattgataaggtaacaagtcgatggattcctctcataaatgaaagaacagacaaagacagcaggctgcctttaatattggttgggaacaaatctgatctggtggaatatagtagtatggagaccatccttcctattatgaaccagtatacagaaatagaaacctgtgtggagtgttcagcgaaaaacctgaagaacatatcagagctcttttattacgcacagaaagctgttcttcatcctacagggcccctgtactgcccagaggagaaggagatgaaaccagcttgtataaaagcccttactcgtatatttaaaatatctgatcaagataatgatggtactctcaatgatgctgaactcaacttctttcagaggatttgtttcaacactccattagctcctcaagctctggaggatgtcaagaatgtagtcagaaaacatataagtgatggtgtggctgacagtgggttgaccctgaaaggttttctctttttacacacactttttatccagagagggagacacgaaactacttggactgtgcttcgacgatttggttatgatgatgacctggatttgacacctgaatatttgttccccctgctgaaaatacctcctgattgcactactgaattaaatcatcatgcatatttatttctccaaagcacctttgacaagcatgatttggatagagactgtgctttgtcacctgatgagcttaaagatttatttaaagttttcccttacataccttgggggccagatgtgaataacacagtttgtaccaatgaaagaggctggataacctaccagggattcctttcccagtggacgctcacgacttatttagatgtacagcggtgcctggaatatttgggctatctaggctattcaatattgactgagcaagagtctcaagcttcagctgttacagtgacaagagataaaaagatagacctgcagaaaaaacaaactcaaagaaatgtgttcagatgtaatgtaattggagtgaaaaactgtgggaaaagtggagttcttcaggctcttcttggaagaaacttaatgaggcagaagaaaattcgtgaagatcataaatcctactatgcgattaacactgtttatgtatatggacaagagaaatacttgttgttgcatgatatctcagaatcggaatttctaactgaagctgaaatcatttgtgatgttgtatgcctggtatatgatgtcagcaatcccaaatcctttgaatactgtgccaggatttttaagcaacactttatggacagcagaataccttgcttaatcgtagctgcaaagtcagacctgcatgaagttaaacaagaatacagtatttcacctactgatttctgcaggaaacacaaaatgcctccaccacaagccttcacttgcaatactgctgatgcccccagtaaggatatctttgttaaattgacaacaatggccatgtatccgcacgtgacacaagctgacctcaagagctccacgttttggcttcgagcaagttttggtgctactgtttttgcagttttgggctttgctatgtacaaagcattattgaaacagcgatgatataaaaagaaatactgtccctaccaaaaacaaatacttttatgtacattctgaatgctttaagttctgctagaattattgagatatttatacatgcagagttactttattaatatttgtaattcatgcataagagtattttaatgatagttataactgcagtattggctagcatatggaaagaaaacagctaacagccaaactaaaatggctaaattccagaggccaaaagggaatattttgtaaatatatgtacatattcaggcaagatatggtctcccaagctgagttctagaaatgatgtttctagacatttctaagtggtattgttagtgctcacttggctcactcttctaggtttaagttagcccagagattgtatttactcatggatcactttatttatttcacatttactcagaatgatcctttgggttctataaggacataaggtacaatttgccattgtctctccatttttaaaaacatacaagtcagtgtcagcttaccaacatgacattttttcagtcagttgtggtaggccagccttgaagccatcgcacagtctagaaacttgtgtagctgagtgtgcagctcacctttaagggtgaagttaggtaaaagcaattagcagaggcgttatctatgtgattatgttgcttccttgtcagtatgttgaattttatagccctttcaatgaaataaaaaaaaaatttgtatattaccaatgtttttagtttaaataaagagtcacccttactactgttgaatttcatcccaagtgtaaatcattctataatggctgtgtctgttatagtatattacagtaactgcatgtgtcaccaagtgttctatatcaggctaggataacctagaggcagtaattttttaaatgataaaataaatctaatgaatataaactctcatgataaacctattttttccatcatcagccttttcaagtatttaaataaataactgctgtgtactgtga

SEQ ID NO: 25566 - DNA, 3213 bp, Homo sapiens
  source 1..3213: mol_type = unassigned DNA
gccgccgccgccgccgccgccgccgccgccgccgccgccgccgccgccacagcccgctgggccggaggaggcggagctggcgctgtcccggctctcttgcggggaagcaactgagggggcggcgcggcgggccccggcggccgaagaggctggcaggtggcgccgtggggtgggtgctcctggtgagaggagtccactccgtgcgtgcgggcggaggccggcccccgagagccgccgacatgaagaaagacgtgcggatcctgctggtgggagaacctagagttgggaagacatcactgattatgtctctggtcagtgaagaatttccagaagaggttcctccccgggcagaagaaatcaccattccagctgatgtcaccccagagagagttccaacacacattgtagattactcagaagcagaacagagtgatgaacaacttcatcaagaaatatctcaggctaatgtcatctgtatagtgtatgccgttaacaacaagcattctattgataaggtaacaagtcgatggattcctctcataaatgaaagaacagacaaagacagcaggctgcctttaatattggttgggaacaaatctgatctggtggaatatagtagtatggagaccatccttcctattatgaaccagtatacagaaatagaaacctgtgtggagtgttcagcgaaaaacctgaagaacatatcagagctcttttattacgcacagaaagctgttcttcatcctacagggcccctgtactgcccagaggagaaggagatgaaaccagcttgtataaaagcccttactcgtatatttaaaatatctgatcaagataatgatggtactctcaatgatgctgaactcaacttctttcagaggatttgtttcaacactccattagctcctcaagctctggaggatgtcaagaatgtagtcagaaaacatataagtgatggtgtggctgacagtgggttgaccctgaaaggttttctctttttacacacactttttatccagagagggagacacgaaactacttggactgtgcttcgacgatttggttatgatgatgacctggatttgacacctgaatatttgttccccctgctgaaaatacctcctgattgcactactgaattaaatcatcatgcatatttatttctccaaagcacctttgacaagcatgatttggatagagactgtgctttgtcacctgatgagcttaaagatttatttaaagttttcccttacataccttgggggccagatgtgaataacacagtttgtaccaatgaaagaggctggataacctaccagggattcctttcccagtggacgctcacgacttatttagatgtacagcggtgcctggaatatttgggctatctaggctattcaatattgactgagcaagagtctcaagcttcagctgttacagtgacaagagataaaaagatagacctgcagaaaaaacaaactcaaagaaatgtgttcagatgtaatgtaattggagtgaaaaactgtgggaaaagtggagttcttcaggctcttcttggaagaaacttaatgaggcagaagaaaattcgtgaagatcataaatcctactatgcgattaacactgtttatgtatatggacaagagaaatacttgttgttgcatgatatctcagaatcggaatttctaactgaagctgaaatcatttgtgatgttgtatgcctggtatatgatgtcagcaatcccaaatcctttgaatactgtgccaggatttttaagcaacactttatggacagcagaataccttgcttaatcgtagctgcaaagtcagacctgcatgaagttaaacaagaatacagtatttcacctactgatttctgcaggaaacacaaaatgcctccaccacaagccttcacttgcaatactgctgatgcccccagtaaggatatctttgttaaattgacaacaatggccatgtatccccatgcccggttacgctgtatgtgcacctgcaacaggtgtacattttgcatctgtcagaacttcctcaactcagacttgctgcaatctgtaaagaacaaaatcttcactgcagttcttaacaggcacgtgacacaagctgacctcaagagctccacgttttggcttcgagcaagttttggtgctactgtttttgcagttttgggctttgctatgtacaaagcattattgaaacagcgatgatataaaaagaaatactgtccctaccaaaaacaaatacttttatgtacattctgaatgctttaagttctgctagaattattgagatatttatacatgcagagttactttattaatatttgtaattcatgcataagagtattttaatgatagttataactgcagtattggctagcatatggaaagaaaacagctaacagccaaactaaaatggctaaattccagaggccaaaagggaatattttgtaaatatatgtacatattcaggcaagatatggtctcccaagctgagttctagaaatgatgtttctagacatttctaagtggtattgttagtgctcacttggctcactcttctaggtttaagttagcccagagattgtatttactcatggatcactttatttatttcacatttactcagaatgatcctttgggttctataaggacataaggtacaatttgccattgtctctccatttttaaaaacatacaagtcagtgtcagcttaccaacatgacattttttcagtcagttgtggtaggccagccttgaagccatcgcacagtctagaaacttgtgtagctgagtgtgcagctcacctttaagggtgaagttaggtaaaagcaattagcagaggcgttatctatgtgattatgttgcttccttgtcagtatgttgaattttatagccctttcaatgaaataaaaaaaaaatttgtatattaccaatgtttttagtttaaataaagagtcacccttactactgttgaatttcatcccaagtgtaaatcattctataatggctgtgtctgttatagtatattacagtaactgcatgtgtcaccaagtgttctatatcaggctaggataacctagaggcagtaattttttaaatgataaaataaatctaatgaatataaactctcatgataaacctattttttccatcatcagccttttcaagtatttaaataaataactgctgtgtactgtga

SEQ ID NO: 25567 - DNA, 3309 bp, Homo sapiens
  source 1..3309: mol_type = unassigned DNA
gccgccgccgccgccgccgccgccgccgccgccgccgccgccgccgccacagcccgctgggccggaggaggcggagctggcgctgtcccggctctcttgcggggaagcaactgagggggcggcgcggcgggccccggcggccgaagaggctggcaggtggcgccgtggggtgggtgctcctggtgagaggagtccactccgtgcgtgcgggcggaggccggcccccgagagccgccgacatgaagaaagacgtgcggatcctgctggtgggagaacctagagttgggaagacatcactgattatgtctctggtcagtgaagaatttccagaagaggttcctccccgggcagaagaaatcaccattccagctgatgtcaccccagagagagttccaacacacattgtagattactcagaagcagaacagagtgatgaacaacttcatcaagaaatatctcaggctaatgtcatctgtatagtgtatgccgttaacaacaagcattctattgataaggtaacaagtcgatggattcctctcataaatgaaagaacagacaaagacagcaggctgcctttaatattggttgggaacaaatctgatctggtggaatatagtagtatggagaccatccttcctattatgaaccagtatacagaaatagaaacctgtgtggagtgttcagcgaaaaacctgaagaacatatcagagctcttttattacgcacagaaagctgttcttcatcctacagggcccctgtactgcccagaggagaaggagatgaaaccagcttgtataaaagcccttactcgtatatttaaaatatctgatcaagataatgatggtactctcaatgatgctgaactcaacttctttcagaggatttgtttcaacactccattagctcctcaagctctggaggatgtcaagaatgtagtcagaaaacatataagtgatggtgtggctgacagtgggttgaccctgaaaggttttctctttttacacacactttttatccagagagggagacacgaaactacttggactgtgcttcgacgatttggttatgatgatgacctggatttgacacctgaatatttgttccccctgctgaaaatacctcctgattgcactactgaattaaatcatcatgcatatttatttctccaaagcacctttgacaagcatgatttggatagagactgtgctttgtcacctgatgagcttaaagatttatttaaagttttcccttacataccttgggggccagatgtgaataacacagtttgtaccaatgaaagaggctggataacctaccagggattcctttcccagtggacgctcacgacttatttagatgtacagcggtgcctggaatatttgggctatctaggctattcaatattgactgagcaagagtctcaagcttcagctgttacagtgacaagagataaaaagatagacctgcagaaaaaacaaactcaaagaaatgtgttcagatgtaatgtaattggagtgaaaaactgtgggaaaagtggagttcttcaggctcttcttggaagaaacttaatgaggcagaagaaaattcgtgaagatcataaatcctactatgcgattaacactgtttatgtatatggacaagagaaatacttgttgttgcatgatatctcagaatcggaatttctaactgaagctgaaatcatttgtgatgttgtatgcctggtatatgatgtcagcaatcccaaatcctttgaatactgtgccaggatttttaagcaacactttatggacagcagaataccttgcttaatcgtagctgcaaagtcagacctgcatgaagttaaacaagaatacagtatttcacctactgatttctgcaggaaacacaaaatgcctccaccacaagccttcacttgcaatactgctgatgcccccagtaaggatatctttgttaaattgacaacaatggccatgtatccagaggatcattacagagacagactctcccgagacatgggccacactgatagaatagagaatttgagaaaaatctgggtctttctaaaaactgctttccatgcccggttacgctgtatgtgcacctgcaacaggtgtacattttgcatctgtcagaacttcctcaactcagacttgctgcaatctgtaaagaacaaaatcttcactgcagttcttaacaggcacgtgacacaagctgacctcaagagctccacgttttggcttcgagcaagttttggtgctactgtttttgcagttttgggctttgctatgtacaaagcattattgaaacagcgatgatataaaaagaaatactgtccctaccaaaaacaaatacttttatgtacattctgaatgctttaagttctgctagaattattgagatatttatacatgcagagttactttattaatatttgtaattcatgcataagagtattttaatgatagttataactgcagtattggctagcatatggaaagaaaacagctaacagccaaactaaaatggctaaattccagaggccaaaagggaatattttgtaaatatatgtacatattcaggcaagatatggtctcccaagctgagttctagaaatgatgtttctagacatttctaagtggtattgttagtgctcacttggctcactcttctaggtttaagttagcccagagattgtatttactcatggatcactttatttatttcacatttactcagaatgatcctttgggttctataaggacataaggtacaatttgccattgtctctccatttttaaaaacatacaagtcagtgtcagcttaccaacatgacattttttcagtcagttgtggtaggccagccttgaagccatcgcacagtctagaaacttgtgtagctgagtgtgcagctcacctttaagggtgaagttaggtaaaagcaattagcagaggcgttatctatgtgattatgttgcttccttgtcagtatgttgaattttatagccctttcaatgaaataaaaaaaaaatttgtatattaccaatgtttttagtttaaataaagagtcacccttactactgttgaatttcatcccaagtgtaaatcattctataatggctgtgtctgttatagtatattacagtaactgcatgtgtcaccaagtgttctatatcaggctaggataacctagaggcagtaattttttaaatgataaaataaatctaatgaatataaactctcatgataaacctattttttccatcatcagccttttcaagtatttaaataaataactgctgtgtactgtga

SEQ ID NO: 25568 - DNA, 3186 bp, Homo sapiens
  source 1..3186: mol_type = unassigned DNA
gccgccgccgccgccgccgccgccgccgccgccgccgccgccgccgccacagcccgctgggccggaggaggcggagctggcgctgtcccggctctcttgcggggaagcaactgagggggcggcgcggcgggccccggcggccgaagaggctggcaggtggcgccgtggggtgggtgctcctggtgagaggagtccactccgtgcgtgcgggcggaggccggcccccgagagccgccgacatgaagaaagacgtgcggatcctgctggtgggagaacctagagttgggaagacatcactgattatgtctctggtcagtgaagaatttccagaagaggttcctccccgggcagaagaaatcaccattccagctgatgtcaccccagagagagttccaacacacattgtagattactcagaagcagaacagagtgatgaacaacttcatcaagaaatatctcaggctaatgtcatctgtatagtgtatgccgttaacaacaagcattctattgataaggtaacaagtcgatggattcctctcataaatgaaagaacagacaaagacagcaggctgcctttaatattggttgggaacaaatctgatctggtggaatatagtagtatggagaccatccttcctattatgaaccagtatacagaaatagaaacctgtgtggagtgttcagcgaaaaacctgaagaacatatcagagctcttttattacgcacagaaagctgttcttcatcctacagggcccctgtactgcccagaggagaaggagatgaaaccagcttgtataaaagcccttactcgtatatttaaaatatctgatcaagataatgatggtactctcaatgatgctgaactcaacttctttcagaggatttgtttcaacactccattagctcctcaagctctggaggatgtcaagaatgtagtcagaaaacatataagtgatggtgtggctgacagtgggttgaccctgaaaggttttctctttttacacacactttttatccagagagggagacacgaaactacttggactgtgcttcgacgatttggttatgatgatgacctggatttgacacctgaatatttgttccccctgctgaaaatacctcctgattgcactactgaattaaatcatcatgcatatttatttctccaaagcacctttgacaagcatgatttggatagagactgtgctttgtcacctgatgagcttaaagatttatttaaagttttcccttacataccttgggggccagatgtgaataacacagtttgtaccaatgaaagaggctggataacctaccagggattcctttcccagtggacgctcacgacttatttagatgtacagcggtgcctggaatatttgggctatctaggctattcaatattgactgagcaagagtctcaagcttcagctgttacagtgacaagagataaaaagatagacctgcagaaaaaacaaactcaaagaaatgtgttcagatgtaatgtaattggagtgaaaaactgtgggaaaagtggagttcttcaggctcttcttggaagaaacttaatgaggcagaagaaaattcgtgaagatcataaatcctactatgcgattaacactgtttatgtatatggacaagagaaatacttgttgttgcatgatatctcagaatcggaatttctaactgaagctgaaatcatttgtgatgttgtatgcctggtatatgatgtcagcaatcccaaatcctttgaatactgtgccaggatttttaagcaacactttatggacagcagaataccttgcttaatcgtagctgcaaagtcagacctgcatgaagttaaacaagaatacagtatttcacctactgatttctgcaggaaacacaaaatgcctccaccacaagccttcacttgcaatactgctgatgcccccagtaaggatatctttgttaaattgacaacaatggccatgtatccagaggatcattacagagacagactctcccgagacatgggccacactgatagaatagagaatttgagaaaaatctgggtctttctaaaaactgctttgcacgtgacacaagctgacctcaagagctccacgttttggcttcgagcaagttttggtgctactgtttttgcagttttgggctttgctatgtacaaagcattattgaaacagcgatgatataaaaagaaatactgtccctaccaaaaacaaatacttttatgtacattctgaatgctttaagttctgctagaattattgagatatttatacatgcagagttactttattaatatttgtaattcatgcataagagtattttaatgatagttataactgcagtattggctagcatatggaaagaaaacagctaacagccaaactaaaatggctaaattccagaggccaaaagggaatattttgtaaatatatgtacatattcaggcaagatatggtctcccaagctgagttctagaaatgatgtttctagacatttctaagtggtattgttagtgctcacttggctcactcttctaggtttaagttagcccagagattgtatttactcatggatcactttatttatttcacatttactcagaatgatcctttgggttctataaggacataaggtacaatttgccattgtctctccatttttaaaaacatacaagtcagtgtcagcttaccaacatgacattttttcagtcagttgtggtaggccagccttgaagccatcgcacagtctagaaacttgtgtagctgagtgtgcagctcacctttaagggtgaagttaggtaaaagcaattagcagaggcgttatctatgtgattatgttgcttccttgtcagtatgttgaattttatagccctttcaatgaaataaaaaaaaaatttgtatattaccaatgtttttagtttaaataaagagtcacccttactactgttgaatttcatcccaagtgtaaatcattctataatggctgtgtctgttatagtatattacagtaactgcatgtgtcaccaagtgttctatatcaggctaggataacctagaggcagtaattttttaaatgataaaataaatctaatgaatataaactctcatgataaacctattttttccatcatcagccttttcaagtatttaaataaataactgctgtgtactgtga

SEQ ID NO: 25569 - DNA, 983 bp, Homo sapiens
  source 1..983: mol_type = unassigned DNA
gccgccgccgccgccgccgccgccgccgccgccgccgccgccgccgccacagcccgctgggccggaggaggcggagctggcgctgtcccggctctcttgcggggaagcaactgagggggcggcgcggcgggccccggcggccgaagaggctggcaggtggcgccgtggggtgggtgctcctggtgagaggagtccactccgtgcgtgcgggcggaggccggcccccgagagccgccgacatgaagaaagacgtgcggatcctgctggtgggagaacctagagttgggaagacatcactgattatgtctctggtcagtgaagaatttccagaagaggttcctccccgggcagaagaaatcaccattccagctgatgtcaccccagagagagttccaacacacattgtagattactcagaagcagaacagagtgatgaacaacttcatcaagaaatatctcaggctaatgtcatctgtatagtgtatgccgttaacaacaagcattctattgataaggtaacaagtcgatggattcctctcataaatgaaagaacagacaaagacagcaggctgcctttaatattggttgggaacaaatctgatctggtggaatatagtagtatggagaccatccttcctattatgaaccagtatacagaaatagaaacctgtgtggagtgttcagcgaaaaacctgaagaacatatcagagctcttttattacgcacagaaagctgttcttcatcctacagggcccctgtactgcccagaggagaaggagatgaaaccagcttgtataaaagcccttactcgtatatttaaaatatctgatcaagataatgatggtactctcaatgatgctgaactcaacttctttcagaggatttgtttcaacactccattagctccacgttttggcttcgagcaagttttggtgctactgtttttgcagttttgggctttgctatgtacaaagcattattga

SEQ ID NO: 25570 - DNA, 2539 bp, Homo sapiens
  source 1..2539: mol_type = unassigned DNA
gacagcgcggggccgagaaccggaagtgcggggcgggcgcgggggcagagcgaaaggcttgaggaccaggtcggggccgggttccgggtcggggagcggctccgggcggcagctatgaggcgggacgtgcgcatcctgttactgggcgaggcccaggtggggaagacgtcgctgatcctgtccctggtgggcgaggagttccccgaggaggtccctccccgcgcggaggagatcaccatccccgcggacgtcaccccggagaaggtgcccacccacatcgtggactactcagaagccgagcagacggacgaggagctgcgggaggagatccacaaggcaaacgtggtgtgtgtggtgtatgacgtctctgaggaggccaccattgagaagattcgaactaagtggatcccactggtgaatggggggaccacgcaggggcccagggtgcccatcatcctagtgggcaacaagtcagacctgcggtcggggagctccatggaggccgtgctccccatcatgagccagtttcccgagattgagacctgcgtggagtgttcggccaagaacctgaggaacatctcagagctgttctactacgcccagaaggccgtcctgcatcccacagcccccctctatgaccctgaggccaagcagttgaggcccgcgtgcgcccaggcgctgacgcgcatcttcaggctctcagatcaggacctggaccaggcgctcagtgacgaagagctcaacgctttccagaaatcctgctttgggcaccccctggccccgcaggccctggaggacgtgaagacggtggtgtgcaggaacgtggcgggcggcgtgcgggaggaccggctgaccctggatggtttcctcttcctgaacacgctcttcatccagcgcggccggcacgagaccacctggaccatcctgcggcgcttcggctacagcgatgccctggagctgactgcggactatctctcccctctgatccacgtgccccccggctgcagcacggagctcaaccaccttggctaccagtttgtgcagagagtgtttgagaagcacgaccaggaccgcgacggcgccctctcgcccgtggagctgcaaagccttttcagtgtgttcccagcagcgccctggggccccgagctcccacgcacagtccgcacagaggccggccggttgcccctgcacggatacctctgccagtggaccctggtgacctacctggacgtccggagctgccttggacacctaggctacctgggctaccccaccctctgtgagcaggaccaggcccatgccatcacagtcactcgtgagaagaggctggaccaggagaagggacagacgcagcggagcgtcctcctgtgcaaggtggtaggggcccgtggagtgggcaagtctgccttcctgcaggcctttctcggccgcggcctggggcaccaggacacgagggagcagcctcccggctacgccatcgacacggtgcaggtcaatggacaggagaagtacttgatcctctgtgaggtgggcacagatggtctgctggccacatcgctggacgccacctgtgacgttgcctgcttgatgtttgatggcagtgacccaaagtcctttgcacattgtgccagcgtctacaagcaccattacatggacgggcagaccccctgcctctttgtctcctccaaggccgacctgcccgaaggtgtcgcggtgtctggcccatcaccggccgagttttgccgcaagcaccggctacccgctcccgtgccgttctcctgtgctggcccagccgagcccagcaccaccatcttcacccagctcgccaccatggccgccttcccacatttggtccacgcagagctgcatccctcttccttctggctccgggggctgctgggggttgtcggggccgccgtggccgcagtcctcagcttctcactctacagggtcctggtgaagagccagtgaggcccctggtacccaagccccctcccctgacctgggtgtgcctcgctgctggggctctgcaggggcagcacagctggggtgcaggccaggctgccactccgggaacgcctttgcgccgggactttttgtttctgaaggcagtcgatctgcagcggggccttatgctgccatgcactgccctggctcctgccggacccccagggtgggccgtggcaggtggctgagcaggagctcccaagtgccggccaccgctgtcagggattgcccacccctgggcatcatgtgtgtggggccggggagcacaggtgtgggagctggtgaccccagacccagaattctcagggctctacccccctttcctggtcctaggtggccagtgggtatgaggagggctggaaggcagagctttgggccaaaagcaggcgttggggggtcccccctcaagtttggagccgtttccgtggttgtagcagaggaccggaggttgggttcctgattaaacttcactgtgtgttttctatctcggatcccagtctctgaagacaacttgctttgattcaacctagaa

SEQ ID NO: 25571 - DNA, 4372 bp, Homo sapiens
  source 1..4372: mol_type = unassigned DNA
gggctccacggagtgaataggaggcggctcaggcttcctggctcgcgtgggcgccagaaagcggaacctcccgggccagtcgcgcggtggtcaccctcttgggagctggggaggaggctgcggaggctggcccggctccttcgggcgtcgcttcccggaccgggtgcgcggggtcccccggaacgtgtgttccaggtcctcccgcgccagtgttcgcagtccccgcctggtcgcggcggcgcctcgggcgcgggtgcaggcgcgcggcgcgcaggcggggggcgctgtggtcttggcgcggggaccgagccgctcggccagacccgcctcttttccctccccgccagcccgcccgcctgcccgccccccacgcgtcgtgtcgccgggaagccgggcggagacagagcgcttgggatccacggcgctcggaccgctgtcctccaacagcgcagggcagagcggctggcgccgccggagcgcggagccacgaccctccctggccgcctttgtctactggccgtgcggcccggaaccgccactctccagggccggggacgcgcccgcagctgtcggtgacagctcctccctaccgcaaccctccggggcggaggggcggtcgggccgggccctgctagcccgcgaccgcaagcccgcgctcgcggatcgatgcccccgcagcagggggaccccgcgttccccgaccgctgcgaggcgcctccggtgccgccgcgtcgggagcgcggtggacgcgggggacgcgggcctggggagccggggggccgggggcgtgcggggggtgccgaggggcgcggcgtcaagtgcgtgctggtcggcgacggcgcggtgggcaagacgagcctggtggtgagctacaccaccaacggctaccccaccgagtacatccctactgccttcgacaacttctccgcggtggtgtctgtggatgggcggcccgtgagactccaactctgtgacactgccggacaggatgaatttgacaagctgaggcctctctgctacaccaacacagacatcttcctgctctgcttcagtgtcgtgagcccctcatccttccagaacgtcagtgagaaatgggtgccggagattcgatgccactgtcccaaagcccccatcatcctagttggaacgcagtcggatctcagagaagatgtcaaagtcctcattgagttggacaaatgcaaagaaaagccagtgcctgaagaggcggctaagctgtgcgccgaggaaatcaaagccgcctcctacatcgagtgttcagccttgactcaaaaaaacctcaaagaggtctttgatgcagccatcgtcgctggcattcaatactcggacactcagcaacagccaaagaagtctaaaagcaggactccagataaaatgaaaaacctctccaagtcctggtggaagaagtactgctgtttcgtatgatgctggcaagacacccagaaaggctattttcagatgaaatcgatattagaagctatattagctgaaacaactccttttactgcgtagaacctatatcgagagtgtgtgtatatgtattataggaggagctctcaattttatgtattctttctgcctttaattttcttgtttgtttgagcttagggatgagatacttatgcaagatatttttgaagtaaattaaacatttttcacatctctggaaatttagagttctagacctctggttaatttatatctaatatgaagaagacacctctaatctggatgttaagaatgaagttctgctacattataatgtacagaagagcaaaagggaggaacactatggttaaccctctcttgattaagggctacttaatgcacagtgcattatgtacacaggtcaaccatggtaacaatagttcttagctttgaaactccatgcaaaccatgccttttttttaaggagcaaaaatctgagaaaaaaagtgagagacctctgcctacaaaacctcaaaccagtcacttttgtcaattgctaatacccagttacttatgatttaaaaacaaccaacagaaaacatcccactgactgtatggcactctgtagtcaaaaaaggaaacttccttattgggacttttctttcttagtccagttgtgttgacacatatgaacacagacaaagtgctatgcggaggaaagcaagtgttggtcagtagtttcatgttttagggagtggttcctgtggagatcagaaagtgacatttgctttcggtactgtaatacgtgcaccaaactgcctcaatcctaggtaacgagggcaacagggagcacctgtctggattgtttttaaacctccatactcaagctgtctcttcggcagggaggtgaatactcttgaaaggccaacagcaagtgtttgtgggacacaacacagataattttttcttaagtcggccaagatgtacttctctgtgtgcacacccatgcacactcatgcacacagatacataggtctgtatggctgtatttgctgttgattcagactttcacaccattaatggggaaaagcgtggccacaaaaacagatgctaggaagcttggcttcctcttcttgttgacccttttttgaaccaacatcttttttattatattcagagtatgtttttaagtgtatcttaatatatacattttttaggacatcttaaatctaaacaaaaaataaaatgaacatctcttgaaacctgttaaaacaaccagttaaagccacagatggctttcagggcagtagcagcagaggccagtggactctgaggactcctgaggggcggggcgtgtagccagccaggtgcatgccgggaccatggcccccatacttggctgcttcctgtgacagtgaaatacatccttcaaggtggcagctgttagggctgaatcttctggagaaaaaggtgccatctcaggagaatagcttttactctggtaggaatgcttccgagacaccacaaggcagcctgaacactcagttgcagggtcgggcttgcggtgggtgacccagagccaccaaagtcacatccacaactaatgagggaaatctgtaaagccagttagatagaagaattttatttttctgtgggttttgtgttgtcttttttatgttaaaaagaaatccagtttgtgtttttctatagaaaaagtaaaagatcaggttatactttaggttaggggttctatttattcctgttagtaaataaaattaacaaatttctttgtttaacaaaagattaatctttaaaccactaaaatacatagactgattgattattcaacacattggaattgatgtcggtcatagtttcctgaagcatttagttacaacctgaaggaataaaatgatttgtggaaatgcttaaaatagacctaactgaatacagtctcatcttgccgcgcctggcttacctatctgtggaaagctaggcttcccaggctgggctctgcctgtctggtgcctggaggtgtgggagggaagatgagttatttaactggtaagcgatttgaaacactatttttatattaaagtaaatggcatggagtatagtgcaaattcatttttaagatagaacacaaaacttgaaagaagttttatgcgtgtgacagtgtatggggctgcagttggtctccctggaggggacttccacacctcctgcctttaggccatgggtggaaagtgctcagtgaagtacacctgtgtggcccagttctgaaagctttatacagttgaattttaagtggggttgataacaccttggactgttagtgttaaaaatctagtgggttgacctttaaatgcaacagtttttaaaatatattgctgcattttatagaatagtaaaggtacgattatacttgagattttcctccatttttatttcttcgtgaacatagagtttggggccgaaaatgtttttaaagtatgtgtttgagttaaatataaagttggttcacttcaaagctaaaaaattgttaaacttgcagcttggtattgcagagaagattttataagaattttgctttagagaatgccactttggctgaactacaagtgtaggccaccattataatttataaatacagcatacttcaaaactgtttgttatctcttgttaccatgtatgtataaatggaccttttataaccttgttctctgcttgacagactcaagagaaactacccaggtattacacaagccaaaatgggagcaaggccttctctccagactatcgtaacctggtgccttaccaagttgtgcttttctgttttcaagtgtaaatgatgttgagcagaatgttgtacttgaaaatgctataagtgagatggtatgaaataaattctgacttatgaatataa

SEQ ID NO: 25572 - DNA, 3301 bp, Homo sapiens
  source 1..3301: mol_type = unassigned DNA
caaccctacccagatctcctcccccaggcctggtctcctcacaggacgccccctccccgctcttcctgccgggtttcctcttgccttttcctgtcccccacccagtgctgggagccgtggcagaggcaagagcagtggaactgacccaggccagtggagccagggcctccgggtgtgccggacccgaagcaggggccatgctgtctggtgaacggaaggagggcggaagcccccgcttcgggaagcttcatctccccgtgggcctgtggatcaattcccccaggaagcagctggcgaagctggggcggcgctggcccagcgcagcctctgtcaagtcttcttcgtcggacacggggagccgcagcagcgagccgctacctccgcccccgccgcacgtggagctgcggcgagtgggcgctgtcaaggcggccgggggagcctccggtagccgcgccaagcgcatctcccagctcttccggggctcggggaccgggaccacggggtccagcggcgcaggaggccctgggaccccggggggcgcgcagcgctgggccagcgagaagaagctgccggagctggcggcgggcgtggcccccgagcccccgctggctacccgcgccacggcgcctccgggggtcctcaagatcttcggcgccggactggcatcgggcgccaactacaagagcgtgctggccacggcgcgctccacggcgcgcgagctcgtggccgaggcgctagagcgctacggcctagcaggcagccccggcggtggccccggcgagagcagctgcgtggacgccttcgctttgtgcgacgctctgggccggcccgcggcggcgggcgtgggaagcggcgagtggcgggcggagcacctgcgcgtgctgggcgactccgagcgcccgctgctggtgcaggagctgtggcgggcgcggcccggctgggcgcggcgcttcgagttgcgcggccgcgaggaggcgcggcgcctggagcaggaggccttcggggccgcggacagcgaaggcaccggcgccccttcgtggcggccacagaagaaccgctcccgggcggcgtcgggtggggcagcgctggccagtcctggcccggggaccggatcaggggccccagctgggtctggaggcaaggagcgctcagaaaacttgtctttgcggcgcagcgtgtcggagcttagccttcaggggcggcggcggcggcagcaggagcggagacagcaggcacttagcatggccccaggggcagccgacgcccaaatcggaactgcagaccccggggacttcgatcagttgactcagtgcctcatccaggcccccagcaaccgcccctacttcctgctgctccagggctaccaggacgcccaggactttgtggtgtatgtgatgacgcgagagcagcacgtgtttgggcgaggtgggaactcgtctggccgcggggggtccccggctccctatgtggacaccttcctcaacgccccggacatcctgccgcgtcactgcacagtgcgcgcgggccctgagcacccggccatggtgcgcccgtcccggggcgccccagtcacgcacaacgggtgcctcctgctgcgggaggctgagctgcacccgggcgacctcctggggctgggcgagcacttcctgttcatgtacaaggacccccgcactgggggctcggggcctgcgaggccgccgtggctgcccgcgcgccccggggccacgccgccaggccctggctgggccttctcctgtcgcctgtgcggccgcggcctgcaggagcgcggcgaggcactggccgcctacctggacggccgtgagccagtcctgcgcttccggccgcgcgaggaggaggcgctgctgggcgagatcgtgcgcgccgcagccgccggctcgggagacctgccgcccctcgggcccgccacgctgctggcgctgtgcgtgcagcattccgcccgtgagctggagctgggccacctgccacgactgctgggccgcctggcccggctcatcaaggaggccgtctgggaaaagattaaggaaattggagaccgtcagccagaaaaccaccctgagggggtccccgaggtgcccctgactcctgaagctgtgtctgtggagctgcggccactcatgctgtggatggccaacaccacggagctgcttagctttgtgcaggagaaggtgctggaaatggagaaggaggctgaccaagaggacccacagctctgcaatgacttggaattatgtgatgaggccatggccctcctggatgaggtcatcatgtgtaccttccagcagtctgtctactacctcaccaagactctctattcaacgctgcctgctctcctggatagtaaccctttcacagctggtgcagagctgccggggcctggcgcggagctgggggccatgcctccaggattgagacctaccctgggcgtgttccaggcagccttggagctgaccagccagtgcgagctgcaccctgacctcgtgtctcagacttttggctacttgttcttcttctccaacgcatcccttctcaactcgctgatggaacgaggtcaaggccggcctttctatcaatggtcccgagctgttcaaatccgaaccaacctggacctcgtcttggactggctacagggagctgggctgggcgacattgccactgagttcttccggaaactctccatggctgtgaacctgctctgtgtgccccgcacttccctgctcaaggcttcatggagcagcctaagaaccgaccaccccaccttgacccccgcccagctgcaccatctgctcagccactatcagctgggccctggccgcgggccgccagccgcgtgggaccctccccctgcagagcgggaggctgtggacacaggggacatcttcgaaagcttctcctcgcacccgcccctcatcctccccctggggagctcgcgcctgcgcctcactggtccagtgacggacgatgccttgcaccgtgaactccgtaggctccgccgcctcctctgggatcttgagcagcaggagctgccagccaattatcgccatgggcctcccgtggccacgtctccttgagaaccaataccaaacgagcgcgcgaaccttgaaatgtcacgggcttctacggacaggagcccgcctgagcgcaaagctttctgggagttgtagttcttatcccgcgtggaatgttgggagattgagttttcgggaagtagcggatgggacggtgggagcatgggcttaggatgtgaatgccagggagcaataaaggtatccgtggtatcggc

SEQ ID NO: 25573 - DNA, 5614 bp, Homo sapiens
  source 1..5614: mol_type = unassigned DNA
aggcggcagggctgcggcacgggccgggcggcaccatggcggcggcggcgcctgctgctgcggcggcttcttccgaggcgccagcggcgagtgcgactgcagagcccgaggccggggaccaggacagtcgcgaggttcgagtgttgcagagcctgcggggcaagatctgtgaagcaaaaaatttattgccatatcttggaccccacaaaatgagagattgtttctgtaccataaatttggaccaggaagaagtttatcgtacccaagttgtggaaaaatctttaagcccatttttcagtgaagaattttactttgagattccaagaactttccagtatttgtctttctatgtttatgataagaatgttttacaaagagatctccgtataggaaaagtagccatcaaaaaagaagacttgtgtaatcacagtggcaaagaaacttggttttcattacagcctgttgactccaattcagaggttcagggtaaagttcaccttgaattaaaactgaatgaactgataacggagaatggaactgtatgccagcagcttgttgtacacatcaaggcatgccatgggttgcctctcataaatggccaaagctgtgacccttatgcaacagtttctctagtgggcccttctaggaatgaccaaaagaagacaaaagtaaagaagaaaacaagcaatccgcagtttaatgaaatcttttattttgaggtaaccagatccagtagttacaccagaaagtcccagttccaggtagaagaggaggacattgaaaagctagaaatcaggatcgacttgtggaacaatggaaacctagtccaagatgttttcctaggtgagattaaggttcctgtgaacgtattaagaactgattcctctcatcaagcctggtacttgctacagccaagagacaatggaaacaagtcatccaaaactgatgacctggggtctcttcgattaaatatatgttatacagaagactacgtgcttccttcagagtactatggtcctttgaaaactttgctgctaaaatcaccagatgttcaaccaatatctgcctcagctgcttacattttgagtgaaatatgtcgagataaaaatgatgctgttttgccccttgtacgactgctgctgcaccatgataaacttgttccttttgccactgctgtggctgaattagacttgaaggatacacaagatgcaaacacaatttttagaggaaattccctggctacccgatgtctggatgagatgatgaaaatagtgggagggcactacctgaaagtaacattaaaacctattcttgatgagatatgtgactcctcaaaatcctgtgaaatcgatcctattaaattgaaagagggagataatgtagaaaataataaggagaatctgcgctactatgtagacaagttattcaatacaattgtaaaatcaagtatgagctgccccactgtaatgtgtgatatcttttattctctaaggcagatggctactcagagatttcctaatgaccctcatgttcagtattctgcagtgagcagctttgtatttcttcgtttctttgctgtagccgtagtatcacctcatacttttcatttgcgacctcatcatccagatgcacagacaattagaacattaactctcatctcaaaaactatacaaactttgggaagctgggggagtctgtccaaaagcaagtcaagtttcaaagagacattcatgtgtgaatttttcaaaatgtttcaagaagaaggatatattatagcagttaaaaagttcttggatgaaatttcatctactgaaactaaagagtccagtggtacgagtgagcctgtgcacctgaaagaaggtgagatgtataaaagagctcaaggaagaactcggattggaaaaaagaattttaagaaacgatggttctgcttaacaagcagagagctcacctaccacaaacagccaggcaaagatgcaatctacacaatcccagtaaaaaacattcttgctgtggaaaaactggaagagagctctttcaacaagaaaaatatgttccaagtaatacatacggagaaaccactctatgtccaggcaaataactgtgtagaagctaatgaatggatagacgtactctgcagggtgagccgatgcaatcaaaacaggctcagtttttatcatccctctgtgtatctgaacggaaattggctctgctgtcaggagactggtgaaaacactctcggctgcaagccatgtactgcaggtgtccctgcagacatccaaatagatattgatgaagacagagaaacagaaagaatttattccctttttaccctcagtttacttaagctgcagaagatggaagaggcttgtggaactattgcagtctatcaaggaccacagaaagagcctgatgattattctaactttgtaatcgaggattctgtaacaacctttaagacaattcagcaaataaaaagcataattgagaagctggatgaacctcatgaaaaatataggaagaaaagatccagtagtgcaaaatatgggagcaaggaaaatccaattgttgggaaagcatcttagagtttaacagattggttcagaagaactggaaaatattatttttcttggagcttttcaattcatcatgtattttgttcatggtatttaagaatgagcatccgcttcaatgtcatctgcctccacattgtatttaatatttaataattgaaattaattgtttgggaatcctggtattgatgtattactagagaatttaaagcccaagattcccttcatacctgtgtgaccaaatccatgtttctgcaacttctttttaatcgaaagaatcttcctagaaaagctttgtaacaaagggagaactcctccgtagcaagaaaccatctcttcttgtaacactctgttctgtggacttgttttcactaccatcagtgcctgctctatactgccaacattgtgttttactagaaaattccaattcatgacagttcagagcttttcatttagttcatgtagaccctcccactttaaaaaagaaaaaaaataagaagtgtttttcctttggtccatcagtcattacaggttccattcaagacagtgatagaaactttagaaaactgccagagcatacttgaaagttggtagatccttttgcctaaagatgtaaacaaaactcaagacagaaggaatcagggaatatgtgctattgtgtgcatcttgtttacatttgggatcagtgatggcaaaagaagtaatgagaccactgaaattgttttcattgttttaaataccaggtactcattttcttgatttgaaagtttaacatgacttctaaggacatctcttcaaaaagaaagtaaacagggaatgaaggtggtgggaaaatcacttcacttcacccactatttcatgttgtaataagggccaccataaggatgccctcctcatagtgttcggttctgatcttcctcgagaacagtcacttggcgcactttaataatctggactgctccagatttgactttagatactccatggtatctagtctttatgatcagttgaatgatcagtgtttaagtctaaaaataatgctttcctgaaaatgtttatatttcattgctgtttccttattgcctgctagccaaatggaatttgggcaagcaactctttgaagacttttttaccctagaaatttacttttgtcctaaaaaccctaactgtaaataagcagtcgaagcaagttgccaccttgaagttgagggatacactttgcttcatcagtattaaaaaccatggtactcttattttgtcttttttaattcaaaacattttctaaatgtggtactttgaaccttggagtatttacatgtttctgttcaaaactgtgacttattaatgtaagtctgctagtagtactttttttgtctgagcataagctatatttcaagatatactttgccaattttgttattggtgggtaatcatttttaaattatattgttattaggtaattatttttaaagactactggcatacaatcaaagttgttccataaaagaatataactgagcaatgtatttctctaaatgacttgtaaaaatcaatgaattatgtttaagtctgcattatggtaggttattactcccagctcattttaaagacaagtttgaaagagtcctttaaattttataagcttgtagattccataaactacactgatttatacatttgaaagaatttagccatttaataaatttcttattctcaaattgcatttagattaaaattccttttaagagtgtctgaaatgtctgcctgcgaagaacatgtaaacattgccagataccagtcattattctttagtggctttttagtcctctgcttttttttttaaggcaaaagaaatatgcatctagcatttctaataccaaatccccaattgtgattgttttaaagatcatggtatgatcacagggaccaaggctgtgtgcatatataactctggatttgaaaggaggagagttcagccatctagttcttttcttcacatgacacttttaaacagccagtttgactggaattaaccaacttggcacagcctaaaaaaggagtaatgtgaaattaaattatttttctttgaaagtcttttgaaataagagaccatgtaagtaggaccctaagacaaccaaggaatttgcttccagggccctcattcctctgctgttacttacaaatgttttaatttttactacctgatattctttctctaccttttccacatttgaaaatatacaaggcagctcacttcatcctaaaaacctaaaaactccaggaaggaaagaaaaggatgatatggggaaatttgccataaatgccggttctggttcttagtttagccatttccatcagttgaaattgtggtgtgatctgttgcttgtttcgttgttgttttgtttttgtgtagctttgttttttaatattcatttaataagatgatgggcaatagcaaacatttttactcccaggaatataatttatcaaattgaactattttatttgccaaagaaacttgtttttaatatcacgggtaatgggtaagtgtgaaaactaggcttttttttatgaaacaaaaaaaggtgacgaataatatggcttttgtttctgtttctgaagcctgatttcatttatgccaggttttgaaaaacagatctttttcttaagtgaaagcacctttaatttgctctaacggtacatcctgtaaagacagaattctgcatagccttttaggtgtttttacagtatgtgaaaaatacaagactcattctagagttaaattaccaatcttggttgatattatctgcttccatttttattaatttggaaattaatatgttgctagtaaatattggtttttacagtacccagtttgaaaatgtaagttatcaaaacttaatgtagtgaatttgtgtaaccatgttgtattgttgagaatgtatttttatttaaattttattttcttatcaagagtattataaaaattaacttttgtaactgtcgcttggaaataactcaaataaattacaagaagcctg

SEQ ID NO: 25574 - DNA, 2119 bp, Homo sapiens
  source 1..2119: mol_type = unassigned DNA
aggcggcagggctgcggcacgggccgggcggcaccatggcggcggcggcgcctgctgctgcggcggcttcttccgaggcgccagcggcgagtgcgactgcagagcccgaggccggggaccaggacagtcgcgaggttcgagtgttgcagagcctgcggggcaagatctgtgaagcaaaaaatttattgccatatcttggaccccacaaaatgagagattgtttctgtaccataaatttggaccaggaagaagtttatcgtacccaagttgtggaaaaatctttaagcccatttttcagtgaagaatgttttacaaagagatctccgtataggaaaagtagccatcaaaaaagaagacttgtgtaatcacagtggcaaagaaacttggttttcattacagcctgttgactccaattcagaggttcagggtaaagttcaccttgaattaaaactgaatgaactgataacggagaatggaactgtatgccagcagcttgttgtacacatcaaggcatgccatgggttgcctctcataaatggccaaagctgtgacccttatgcaacagtttctctagtgggcccttctaggaatgaccaaaagaagacaaaagtaaagaagaaaacaagcaatccgcagtttaatgaaatcttttattttgaggtaaccagatccagtagttacaccagaaagtcccagttccaggtagaagaggaggacattgaaaagctagaaatcaggatcgacttgtggaacaatggaaacctagtccaagatgttttcctaggtgagattaaggttcctgtgaacgtattaagaactgattcctctcatcaagcctggtacttgctacagccaagagacaatggaaacaagtcatccaaaactgatgacctggggtctcttcgattaaatatatgttatacagaagactacgtgcttccttcagagtactatggtcctttgaaaactttgctgctaaaatcaccagatgttcaaccaatatctgcctcagctgcttacattttgagtgaaatatgtcgagataaaaatgatgctgttttgccccttgtacgactgctgctgcaccatgataaacttgttccttttgccactgctgtggctgaattagacttgaaggatacacaagatgcaaacacaatttttagaggaaattccctggctacccgatgtctggatgagatgatgaaaatagtgggagggcactacctgaaagtaacattaaaacctattcttgatgagatatgtgactcctcaaaatcctgtgaaatcgatcctattaaattgaaagagggagataatgtagaaaataataaggagaatctgcgctactatgtagacaagttattcaatacaattgtaaaatcaagtatgagctgccccactgtaatgtgtgatatcttttattctctaaggcagatggctactcagagatttcctaatgaccctcatgttcagtattctgcagtgagcagctttgtatttcttcgtttctttgctgtagccgtagtatcacctcatacttttcatttgcgacctcatcatccagatgcacagacaattagaacattaactctcatctcaaaaactatacaaactttgggaagctgggggagtctgtccaaaagcaagtcaagtttcaaagagacattcatgtgtgaatttttcaaaatgtttcaagaagaaggatatattatagcagttaaaaagttcttggatgaaatttcatctactgaaactaaagagtccagtggtacgagtgagcctgtgcacctgaaagaaggtgagatgtataaaagagctcaaggaagaactcggattggaaaaaagaattttaagaaacgatggttctgcttaacaagcagagagctcacctaccacaaacagccaggtagttgtgtttatgctttattgtggggtttttcctggttctcagtgaaggtttctttgccgcttattgtgactctagtgaatcctttcagtaatattactgtagtttatggtttctcacactgatacatacgtactaagaatgaaaaaatatttgacagtaaccccatgtatattatgtttttctcacattaaatttcttgagtttctg

SEQ ID NO: 25575 - DNA, 3054 bp, Homo sapiens
  source 1..3054: mol_type = unassigned DNA
aggcggcagggctgcggcacgggccgggcggcaccatggcggcggcggcgcctgctgctgcggcggcttcttccgaggcgccagcggcgagtgcgactgcagagcccgaggccggggaccaggacagtcgcgaggttcgagtgttgcagagcctgcggggcaagatctgtgaagcaaaaaatttattgccatatcttggaccccacaaaatgagagattgtttctgtaccataaatttggaccaggaagaagtttatcgtacccaagttgtggaaaaatctttaagcccatttttcagtgaagaattttactttgagattccaagaactttccagtatttgtctttctatgtttatgataagaatgttttacaaagagatctccgtataggaaaagtagccatcaaaaaagaagacttgtgtaatcacagtggcaaagaaacttggttttcattacagcctgttgactccaattcagaggttcagggtaaagttcaccttgaattaaaactgaatgaactgataacggagaatggaactgtatgccagcagcttgttgtacacatcaaggcatgccatgggttgcctctcataaatggccaaagctgtgacccttatgcaacagtttctctagtgggcccttctaggaatgaccaaaagaagacaaaagtaaagaagaaaacaagcaatccgcagtttaatgaaatcttttattttgaggtaaccagatccagtagttacaccagaaagtcccagttccaggtagaagaggaggacattgaaaagctagaaatcaggatcgacttgtggaacaatggaaacctagtccaagatgttttcctaggtgagattaaggttcctgtgaacgtattaagaactgattcctctcatcaagcctggtacttgctacagccaagagacaatggaaacaagtcatccaaaactgatgacctggggtctcttcgattaaatatatgttatacagaagactacgtgcttccttcagagtactatggtcctttgaaaactttgctgctaaaatcaccagatgttcaaccaatatctgcctcagctgcttacattttgagtgaaatatgtcgagataaaaatgatgctgttttgccccttgtacgactgctgctgcaccatgataaacttgttccttttgccactgctgtggctgaattagacttgaaggatacacaagatgcaaacacaatttttagaggaaattccctggctacccgatgtctggatgagatgatgaaaatagtgggagggcactacctgaaagtaacattaaaacctattcttgatgagatatgtgactcctcaaaatcctgtgaaatcgatcctattaaattgaaagagggagataatgtagaaaataataaggagaatctgcgctactatgtagacaagttattcaatacaattgtaaaatcaagtatgagctgccccactgtaatgtgtgatatcttttattctctaaggcagatggctactcagagatttcctaatgaccctcatgttcagtattctgcagtgagcagctttgtatttcttcgtttctttgctgtagccgtagtatcacctcatacttttcatttgcgacctcatcatccagatgcacagacaattagaacattaactctcatctcaaaaactatacaaactttgggaagctgggggagtctgtccaaaagcaagtcaagtttcaaagagacattcatgtgtgaatttttcaaaatgtttcaagaagaaggatatattatagcagttaaaaagttcttggatgaaatttcatctactgaaactaaagagtccagtggtacgagtgagcctgtgcacctgaaagaaggtgagatgtataaaagagctcaaggaagaactcggattggaaaaaagaattttaagaaacgatggttctgcttaacaagcagagagctcacctaccacaaacagccaggtagcaaagatgcaatctacacaatcccagtaaaaaacattcttgctgtggaaaaactggaagagagctctttcaacaagaaaaatatgttccaagtaatacatacggagaaaccactctatgtccaggcaaataactgtgtagaagctaatgaatggatagacgtactctgcagggtgagccgatgcaatcaaaacaggctcagtttttatcatccctctgtgtatctgaacggaaattggctctgctgtcaggagactggtgaaaacactctcggctgcaagccatgtactgcaggtgtccctgcagacatccaaatagatattgatgaagacagagaaacagaaagaatttattccctttttaccctcagtttacttaagctgcagaagatggaagaggcttgtggaactattgcagtctatcaaggaccacagaaagagcctgatgattattctaactttgtaatcgaggattctgtaacaacctttaagacaattcagcaaataaaaagcataattgagaagctggatgaacctcatgaaaaatataggaagaaaagatccagtagtgcaaaatatgggagcaaggaaaatccaattgttgggaaagcatcttagagtttaacagattggttcagaagaactggaaaatattatttttcttggagcttttcaattcatcatgtattttgttcatggtatttaagaatgagcatccgcttcaatgtcatctgcctccacattgtatttaatatttaataattgaaattaattgtttgggaatcctggtattgatgtattactagagaatttaaagcccaagattcccttcatacctgtgtgaccaaatccatgtttctgcaacttctttttaatcgaaagaatcttcctagaaaagctttgtaacaaagggagaactcctccgtagcaagaaaccatctcttcttgtaacactctgttctgtggacttgttttcactaccatcagtgcctgctctatactgccaacattgtgttttactagaaaattccaattcatgacagttcagagcttttcatttagttcatgtagaccctcccacttt

SEQ ID NO: 25576 - DNA, 4191 bp, Homo sapiens
  source 1..4191: mol_type = unassigned DNA
tgcaggcgggcggaccctcggccgcgctcggggctccggcgccgccgctcctcctgctcggcctgagctgcccgggctcggcgcgcgcttggggcgaggctcggcgggcgcggacgcgcagcatggcggtggaggacgaggggctccgggtcttccagagcgtgaagatcaagatcggtgaagccaaaaaccttccctcttacccggggccgagcaagatgagggattgctactgcacggtgaacctggaccaggaggaggttttcaggaccaaaattgtggaaaagtcactctgcccgttttacggagaagacttttactgtgaaattcctcggagctttcgtcacctgtccttctacattttcgatagagacgttttccggagggattccatcatagggaaggtggccatccagaaggaggacttgcagaagtaccacaacagggacacctggttccagctgcagcacgtggacgctgactcggaagtgcagggcaaagtgcacctggagctgcggctgagcgaggtcatcacagacactggggtcgtctgccacaagctcgccacacgcatcgtcgagtgccagggcctccccatcgtgaatgggcaatgtgacccctacgccaccgtgacgctggcaggacccttcagatcagaagcaaagaagacgaaagtgaagaggaagaccaacaatccccagttcgatgaagtgttttattttgaggtgacccggccctgtagctacagcaagaagtcccactttgactttgaggaggaagacgtggacaagctcgaaatcagagttgacctctggaatgccagtaacctgaagtttggagatgaattcctgggagaactaaggatcccgttgaaagtcctgcggcagtccagctcctacgaggcgtggtacttcctccagccccgggacaatggtagcaagagcctaaagccagacgacctgggctccctgcggctgaacgtggtatacacggaagaccacgtgttttcttctgactattacagccctctgcgggacctgctgttgaagtctgcggatgtggagcccgtgtcagcgtctgcggcccacatcctgggcgaggtttgccgggagaagcaggaggcggccgtcccgctggtgcggctcttcctacactatggcagggtggtgccattcatcagtgccatcgccagcgcggaggtgaagcggacccaggaccccaacaccatcttccgaggaaactcactggcgtccaagtgcatcgacgagaccatgaagctggcggggatgcattacctgcatgtcaccctgaagcccgccatcgaggagatatgccagagccacaaaccctgtgaaatcgaccctgtgaagttgaaagacggagaaaaccttgaaaacaacatggagaacctacggcagtatgtggaccgcgtcttccacgccatcactgagtctggggtgagctgcccgaccgtcatgtgtgacatcttcttctccctccgggaggcggcggccaagcgcttccaggatgacccggacgtcaggtacactgcagtgagcagcttcatcttcctgaggttctttgcgcccgccattctctcccccaacctcttccagctcacgccgcaccacacggacccccagacgtccaggacgctgacattgatctccaagaccgttcagaccctcggcagcctgtccaagtccaaatctgcgagttttaaggagtcctacatggctacattttatgaattcttcaatgagcagaaatatgctgatgcggtgaagaacttcttggatctgatttcgtcctcggggagaagagaccccaagagtgttgagcagcccatcgtgcttaaagaagggttcatgatcaagagggcccaaggacggaagcgctttgggatgaagaattttaagaagagatggtttcgcttgaccaaccatgaatttacctaccacaaaagcaaaggggaccagcctctctacagcattcccatcgagaacatcctggcagtggagaagctggaggaggagtctttcaaaatgaaaaacatgttccaggtcatccagccagagcgtgcgctgtacatccaggccaacaactgcgtggaggccaaggactggatcgacattctcaccaaagtgagccagtgcaaccagaagcgcctcaccgtctaccacccgtccgcctacctgagcggccactggctgtgctgtagggcgccatccgactcggctccgggctgctcgccctgcactggcggcctcccagccaacatccagctggacattgatggggaccgtgagacggagcgtatctactccctcttcaacttgtacatgagcaagctggagaagatgcaggaggcctgtgggagcaaatctgtgtatgacggcccggagcaggaggagtattcgacgttcgtcattgacgacccccaggagacctacaagacgctaaagcaagtcatcgctggggttggggctttggagcaggagcacgcccagtataagagggacaagttcaagaagacgaaatatggaagccaggagcaccccatcggagacaagagcttccagaactacatccggcagcagtccgagacctccactcattccatttaaagtctgcgggacgcgcccagtggcgccagcaagctgcccatgcaaagccgcagcctttgggagggagaagagaaggaagagcgcagagccggcaaagtgagatgcacgccgtcccggcccatagacaagtggcgctggggtttccctctcccagaaccgctgccaccaccgccacgccctccgcagaaagcccacctggccctgtggaacgtgtcgtcatttgattctgtgctttttgctccttgtttgtggggatctggggatcagctgaaggatcaggaagtgtgggctgtgccctagccacaccacagccagcctcagggagccacggcccgtctagtcgactgtgacatgcacctccggccgtgtgtgcgtcagtctcgtgcacgtctgtcttgcgtgcacggtgcgtgtgacgctgggctctgtggctctgtgcccgggaggcctgctggccccgcctcggctttcggcttcatcacattgggaggttcagagcattactctcccactgtgcctgccatccaggcagccatgggaggcggcctccctgttccactttcgaggttcgtttgattcctggctgaggggtcagttttatggctgggaggtgcagaattacacagaagtcccagtctgaggatgtccttggtgcttgggggatacgggttctgtccacagagtcccttggagggaaaggtgtgggctccagcttctccaggcgtctgcggagcccacagttgaagcccacatcgttttgctgttgaatggggtttaaaatcagaattaacatttgccaccccccgtggaagtttgaagattttaaaaatagaaatgtacatttttcaagctgtttttctttatgtttttgaaggaccatttttaattagctctttgatacaaagtaactcagaacgtcaaaacctatacccactaaagggaaggctgccgggaaggcaaatggaacaggaatggagcctgtctcaggaaggccagctgcaggtcctccagaaaatcaaagaagggaagaaactctgagtttgaggtacaggggcttcggggtgcagacgtccctccagggcccatggtcagtattgcacctgtgttatgaacccccagatgctgtgcagggcaggggcgggggctgctgttttattggggaggggagcatcctaaaaatggggtccaggcagacccctccagacctcacactgccgaggaggcctttcccaaagggcgtcctcccgggatgcagacggcaggtgtgtgggaagcgccgtttaaatacacagcacgacgtatccttgtaccgacttctcccggttcttgtttgaaaatactgtagttcaggctcttgatctagatggcagataggaactttcttgtcacaaaaatactggaggaaaatgttgtaaaaatagacttttggacacacagctgttggggctgcactgagctgcaatttttaacatggatttataacttaatgtttctgtttataaaatactaatgatttgcaatgtattttactggccaattaaaacagatgttttattctttctga

SEQ ID NO: 25577 - DNA, 2931 bp, Homo sapiens
  source 1..2931: mol_type = unassigned DNA
acaaaaccagtgccttggaggtgatggcatcagaagcctgaggcagggaaatgggcttgcattttgtccccccacttttttttttattaaatgcatcatagcaaaagtagattaaaaagaaagagtctcagccccagatgacagtgagcaaggagaaggaggtgaagccaaaaaccttccctcttacccggggccgagcaagatgagggattgctactgcacggtgaacctggaccaggaggaggttttcaggaccaaaattgtggaaaagtcactctgcccgttttacggagaagacttttactgtgaaattcctcggagctttcgtcacctgtccttctacattttcgatagagacgttttccggagggattccatcatagggaaggtggccatccagaaggaggacttgcagaagtaccacaacagggacacctggttccagctgcagcacgtggacgctgactcggaagtgcagggcaaagtgcacctggagctgcggctgagcgaggtcatcacagacactggggtcgtctgccacaagctcgccacacgcatcgtcgagtgccagggcctccccatcgtgaatgggcaatgtgacccctacgccaccgtgacgctggcaggacccttcagatcagaagcaaagaagacgaaagtgaagaggaagaccaacaatccccagttcgatgaagtgttttattttgaggtgacccggccctgtagctacagcaagaagtcccactttgactttgaggaggaagacgtggacaagctcgaaatcagagttgacctctggaatgccagtaacctgaagtttggagatgaattcctgggagaactaaggatcccgttgaaagtcctgcggcagtccagctcctacgaggcgtggtacttcctccagccccgggacaatggtagcaagagcctaaagccagacgacctgggctccctgcggctgaacgtggtatacacggaagaccacgtgttttcttctgactattacagccctctgcgggacctgctgttgaagtctgcggatgtggagcccgtgtcagcgtctgcggcccacatcctgggcgaggtttgccgggagaagcaggaggcggccgtcccgctggtgcggctcttcctacactatggcagggtggtgccattcatcagtgccatcgccagcgcggaggtgaagcggacccaggaccccaacaccatcttccgaggaaactcactggcgtccaagtgcatcgacgagaccatgaagctggcggggatgcattacctgcatgtcaccctgaagcccgccatcgaggagatatgccagagccacaaaccctgtgaaatcgaccctgtgaagttgaaagacggagaaaaccttgaaaacaacatggagaacctacggcagtatgtggaccgcgtcttccacgccatcactgagtctggggtgagctgcccgaccgtcatgtgtgacatcttcttctccctccgggaggcggcggccaagcgcttccaggatgacccggacgtcaggtacactgcagtgagcagcttcatcttcctgaggttctttgcgcccgccattctctcccccaacctcttccagctcacgccgcaccacacggacccccagacgtccaggacgctgacattgatctccaagaccgttcagaccctcggcagcctgtccaagtccaaatctgcgagttttaaggagtcctacatggctacattttatgaattcttcaatgagcagaaatatgctgatgcggtgaagaacttcttggatctgatttcgtcctcggggagaagagaccccaagagtgttgagcagcccatcgtgcttaaagaagggttcatgatcaagagggcccaaggacggaagcgctttgggatgaagaattttaagaagagatggtttcgcttgaccaaccatgaatttacctaccacaaaagcaaaggggaccagcctctctacagcattcccatcgagaacatcctggcagtggagaagctggaggaggagtctttcaaaatgaaaaacatgttccaggtcatccagccagagcgtgcgctgtacatccaggccaacaactgcgtggaggccaaggactggatcgacattctcaccaaagtgagccagtgcaaccagaagcgcctcaccgtctaccacccgtccgcctacctgagcggccactggctgtgctgtagggcgccatccgactcggctccgggctgctcgccctgcactggcggcctcccagccaacatccagctggacattgatggggaccgtgagacggagcgtatctactccctcttcaacttgtacatgagcaagctggagaagatgcaggaggcctgtgggagcaaatctgtgtatgacggcccggagcaggaggagtattcgacgttcgtcattgacgacccccaggagacctacaagacgctaaagcaagtcatcgctggggttggggctttggagcaggagcacgcccagtataagagggacaagttcaagaagacgaaatatggaagccaggagcaccccatcggagacaagagcttccagaactacatccggcagcagtccgagacctccactcattccatttaaagtctgcgggacgcgcccagtggcgccagcaagctgcccatgcaaagccgcagcctttgggagggagaagagaaggaagagcgcagagccggcaaagtgagatgcacgccgtcccggcccatagacaagtggcgctggggtttccctctcccagaaccgctgccaccaccgccacgccctccgcagaaagcccacctggccctgtggaacgtgtcgtcatttgattctgtgctttttgctccttgtttgtggggatctggggatcagctgaaggatcaggaagtgtgggctgtgccctagccacaccacagccagcctca

SEQ ID NO: 25578 - DNA, 1156 bp, Homo sapiens
  source 1..1156: mol_type = unassigned DNA
ggcctgagctgcccgggctcggcgcgcgcttggggcgaggctcggcgggcgcggacgcgcagcatggcggtggaggacgaggggctccgggtcttccagagcgtgaagatcaagatcggtgaagccaaaaaccttccctcttacccggggccgagcaagatgagggattgctactgcacggtgaacctggaccaggaggaggttttcaggaccaaaattgtggaaaagtcactctgcccgttttacggagaagacttttactgtgaaattcctcggagctttcgtcacctgtccttctacattttcgatagagacgttttccggagggattccatcatagggcaaagtgcacctggagctgcggctgagcgaggtcatcacagacactggggtcgtctgccacaagctcgccacacgcatcgtcgagtgccagggcctccccatcgtgaatgggcaatgtgacccctacgccaccgtgacgctggcaggacccttcagatcagaagcaaagaagacgaaagtgaagaggaagaccaacaatccccagttcgatgaagtgttttattttgaggtgacccggccctgtagctacagcaagaagtcccactttgactttgaggaggaagacgtggacaagctcgaaatcagagttgacctctggaatgccagtaacctgaagtttggagatgaattcctgggagaactaaggatcccgttgaaagtcctgcggcagtccagctcctacgaggcgtggtacttcctccagccccgggacaatggtagcaagagcctaaagccagacgacctgggctccctgcggctgaacgtggtatacacggaagaccacgtgttttcttctgactattacagccctctgcgggacctgctgttgaagtctgcggatgtggagcccgtgtcagcgtctgcggcccacatcctgggcgaggtttgccgggagaagcaggaggcggccgtcccgctggtgcggctcttcctacactatggcagggtggtgccattcatcagtgccatcgccagcgcggaggtgaagcggacccaggaccccaacaccatcttccgaggaaactcactggcgtccaagtgcatcgacgagaccatgaagctggcggggatgcattacctgcatgtcaccctg
